United States Patent Application Publication US 2024/0327476 A1 - sequence listing, part 26

SEQ ID NO: 29209 - DNA, 1705 bp, Homo sapiens
  source 1..1705: mol_type = unassigned DNA
cggctcccagccccccgggcccccggcggggctctgcgctgccggagcttgggcgtctgctgctgtcccggagcgccaagtcgtccgaggtccggccgcccggccggggcggggccagggaggcccggccttcccgcttcctgcctgagccgcaggcccgcccctgcgtcctccgcccgcctctttcccgccgccgcctgggaggggacccgggctgccaggcgcccagctgtgcccagatggatgggacagagacccggcagcggaggctggacagctgtggcaagccaggggagctggggcttcctcaccccctcagcacaggaggactccctgtagcctcagaagatggagctctcagggcccctgagagccaaagcgtgacccccaagccactggagactgagcctagcagggagaccacctggtccataggccttcaggtgaccgtgcccttcatgtttgcaggcctgggactgtcctgggccggcatgcttctggactatttccaggccaacactggacaaattgatgacccccaggagcagcacagagtcatcagcagcaacctggccctcatccaggtgcaggccactgtcgtggggctcttggctgctgtggctgcgctgctgttgggcgtggtgtctcgagaggaagtggatgtcgccaaggtggagttgctgtgtgccagcagtgtcctcactgccttccttgcagcctttgccctgggggtgctgatggtctgtatagtgattggtgctcgaaagctcggggtcaacccagacaacattgccacgcccattgcagccagcctgggagacctcatcacactgtccattctggctttggttagcagcttcttctacagacacaaagatagtcggtatctgacgccgctggtctgcctcagctttgcggctctgaccccagtgtgggtcctcattgccaagcagagcccacccatcgtgaagatcctgaagtttggctggttcccaatcatcctggccatggtcatcagcagtttcggaggactcatcttgagcaaaaccgtttctaaacagcagtacaaaggcatggcgatatttacccccgtcatatgtggtgttggtggcaatctggtggccattcagaccagccgaatctcaacctacctgcacatgtggagtgcacctggcgtcctgcccctccagatgaagaaattctggcccaacccgtgttctactttctgcacgtcagaaatcaattccatgtcagctcgagtcctgctcttgctggtggtcccaggccatctgattttcttctacatcatctacctggtggagggtcagtcagtcataaacagccagacctttgtggtgctctacctgctggcaggcctgatccaggtgacaatcctgctgtacctcgcagaagtgatggttcggctgacttggcaccaggccctggatcctgacaaccactgcatcccctaccttacagggctgggggacctgctcggttcaagctccgtgggccacactgctgctgtgccaagaaggtgtacagcctccccaggatggggcctcatacaacccttcatctgcactcaacatttaatcgtgtccttgctgtctttttattttcctttttgtttgttagcaaaaacctctatttagatttcaataatcagagaagtgtaaaataaaacagattatattgtacttga

SEQ ID NO: 29210 - DNA, 2169 bp, Homo sapiens
  source 1..2169: mol_type = unassigned DNA
gcctgggaggggacccgggctgccaggcgcccagctgtgcccagatggatgggacagagacccggcagcggaggctggacagctgtggcaagccaggggagctggggcttcctcaccccctcagcacaggaggactccctgtagcctcagaagatggagctctcagggcccctgagagccaaagcgtgacccccaagccactggagactgagcctagcagggagaccacctggtccataggccttcaggtgaccgtgcccttcatgtttgcaggcctgggactgtcctgggccggcatgcttctggactatttccagcactggcctgtgtttgtggaggtgaaagaccttttgacattggtgccgcccctggtgggcctgaaggggaacctggagatgacactggcatccagactctccacagctgccaacactggacaaattgatgacccccaggagcagcacagagtcatcagcagcaacctggccctcatccaggtgcaggccactgtcgtggggctcttggctgctgtggctgcgctgctgttgggcgtggtgtctcgagaggaagtggatgtcgccaaggtggagttgctgtgtgccagcagtgtcctcactgccttccttgcagcctttgccctgggggtgctgatggtctgtatagtgattggtgctcgaaagctcggggtcaacccagacaacattgccacgcccattgcagccagcctgggagacctcatcacactgtccattctggctttggttagcagcttcttctacagacacaaagatagtcggtatctgacgccgctggtctgcctcagctttgcggctctgaccccagtgtgggtcctcattgccaagcagagcccacccatcgtgaagatcctgaagtttggctggttcccaatcatcctggccatggtcatcagcagtttcggaggactcatcttgagcaaaaccgtttctaaacagcagtacaaaggcatggcgatatttacccccgtcatatgtggtgttggtggcaatctggtggccattcagaccagccgaatctcaacctacctgcacatgtggagtgcacctggcgtcctgcccctccagatgaagaaattctggcccaacccgtgttctactttctgcacgtcagaaatcaattccatgtcagctcgagtcctgctcttgctggtggtcccaggccatctgattttcttctacatcatctacctggtggagggtcagtcagtcataaacagccagacctttgtggtgctctacctgctggcaggcctgatccaggtgacaatcctgctgtacctcgcagaagtgatggttcggctgacttggcaccaggccctggatcctgacaaccactgcatcccctaccttacagggctgggggacctgctcggtactggcctcctggcactctgctttttcactgactggctactgaagagcaaggcagagctgggtggcatctcagaactggcatctggacctccctaactgggccccgctggtcccatttgctcattagaatttcctctcacatcagtgggatacagaattcagtttctcccttgccaggtccttgggatggttgacccctgcctctgcagtagccttttgtgagtctgctaaggtagctctcacacacctcggctctggggttgatacctgagcctgcaatagagccctgaaatcaagagcatggcttgagtgtgtgaatatgatgtgtgcacatgcttaatgagcgtgcaagtgtgcacacgtttgtggagaggagggtgttctggcctgagaaggtaaagaagaggcatgtccagtatgctttgcagggtgtgtttgctcttttccatgcccatgcaacccagattggggtggagcaggaaggagctcttttctgttcccaagcctcagaactcttgagctgtggcttacttgctgtcttcaccaggttcaagctccgtgggccacactgctgctgtgccaagaaggtgtacagcctccccaggatggggcctcatacaacccttcatctgcactcaacatttaatcgtgtccttgctgtctttttattttcctttttgtttgttagcaaaaacctctatttagatttcaataatcagagaagtgtaaaataaaacagattatattgtacttgacc

SEQ ID NO: 29211 - DNA, 2330 bp, Homo sapiens
  source 1..2330: mol_type = unassigned DNA
actgtctgaggagagcctgaccttcagggagggacagcagggcctggcagagtctctgtaatgaggccgtgagtcacactggcctttgttcctcactcatctgtgctggccctcagccgaggggctgttggggaactctctgcaggcacagggcacctggtgactgggaagcttctgtttgtgtggacttcttgggaacagcgtcctggtgtgggccaggaggagaggactggagcaccccaggctctgacttcgtgctcctgggatcgtggtgcattgcctggccatggtggtcacccagctgaatctggagttttgctttcagggcaagaagctgcgaggcttcagctgtgagcttacccggtccccacatggggtcttgcctgaatctttcttcaccatcatgtgccaggtcgtggtgcccattctgctgtccggcttgtgcatgatgacagccggcctggtgatgaacaccattcaacactggcctgtgtttgtggaggtgaaagaccttttgacattggtgccgcccctggtgggcctgaaggggaacctggagatgacactggcatccagactctccacagctgccaacactggacaaattgatgacccccaggagcagcacagagtcatcagcagcaacctggccctcatccaggtgcaggccactgtcgtggggctcttggctgctgtggctgcgctgctgttgggcgtggtgtctcgagaggaagtggatgtcgccaaggtggagttgctgtgtgccagcagtgtcctcactgccttccttgcagcctttgccctgggggtgctgatggtctgtatagtgattggtgctcgaaagctcggggtcaacccagacaacattgccacgcccattgcagccagcctgggagacctcatcacactgtccattctggctttggttagcagcttcttctacagacacaaagatagtcggtatctgacgccgctggtctgcctcagctttgcggctctgaccccagtgtgggtcctcattgccaagcagagcccacccatcgtgaagatcctgaagtttggctggttcccaatcatcctggccatggtcatcagcagtttcggaggactcatcttgagcaaaaccgtttctaaacagcagtacaaaggcatggcgatatttacccccgtcatatgtggtgttggtggcaatctggtggccattcagaccagccgaatctcaacctacctgcacatgtggagtgcacctggcgtcctgcccctccagatgaagaaattctggcccaacccgtgttctactttctgcacgtcagaaatcaattccatgtcagctcgagtcctgctcttgctggtggtcccaggccatctgattttcttctacatcatctacctggtggagggtcagtcagtcataaacagccagacctttgtggtgctctacctgctggcaggcctgatccaggtgacaatcctgctgtacctcgcagaagtgatggttcggctgacttggcaccaggccctggatcctgacaaccactgcatcccctaccttacagggctgggggacctgctcggtactggcctcctggcactctgctttttcactgactggctactgaagagcaaggcagagctgggtggcatctcagaactggcatctggacctccctaactgggccccgctggtcccatttgctcattagaatttcctctcacatcagtgggatacagaattcagtttctcccttgccaggtccttgggatggttgacccctgcctctgcagtagccttttgtgagtctgctaaggtagctctcacacacctcggctctggggttgatacctgagcctgcaatagagccctgaaatcaagagcatggcttgagtgtgtgaatatgatgtgtgcacatgcttaatgagcgtgcaagtgtgcacacgtttgtggagaggagggtgttctggcctgagaaggtaaagaagaggcatgtccagtatgctttgcagggtgtgtttgctcttttccatgcccatgcaacccagattggggtggagcaggaaggagctcttttctgttcccaagcctcagaactcttgagctgtggcttacttgctgtcttcaccaggttcaagctccgtgggccacactgctgctgtgccaagaaggtgtacagcctccccaggatggggcctcatacaacccttcatctgcactcaacatttaatcgtgtccttgctgtctttttattttcctttttgtttgttagcaaaaacctctatttagatttcaataatcagagaagtgtaaaataaaacagattatattgtacttg

SEQ ID NO: 29212 - DNA, 2090 bp, Homo sapiens
  source 1..2090: mol_type = unassigned DNA
atggatgggacagagacccggcagcggaggctggacagctgtggcaagccaggggagctggggcttcctcaccccctcagcacaggaggactccctgtagcctcagaagatggagctctcagggcccctgagagccaaagcgtgacccccaagccactggagactgagcctagcagggtgaccgtgcccttcatgtttgcaggcctgggactgtcctgggccggcatgcttctggactatttccagcactggcctgtgtttgtggaggtgaaagaccttttgacattggtgccgcccctggtgggcctgaaggggaacctggagatgacactggcatccagactctccacagctgccaacactggacaaattgatgacccccaggagcagcacagagtcatcagcagcaacctggccctcatccaggtgcaggccactgtcgtggggctcttggctgctgtggctgcgctgctgttgggcgtggtgtctcgagaggaagtggatgtcgccaaggtggagttgctgtgtgccagcagtgtcctcactgccttccttgcagcctttgccctgggggtgctgatggtctgtatagtgattggtgctcgaaagctcggggtcaacccagacaacattgccacgcccattgcagccagcctgggagacctcatcacactgtccattctggctttggttagcagcttcttctacagacacaaagatagtcggtatctgacgccgctggtctgcctcagctttgcggctctgaccccagtgtgggtcctcattgccaagcagagcccacccatcgtgaagatcctgaagtttggctggttcccaatcatcctggccatggtcatcagcagtttcggaggactcatcttgagcaaaaccgtttctaaacagcagtacaaaggcatggcgatatttacccccgtcatatgtggtgttggtggcaatctggtggccattcagaccagccgaatctcaacctacctgcacatgtggagtgcacctggcgtcctgcccctccagatgaagaaattctggcccaacccgtgttctactttctgcacgtcagaaatcaattccatgtcagctcgagtcctgctcttgctggtggtcccaggccatctgattttcttctacatcatctacctggtggagggtcagtcagtcataaacagccagacctttgtggtgctctacctgctggcaggcctgatccaggtgacaatcctgctgtacctcgcagaagtgatggttcggctgacttggcaccaggccctggatcctgacaaccactgcatcccctaccttacagggctgggggacctgctcggtactggcctcctggcactctgctttttcactgactggctactgaagagcaaggcagagctgggtggcatctcagaactggcatctggacctccctaactgggccccgctggtcccatttgctcattagaatttcctctcacatcagtgggatacagaattcagtttctcccttgccaggtccttgggatggttgacccctgcctctgcagtagccttttgtgagtctgctaaggtagctctcacacacctcggctctggggttgatacctgagcctgcaatagagccctgaaatcaagagcatggcttgagtgtgtgaatatgatgtgtgcacatgcttaatgagcgtgcaagtgtgcacacgtttgtggagaggagggtgttctggcctgagaaggtaaagaagaggcatgtccagtatgctttgcagggtgtgtttgctcttttccatgcccatgcaacccagattggggtggagcaggaaggagctcttttctgttcccaagcctcagaactcttgagctgtggcttacttgctgtcttcaccaggttcaagctccgtgggccacactgctgctgtgccaagaaggtgtacagcctccccaggatggggcctcatacaacccttcatctgcactcaacatttaatcgtgtccttgctgtctttttattttcctttttgtttgttagcaaaaacctctatttagatttcaataatcagagaagtgtaaaataaaacagattatattgt

SEQ ID NO: 29213 - DNA, 526 bp, Homo sapiens
  source 1..526: mol_type = unassigned DNA
cccggtaagcgcggccctgttccgggcggggttggggcggaagggctgccaggcgcccagctgtgcccagatggatgggacagagacccggcagcggaggctggacagctgtggcaagccaggggagctggggcttcctcaccccctcagcacaggaggactccctgtagcctcagaagatggagctctcagggcccctgagagccaaagcgtgacccccaagccactggagactgagcctagcagggagaccacctggtccataggccttcaggtgaccgtgcccttcatgtttgcaggcctgggactgtcctgggccggcatgcttctggactatttccagcactggcctgtgtttgtggaggtgaaagaccttttgacattggtgccgcccctggtgggcctgaaggggaacctggagatgacactggcatccagactctccacagctgccaacactggacaaattgatgacccccaggagcagcacagagtcatcagcagcaacctggccctcatccaggtg

SEQ ID NO: 29214 - DNA, 544 bp, Homo sapiens
  source 1..544: mol_type = unassigned DNA
attgctcgggtgaccactggccttggcaagaacagtttgcatcaggagaagaggaggggagggctgccaggcgcccagctgtgcccagatggatgggacagagacccggcagcggaggctggacagctgtggcaagccaggggagctggggcttcctcaccccctcagcacaggaggactccctgtagcctcagaagatggagctctcagggcccctgagagccaaagcgtgacccccaagccactggagactgagcctagcagggagaccacctggtccataggccttcaggtgaccgtgcccttcatgtttgcaggcctgggactgtcctgggccggcatgcttctggactatttccagcactggcctgtgtttgtggaggtgaaagaccttttgacattggtgccgcccctggtgggcctgaaggggaacctggagatgacactggcatccagactctccacagctgccaacactggacaaattgatgacccccaggagcagcacagagtcatcagcagcaacctggccctcatccaggtg

SEQ ID NO: 29215 - DNA, 500 bp, Homo sapiens
  source 1..500: mol_type = unassigned DNA
ttaggcattagattctcataaggagcacacaacctagatcccctgcgtgcgcagttcacaatacggtttgagctcctatgaggatctgatgctgccggtgatctgacaggagagggaacctgatcaggcagtgatgctcgccgggagccgctcaccttctgctgtgtggcccagttcccaacgggggttggggacccctgctctaaaggatctcttggctgccaggcgcccagctgtgcccagatggatgggacagagacccggcagcggaggctggacagctgtggcaagccaggggagctggggcttcctcaccccctcagcacaggaggactccctgtagcctcagaagatggagctctcagggcccctgagagccaaagcgtgacccccaagccactggagactgagcctagcagggagaccacctggtccataggccttcaggtgaccgtgcccttcatgtttgcaggcctgggactgtcctgggccggcatgct

SEQ ID NO: 29216 - DNA, 726 bp, Homo sapiens
  source 1..726: mol_type = unassigned DNA
gggaggcgcgcgggagagggcgcccgggagtgggtgcgcgggaggcgagtgagccgggcgccgggccctgggggctcggcgggagggggagtcagggctgccaggcgcccagctgtgcccagatggatgggacagagacccggcagcggaggctggacagctgtggcaagccaggggagctggggcttcctcaccccctcagcacaggaggactccctgtagcctcagaagatggagctctcagggcccctgagagccaaagcgtgacccccaagccactggagactgagcctagcagggagaccacctggtccataggccttcaggtgaccgtgcccttcatgtttgcaggcctgggactgtcctgggccggcatgcttctggactatttccagcactggcctgtgtttgtggaggtgaaagaccttttgacattggtgccgcccctggtgggcctgaaggggaacctggagatgacactggcatccagactctccacagctgccaacactggacaaattgatgacccccaggagcagcacagagtcatcagcagcaacctggccctcatccaggtgcaggccactgtcgtggggctcttggctgctgtggctgcgctgctgttgggcgtggtgtctcgagaggaagtggatgtcgccaaggtggagttgctgtgtgccagcagtgtcctcactgccttccttgcagcctttgccctgggtgagc

SEQ ID NO: 29217 - DNA, 588 bp, Homo sapiens
  source 1..588: mol_type = unassigned DNA
tctttcccgccgccgcctgggaggggacccgagggtttcaccatcttgcctaagctggtcttcaactcctgagctcaagcaatctgcttgcctcggcctcccaaagtgctgggattacaggcatgagccactgcatctggccagatagggctgccaggcgcccagctgtgcccagatggatgggacagagacccggcagcggaggctggacagctgtggcaagccaggggagctggggcttcctcaccccctcagcacaggaggactccctgtagcctcagaagatggagctctcagggcccctgagagccaaagcgtgacccccaagccactggagactgagcctagcagggagaccacctggtccataggccttcaggtgaccgtgcccttcatgtttgcaggcctgggactgtcctgggccggcatgcttctggactatttccaggccaacactggacaaattgatgacccccaggagcagcacagagtcatcagcagcaacctggccctcatccaggtgcaggccactgtcgtggggctcttggctgctgtggctgcgctgctgttgggcgtggtgtctcgaga

SEQ ID NO: 29218 - DNA, 530 bp, Homo sapiens
  source 1..530: mol_type = unassigned DNA
accgggatttgggggactcggtgggggaaaggcgcgcgggagatgagggctgccaggcgcccagctgtgcccagatggatgggacagagacccggcagcggaggctggacagctgtggcaagccaggggagctggggcttcctcaccccctcagcacaggaggactccctgtagcctcagaagatggagctctcagggcccctgagagccaaagcgtgacccccaagccactggagactgagcctagcagggagaccacctggtccataggccttcaggtgaccgtgcccttcatgtttgcaggcctgggactgtcctgggccggcatgcttctggactatttccagcactggcctgtgtttgtggaggtgaaagaccttttgacattggtgccgcccctggtgggcctgaaggggaacctggagatgacactggcatccagactctccacagctgccaacactggacaaattgatgacccccaggagcagcacagagtcatcagcagcaacctggccctcatccaggtg

SEQ ID NO: 29219 - DNA, 2598 bp, Homo sapiens
  source 1..2598: mol_type = unassigned DNA
gaggggaaaagaagggagcccccgcccccacctcggggcgcagctccggacgcgtgtaaatacaactatcaactccgcagatccacttcatccaagcccagcttcgcagacctctggcgcccggcgggttcccagttcccccgcttcttccgaggagacagcggaggcgaggccaccgggctgtcaggctgaagctccgtggccgccgggtcctgcacgcagagaagaccccagcgccggcgcggctcagggctgggcccacgggactccggacgcgccgcgaaagcgttgcgctcccggaggcgtccgcagctgctggctgctcatttgccggtgaccggaggctcggggccagcatggcccccacgctgcaacaggcgtaccggaggcgctggtggatggcctgcacggctgtgctggagaacctcttcttctctgctgtactcctgggctggggctccctgttgatcattctgaagaacgagggcttctattccagcacgtgcccagctgagagcagcaccaacaccacccaggatgagcagcgcaggtggccaggctgtgaccagcaggacgagatgctcaacctgggcttcaccattggttccttcgtgctcagcgccaccaccctgccactggggatcctcatggaccgctttggcccccgacccgtgcggctggttggcagtgcctgcttcactgcgtcctgcaccctcatggccctggcctcccgggacgtggaagctctgtctccgttgatattcctggcgctgtccctgaatggctttggtggcatctgcctaacgttcacttcactcacgctgcccaacatgtttgggaacctgcgctccacgttaatggccctcatgattggctcttacgcctcttctgccattacgttcccaggaatcaagctgatctacgatgccggtgtggccttcgtggtcatcatgttcacctggtctggcctggcctgccttatctttctgaactgcaccctcaactggcccatcgaagcctttcctgcccctgaggaagtcaattacacgaagaagatcaagctgagtgggctggccctggaccacaaggtgacaggtgacctcttctacacccatgtgaccaccatgggccagaggctcagccagaaggcccccagcctggaggacggttcggatgccttcatgtcaccccaggatgttcggggcacctcagaaaaccttcctgagaggtctgtccccttacgcaagagcctctgctcccccactttcctgtggagcctcctcaccatgggcatgacccagctgcggatcatcttctacatggctgctgtgaacaagatgctggagtaccttgtgactggtggccaggagcatgagacaaatgaacagcaacaaaaggtggcagagacagttgggttctactcctccgtcttcggggccatgcagctgttgtgccttctcacctgccccctcattggctacatcatggactggcggatcaaggactgcgtggacgccccaactcagggcactgtcctcggagatgccagggacggggttgctaccaaatccatcagaccacgctactgcaagatccaaaagctcaccaatgccatcagtgccttcaccctgaccaacctgctgcttgtgggttttggcatcacctgtctcatcaacaacttacacctccagtttgtgacctttgtcctgcacaccattgttcgaggtttcttccactcagcctgtgggagtctctatgctgcagtgttcccatccaaccactttgggacgctgacaggcctgcagtccctcatcagtgctgtgttcgccttgcttcagcagccacttttcatggcgatggtgggacccctgaaaggagagcccttctgggtgaatctgggcctcctgctattctcactcctgggattcctgttgccttcctacctcttctattaccgtgcccggctccagcaggagtacgccgccaatgggatgggcccactgaaggtgcttagcggctctgaggtgaccgcatagacttctcagaccaagggacctggatgacaggcaatcaaggcctgagcaaccaaaaggagtgccccatatggcttttctacctgtaacatgcacatagagccatggccgtagatttataaataccaagagaagttctatttttgtaaagactgcaaaaaggaggaaaaaaaaccttcaaaaacgccccctaagtcaacgctccattgactgaagacagtccctatcctagaggggttgagccttcttcctccttgggttggaggagaccagggtgcctcttatctccttctagcggtctgcctcctggtacctcttggggggatcggcaaacaggctacccctgaggtcccatgtgccatgagtgtgcacacatgcatgtgtctgtgtatgtgtgaatgtgagagagacacagccctcctttcagaaggaaaggggcctgaggtgccagctgtgtcctgggttaggggttgggggtcggccccttccagggccaggagggcaggttccctctctggtgctgctgcttgcaagtcttagaggaaataaaaagggaagtgagaga

SEQ ID NO: 29220 - DNA, 2358 bp, Homo sapiens
  source 1..2358: mol_type = unassigned DNA
gtcagcagccgccagacttcctgccgaagtccgagccccctcccggggctggaggggggcaagcgggttccgaggtgcaaagcctggtgccccgagccctgcggagctcggggccagcatggcccccacgctgcaacaggcgtaccggaggcgctggtggatggcctgcacggctgtgctggagaacctcttcttctctgctgtactcctgggctggggctccctgttgatcattctgaagaacgagggcttctattccagcacgtgcccagctgagagcagcaccaacaccacccaggatgagcagcgcaggtggccaggctgtgaccagcaggacgagatgctcaacctgggcttcaccattggttccttcgtgctcagcgccaccaccctgccactggggatcctcatggaccgctttggcccccgacccgtgcggctggttggcagtgcctgcttcactgcgtcctgcaccctcatggccctggcctcccgggacgtggaagctctgtctccgttgatattcctggcgctgtccctgaatggctttggtggcatctgcctaacgttcacttcactcacgctgcccaacatgtttgggaacctgcgctccacgttaatggccctcatgattggctcttacgcctcttctgccattacgttcccaggaatcaagctgatctacgatgccggtgtggccttcgtggtcatcatgttcacctggtctggcctggcctgccttatctttctgaactgcaccctcaactggcccatcgaagcctttcctgcccctgaggaagtcaattacacgaagaagatcaagctgagtgggctggccctggaccacaaggtgacaggtgacctcttctacacccatgtgaccaccatgggccagaggctcagccagaaggcccccagcctggaggacggttcggatgccttcatgtcaccccaggatgttcggggcacctcagaaaaccttcctgagaggtctgtccccttacgcaagagcctctgctcccccactttcctgtggagcctcctcaccatgggcatgacccagctgcggatcatcttctacatggctgctgtgaacaagatgctggagtaccttgtgactggtggccaggagcatgagacaaatgaacagcaacaaaaggtggcagagacagttgggttctactcctccgtcttcggggccatgcagctgttgtgccttctcacctgccccctcattggctacatcatggactggcggatcaaggactgcgtggacgccccaactcagggcactgtcctcggagatgccagggacggggttgctaccaaatccatcagaccacgctactgcaagatccaaaagctcaccaatgccatcagtgccttcaccctgaccaacctgctgcttgtgggttttggcatcacctgtctcatcaacaacttacacctccagtttgtgacctttgtcctgcacaccattgttcgaggtttcttccactcagcctgtgggagtctctatgctgcagtgttcccatccaaccactttgggacgctgacaggcctgcagtccctcatcagtgctgtgttcgccttgcttcagcagccacttttcatggcgatggtgggacccctgaaaggagagcccttctgggtgaatctgggcctcctgctattctcactcctgggattcctgttgccttcctacctcttctattaccgtgcccggctccagcaggagtacgccgccaatgggatgggcccactgaaggtgcttagcggctctgaggtgaccgcatagacttctcagaccaagggacctggatgacaggcaatcaaggcctgagcaaccaaaaggagtgccccatatggcttttctacctgtaacatgcacatagagccatggccgtagatttataaataccaagagaagttctatttttgtaaagactgcaaaaaggaggaaaaaaaaccttcaaaaacgccccctaagtcaacgctccattgactgaagacagtccctatcctagaggggttgagccttcttcctccttgggttggaggagaccagggtgcctcttatctccttctagcggtctgcctcctggtacctcttggggggatcggcaaacaggctacccctgaggtcccatgtgccatgagtgtgcacacatgcatgtgtctgtgtatgtgtgaatgtgagagagacacagccctcctttcagaaggaaaggggcctgaggtgccagctgtgtcctgggttaggggttgggggtcggccccttccagggccaggagggcaggttccctctctggtgctgctgcttgcaagtcttagaggaaataaaaagggaagtgaga

SEQ ID NO: 29221 - DNA, 690 bp, Homo sapiens
  source 1..690: mol_type = unassigned DNA
gcttcgcagacctctggcgcccggcgggttcccagttcccccgcttcttccgaggagacagcggaggcgaggccaccgggctgtcaggctgaagctccgtggccgccgggtcctgcacgcagagaagaccccagcgccggcgcggctcagggctgggcccacgggactccggacgcgccgcgaaagcgttgcgctcccggaggcgtccgcagctgctggctgctcatttgccggtgaccggagagctgcgcgtttgccagagttccagcggacctcctggagcgcttgaacccaaagccccgtttcacagatgagaataccgagtccccctggaagaagtgactggctcggggccagcatggcccccacgctgcaacaggcgtaccggaggcgctggtggatggcctgcacggctgtgctggagaacctcttcttctctgctgtactcctgggctggggctccctgttgatcattctgaagaacgagggcttctattccagcacgtgcccagctgagagcagcaccaacaccacccaggatgagcagcgcaggtggccaggctgtgaccagcaggacgagatgctcaacctgggcttcaccattggttccttcgtgctcagcgccaccaccctgccactggggatcctcatggaccgctttggcccccgacccgtgcggctggttggcag

SEQ ID NO: 29222 - DNA, 3081 bp, Homo sapiens
  source 1..3081: mol_type = unassigned DNA
cagtgttttcttcttggggtcggaataaaagggctggaataaaagagggcagaaaaggcgccgggcgggcccgacacacgccggaggagccgggtggtgcagagccggagccggagccggagccgcgccgcgccgcaccatggcgcccaccctggccactgcccatcggcgccgctggtggatggcctgcacggccgtgctggagaacctcctcttctcggcagtcctcctgggctggggctcgctgctcatcatgctcaagtcagagggcttttactcctacctgtgtaccgagccagagaatgtcaccaatggcacagtgggcggcacagcagagccggggcacgaggaggtgagctggatgaacggctggctcagctgccaggcccaggacgagatgctaaatttggccttcactgtgggctcctttctgctcagtgccatcaccctgcccctgggtatcgtcatggacaagtatggcccgaggaagctcaggctgctgggcagcgcctgcttcgcggtttcctgcttgctgattgcgtacggagcaagtaaaccaaacgctctctccgtgctcatcttcatcgccctggctctgaatggctttggtgggatgtgtatgaccttcacctcattaacactgcccaacatgttcggcgaccttcggtccacgtttattgccttgatgattgggtcctacgcctcctcggcagtcacctttccaggaatcaagctcatctatgatgctggtgtctccttcatcgtcgtcctcgtggtctgggccggctgctccgggctggttttcctcaactgcttctttaactggccccttgagcccttcccggggccggaggacatggactactcggtgaagatcaagttcagctggctgggctttgaccacaagatcacagggaagcagttctacaagcaggtgaccacggtgggccggcgcctgagtgtgggcagctccatgaggagtgccaaggagcaggtggcgctgcaggagggccacaagctgtgcctgtccaccgtcgacctggaggtgaagtgccagccggatgccgcagtggccccctccttcatgcacagcgtgttcagccccatcctgctgctcagcctggtcaccatgtgcgtcacgcagctgcggctcatcttctacatgggggctatgaacaacatcctcaagttcctggtcagcggcgaccagaagacagttggcctctacacctccatcttcggcgtgctccagctgctgtgcctgctgacggcccccgtcattggctacatcatggactggaggctgaaggagtgtgaagacgcctccgaggagcccgaggagaaagacgccaaccaaggcgagaagaaaaagaagaagcgggaccggcagatccagaagatcactaatgccatgcgggccttcgccttcaccaacctgctgctcgtgggctttggggtgacctgcctcattcccaacctgcctctccagatcctctccttcatcctgcacacaatcgtgcgaggattcatccactccgctgtcgggggcctgtacgctgccgtgtacccctccacccagttcggcagcctcacgggactgcagtctctgatcagcgcgctcttcgcccttctgcagcagccgctgtttctggccatgatgggtcctctccagggagaccctctgtgggtgaacgtggggctgctccttctcagcctgctgggcttctgcctcccgctctacctgatctgctaccggcgccagctggagcggcagctgcagcagaggcaggaggatgacaaactcttcctcaaaatcaacggctcgtccaaccaggaggccttcgtgtagtggctgccgcctcggaactgcggtctcctgcctgtgcttcagtgactgacccctgtcctgcccctccagagtaccccacgcacccccaggaccttcgccgtctccgtgccagcgttcacgctccctcccggggccctgcctcggagctctgtggtggaaggacgggagagggccccggacacgcgcgttttctcctgccgaacgcaggggctgccctgactttgctctgccgccccccggggacccggggcctggggtctctgtggtgcctgcagcaggagccaggaacgcccggcaggcaggcgctctcccgccagtgtctggattctgcctcttgccaaagcagagggggctgccatcccctgcctgccacctgcccctcggctgcatgcccacagccgtacctgcctgaggacaaaggcttgcactgtctcgcccgcgcctggcccccaccccctccccggccagcctgaggctgcctgaggaaggaaggacccgcttcctgttgtcggtgctaattcctttgtaattccagccccctgtcgcctgtccagggcctgcccacccgttggaggccggtggagaagccccacctggcttatgccctggagagggtttagcgggctgggtggacccctcgcctcctccccgagggccaatgccgcggacacgttttcactgtcaccctcgttctgtctgccacctgaagggaatttgaggaccgccgccagggcaccccgtacatacacacagctgcttttgtggaggtggacgaaaggctgtggccggcagacgtggaggtccaggccggggtggggacgtgggtgggtccgaggtgtgtgtggggtcggggtgggctctaggagttagcccttatccccactgaccaggcgggagccgccaggcctgcagctgggccagtgcccaggagccatcctggcgtggggccaggagcttgtccaaggccacaggcccacagcaccccctgccggcgggctccgtggggccctggagctgatgacgggggaggcccgtccgcctggcccaccaacccgcccaccttgactgcccccagaagtgtgtcttgagacctcctgggcgtgcttagaggggtgagttgtgtttggatttttagttattttctcttcagttttattagacttcttttttataaagcaataaatccattttcctccgggtaagggatgccccttctggcatatcagttaata

SEQ ID NO: 29223 - DNA, 3011 bp, Homo sapiens
  source 1..3011: mol_type = unassigned DNA
agaaaaggcgccgggcgggcccgacacacgccggaggagccgggtggtgcagagccggagccggagccggagccgcgccgcgccgcaccatggcgcccaccctggccactgcccatcggcgccgctggtggatggcctgcacggccgtgctggagaacctcctcttctcggcagtcctcctgggctggggctcgctgctcatcatgctcaagtcagagggcttttactcctacctgtgtaccgagccagagaatgtcaccaatggcacagtgggcggcacagcagagccggggcacgaggaggtgagctggatgaacggctggctcagctgccaggcccaggacgagatgctaaatttggccttcactgtgggctcctttctgctcagtgccatcaccctgcccctgggtatcgtcatggacaagtatggcccgaggaagctcaggctgctgggcagcgcctgcttcgcggtttcctgcttgctgattgcgtacggagcaagtaaaccaaacgctctctccgtgctcatcttcatcgccctggctctgaatggctttggtgggatgtgtatgaccttcacctcattaacactgcccaacatgttcggcgaccttcggtccacgtttattgccttgatgattgggtcctacgcctcctcggcagtcacctttccaggaatcaagctcatctatgatgctggtgtctccttcatcgtcgtcctcgtggtctgggccggctgctccgggctggttttcctcaactgcttctttaactggccccttgagcccttcccggggccggaggacatggactactcggtgaagatcaagttcagctggctgggctttgaccacaagatcacagggaagcagttctacaagcaggtgaccacggtgggccggcgcctgagtgtgggcagctccatgaggagtgccaaggagcaggtggcgctgcaggagggccacaagctgtgcctgtccaccgtcgacctggaggtgaagtgccagccggatgccgcagtggccccctccttcatgcacagcgtgttcagccccatcctgctgctcagcctggtcaccatgtgcgtcacgcagctgcggctcatcttctacatgggggctatgaacaacatcctcaagttcctggtcagcggcgaccagaagacagcttcctccacagttggcctctacacctccatcttcggcgtgctccagctgctgtgcctgctgacggcccccgtcattggctacatcatggactggaggctgaaggagtgtgaagacgcctccgaggagcccgaggagaaagacgccaaccaaggcgagaagaaaaagaagaagcgggaccggcagatccagaagatcactaatgccatgcgggccttcgccttcaccaacctgctgctcgtgggctttggggtgacctgcctcattcccaacctgcctctccagatcctctccttcatcctgcacacaatcgtgcgaggattcatccactccgctgtcgggggcctgtacgctgccgtgtacccctccacccagttcggcagcctcacgggactgcagtctctgatcagcgcgctcttcgcccttctgcagcagccgctgtttctggccatgatgggtcctctccagggagaccctctgtgggtgaacgtggggctgctccttctcagcctgctgggcttctgcctcccgctctacctgatctgctaccggcgccagctggagcggcagctgcagcagaggcaggaggatgacaaactcttcctcaaaatcaacggctcgtccaaccaggaggccttcgtgtagtggctgccgcctcggaactgcggtctcctgcctgtgcttcagtgactgacccctgtcctgcccctccagagtaccccacgcacccccaggaccttcgccgtctccgtgccagcgttcacgctccctcccggggccctgcctcggagctctgtggtggaaggacgggagagggccccggacacgcgcgttttctcctgccgaacgcaggggctgccctgactttgctctgccgccccccggggacccggggcctggggtctctgtggtgcctgcagcaggagccaggaacgcccggcaggcaggcgctctcccgccagtgtctggattctgcctcttgccaaagcagagggggctgccatcccctgcctgccacctgcccctcggctgcatgcccacagccgtacctgcctgaggacaaaggcttgcactgtctcgcccgcgcctggcccccaccccctccccggccagcctgaggctgcctgaggaaggaaggacccgcttcctgttgtcggtgctaattcctttgtaattccagccccctgtcgcctgtccagggcctgcccacccgttggaggccggtggagaagccccacctggcttatgccctggagagggtttagcgggctgggtggacccctcgcctcctccccgagggccaatgccgcggacacgttttcactgtcaccctcgttctgtctgccacctgaagggaatttgaggaccgccgccagggcaccccgtacatacacacagctgcttttgtggaggtggacgaaaggctgtggccggcagacgtggaggtccaggccggggtggggacgtgggtgggtccgaggtgtgtgtggggtcggggtgggctctaggagttagcccttatccccactgaccaggcgggagccgccaggcctgcagctgggccagtgcccaggagccatcctggcgtggggccaggagcttgtccaaggccacaggcccacagcaccccctgccggcgggctccgtggggccctggagctgatgacgggggaggcccgtccgcctggcccaccaacccgcccaccttgactgcccccagaagtgtgtcttgagacctcctgggcgtgcttagaggggtgagttgtgtttggatttttagttattttctcttcagttttattagacttcttttttataaagcaataaatccattttcctccgggt

SEQ ID NO: 29224 - DNA, 1490 bp, Homo sapiens
  source 1..1490: mol_type = unassigned DNA
attatgcgcagctgagaccggtggaggcagggaagctggggacggagtgagcgagagggggaatgtggggagtgacccagatgtcaggatgacctacgggagtccacaggcaaatgcaagcccatccgatgctgtggcgctggaccatggggaggtcagccgaaggcaacagcaggagctgcccaacatgttcggcgaccttcggtccacgtttattgccttgatgattgggtcctacgcctcctcggcagtcacctttccaggaatcaagctcatctatgatgctggtgtctccttcatcgtcgtcctcgtggtctgggccggctgctccgggctggttttcctcaactgcttctttaactggccccttgagcccttcccggggccggaggacatggactactcggtgaagatcaagttcagctggctgggctttgaccacaagatcacagggaagcagttctacaagcaggtgaccacggtgggccggcgcctgagtgtgggcagctccatgaggagtgccaaggagcaggtggcgctgcaggagggccacaagctgtgcctgtccaccgtcgacctggaggtgaagtgccagccggatgccgcagtggccccctccttcatgcacagcgtgttcagccccatcctgctgctcagcctggtcaccatgtgcgtcacgcagctgcggctcatcttctacatgggggctatgaacaacatcctcaagttcctggtcagcggcgaccagaagacagttggcctctacacctccatcttcggcgtgctccagctgctgtgcctgctgacggcccccgtcattggctacatcatggactggaggctgaaggagtgtgaagacgcctccgaggagcccgaggagaaagacgccaaccaaggcgagaagaaaaagaagaagcgggaccggcagatccagaagatcactaatgccatgcgggccttcgccttcaccaacctgctgctcgtgggctttggggtgacctgcctcattcccaacctgcctctccagatcctctccttcatcctgcacacaatcgtgcgaggattcatccactccgctgtcgggggcctgtacgctgccgtgtacccctccacccagttcggcagcctcacgggactgcagtctctgatcagcgcgctcttcgcccttctgcagcagccgctgtttctggccatgatgggtcctctccagggagaccctctgtgggtgaacgtggggctgctccttctcagcctgctgggcttctgcctcccgctctacctgatctgctaccggcgccagctggagcggcagctgcagcagaggcaggaggatgacaaactcttcctcaaaatcaacggctcgtccaaccaggaggccttcgtgtagtggctgccgcctcggaactgcggtctcctgcctgtgcttcagtgactgacccctgtcctgcccctccagagtaccccacgcacccccaggaccttcgccgtct

SEQ ID NO: 29225 - DNA, 2407 bp, Homo sapiens
  source 1..2407: mol_type = unassigned DNA
ttttcacttgttaattattttctgttctcatgattatgtgtaatcttttatgcagagatatcacattagatatacttttccccttatattattacattataagcatttccatatattagtactcatggttactgttttaaatagctgcctattatgctgtttgttgatgtctcagcatgactttgtttatatgagaggtattaagcttatgctgtaaacacctttattaatctgagattttgtatgctgttttgttagaggaaacattctattaatggtggcatatttcaagtaaaagcatgtgctttttatttttaaatcgcttatggcaaaaattcattttcagttcaataaagtatgtgtttgtaagctttgtcatctgccccttgactggtagatgtgcaggctaaggagttttaagtgtttggttttgcttttggtagttgtgtgtgtgtatgtgtgtgtgtgtgtgtgcgtttcttttcagaaggggcgggtaatgtcttctgttggaacatgcactccaccctctttgataaggcttgtggtaagatttgcatcactacccatgacagtcatcctcatagcattaagcacacagctcttagctcccataatgatgtgtggagggtggagtgtattgcagccatattcacctttcatttgtgtgtttgatgtggcatttatattaagtaggagtaattttttttctgatttttttttcttgtgtcaccagtgcacctattccattcttccatcgctgtgctcctgtgaacatttcctgctatgccaagtttgcagaggccctgatcacctttgtcagtgacaatagtgtcttacacaggctgattagtggagtaatgaccagcaaagaaattatattgggactttgcttgttatcactagttctatccatgattttgatggtgataatcaggtatatatcaagagtacttgtgtggatcttaacgattctggtcatactcggttcacttggaggcacaggtgtactatggtggctgtatgcaaagcaaagaaggtctcccaaagaaactgttactcctgagcagcttcagatagctgaagacaatcttcgggccctcctcatttatgccatttcagctacagtgttcacagtgatcttattcctgataatgttggttatgcgcaaacgtgttgctcttaccatcgccttgttccacgtagctggcaaggtcttcattcacttgccactgctagtcttccaacccttctggactttctttgctcttgtcttgttttgggtgtactggatcatgacacttctttttcttggcactaccggcagtcctgttcagaatgagcaaggctttgtggagttcaaaatttctgggcctctgcagtacatgtggtggtaccatgtggtgggcctgatttggatcagtgaatttattctagcatgtcagcagatgacagtggcaggagctgtggtaacatactattttactagggataaaaggaatttgccatttacacctattttggcatcagtaaatcgccttattcgttaccacctaggtacggtggcaaaaggatctttcattatcacattagtcaaaattccgcgaatgatccttatgtatattcacagtcagctcaaaggaaaggaaaatgcttgtgcacgatgtgtgctgaaatcttgcatttgttgcctttggtgtcttgaaaagtgcctaaattatttaaatcagaatgcatacacagccacagctatcaacagcaccaacttctgcacctcagcaaaggatgcctttgtcattctggtggagaatgctttgcgagtggctaccatcaacacagtaggagattttatgttattccttggcaaggtgctgatagtctgcagcacaggtttagctgggattatgctgctcaactaccagcaggactacacagtatgggtgctgcctctgatcatcgtctgcctctttgctttcctagtcgctcattgcttcctgtctatttatgaaatggtagtggatgtattattcttgtgttttgccattgatacaaaatacaatgatgggagccctggcagagaattctatatggataaagtgctgatggagtttgtggaaaacagtaggaaagcaatgaaagaagctggtaagggaggcgtcgctgattccagagagctaaagccgatgctgaagaaaaggtgactggtctcatgagccctgaagaatgaactcagaggaggttgtttacatgaggttctcccactcaccagctgttgagagtctgcgattatgaagagcaggatcttattacttcaatgaaagcatgtaacaagtttctcaaaccaccaacagccaagtggatttggtacagtgcggctgtctaataaataatcaaaagcatttgatag

SEQ ID NO: 29226 - DNA, 10511 bp, Homo sapiens
  source 1..10511: mol_type = unassigned DNA
agcagctgctgcagcaggagcagagcaggagacgcgtagccgccgtcgccgccgccgggggatgtggccggcgcctgcctctagccgcgccgcctcttgagtaccagccgccgctgcagccgccgccgccgcctagccgtgcggtgccaggccgcgccctccccgggcgcccgccggctcgcatgccgaggggctccggggcgtagctgcgcgcccggcgccgcctccgggctccttcggccccgccatgggctgctgcagctccgcctcctccgccgcgcagagctccaaacgagaatggaagccgctggaggaccgtagctgcacagacataccatggctgctgctcttcatcctcttctgcattgggatgggatttatttgtggcttttcaatagcaacaggtgcagcagcaagactagtgtcaggatacgacagctatggaaatatctgtgggcagaaaaatacaaagttggaagcaataccaaacagtggcatggaccacacccagcggaagtatgtattctttttggatccatgcaacctggacttgataaaccggaagattaagtctgtagcactgtgtgtagcagcgtgtccaaggcaagaactgaaaactctgagtgatgttcagaagtttgcagagataaatggttcagccctatgtagctacaacctaaagccttctgaatacactacatctccaaaatcttctgttctctgccccaaactaccagttccagcgagtgcacctattccattcttccatcgctgtgctcctgtgaacatttcctgctatgccaagtttgcagaggccctgatcacctttgtcagtgacaatagtgtcttacacaggctgattagtggagtaatgaccagcaaagaaattatattgggactttgcttgttatcactagttctatccatgattttgatggtgataatcaggtatatatcaagagtacttgtgtggatcttaacgattctggtcatactcggttcacttggaggcacaggtgtactatggtggctgtatgcaaagcaaagaaggtctcccaaagaaactgttactcctgagcagcttcagatagctgaagacaatcttcgggccctcctcatttatgccatttcagctacagtgttcacagtgatcttattcctgataatgttggttatgcgcaaacgtgttgctcttaccatcgccttgttccacgtagctggcaaggtcttcattcacttgccactgctagtcttccaacccttctggactttctttgctcttgtcttgttttgggtgtactggatcatgacacttctttttcttggcactaccggcagtcctgttcagaatgagcaaggctttgtggagttcaaaatttctgggcctctgcagtacatgtggtggtaccatgtggtgggcctgatttggatcagtgaatttattctagcatgtcagcagatgacagtggcaggagctgtggtaacatactattttactagggataaaaggaatttgccatttacacctattttggcatcagtaaatcgccttattcgttaccacctaggtacggtggcaaaaggatctttcattatcacattagtcaaaattccgcgaatgatccttatgtatattcacagtcagctcaaaggaaaggaaaatgcttgtgcacgatgtgtgctgaaatcttgcatttgttgcctttggtgtcttgaaaagtgcctaaattatttaaatcagaatgcatacacagccacagctatcaacagcaccaacttctgcacctcagcaaaggatgcctttgtcattctggtggagaatgctttgcgagtggctaccatcaacacagtaggagattttatgttattccttggcaaggtgctgatagtctgcagcacaggtttagctgggattatgctgctcaactaccagcaggactacacagtatgggtgctgcctctgatcatcgtctgcctctttgctttcctagtcgctcattgcttcctgtctatttatgaaatggtagtggatgtattattcttgtgttttgccattgatacaaaatacaatgatgggagccctggcagagaattctatatggataaagtgctgatggagtttgtggaaaacagtaggaaagcaatgaaagaagctggtaagggaggcgtcgctgattccagagagctaaagccgatggcttcgggagcaagttctgcttgaacctagccgacggttatggaaacccattgacattccaaaacaatatatacacataactatgtatttgtgtgtgtgggtgtgtgtatatatgtatatgtatgtgtgtatatatgtatatgtatatacacacacacacataaatcagccaaaatcagagaaaaggaacagggatttaataccttttttatgcttatttttgtcaaacatgtactcctttcatacgggtggcttttacaaggcaacttccgtcatttaatgttttcaactgtaattgtcttaatggaaatgttaaaattcatatctgattaacatttttaataacttagaggagattttaactttatttaaaaataggtaaaattattgtacctaattatgtctaaagtttattcaggggtaatttccctgatgtctgtataaaatcaagatcttattttactgatgcataagtcctagtgggtcaagactaggcatatgctttcagataaataaggaattactccaatcagttttccccaatcaaagaagccatgtcattttacttttagaaacatacaattgggcccaatatgggaattttcataatagttcatacatttgtcagccaacattaaaaggtaaccaactcctcaggtatttgtagtttaccctaacgcttctttaaaagaaagtaggtaaaaaaagaaaagggtagataatctttcgtatgcaaacttttcccttatattttgtctttctttcctttttgactttagtagcatcctccacacatttgtgtgcctgatttgaaaggaagctggggcacccagcgagtttagcctttaagtttctgtgtattgatttgcagattaagtaatgctgggaggaataaagaagggacagaaacatggaacataaagcattgaaaattccggtgcttgggcttcggcttcagagtaacgtcagtggcttagggttaaacggccattttattcaaatgcttgctatacaatctgaaaacacactggcaggtgctcctctccttggcaattcattgagtatccagagttctacgatgtttaactgaagaattggctaatgttttgatcctccagtgtgactgttgtttttgtttgggggtgggtttggggttttttgcttttttattcctgaagcttaccagatatgaatggctaatactccattgttctgcttgttgtaatggtgaatgctttaagaaaaaaaagtgtaatttgctaagaataattcatgatctgtttatgcgataactcctttttgttacaatttttttaaaaaaagctatttttgttaatgtaaagtaaatatttcagagcaaattttttaaacttattgcactaaatacaggctctgtacaaaaaaaaaaaaaaaaaaaaagcctcagcattttatcattccatggaaggagaatcttttgaaagaaagcattgcctcctaccagaactagacagtgaattagatcggtattatggaaatgcatacaagtaatgtcactagggcttaataagcagccgtttgctaatgtgcttcctttcaaagggttggacctttaaattgctgcaaaaggtaaattgtatttttttttaagtattggtgttctttactctagctaggctaaaatttgctaaatgccttggtttcttttaaaagttcatgtaatatttctgatttttcagaatatttgcaataagagtctggattttaaaaaacacatgcatacacacaattaagagctcatgtcttagcaagatctgggaaaccaacattgcgagagtagctattttgaaagaataattctccagaagttaacatctaatatctagtatcaccaaacagtatcgctgttctcttttattcatttgaaatgaatataattatataactaacaattgtccaaatagatgagagagcaaatcatgtgagaaaattcagaataccatctgtttcatagccgcacagattttggactttcacaaacattgggaactaaatttagaattggcaaaagtctagaagatgggtatcaaaacagaagacattccaggagctagcaattttaagaggtgtccctccaaagtgacctgatggaagtcctgaacttggaaattaggttctactcacttggacatccctgcatcatggactgttgctgctccctgttccatatgctcgcaatctcagctatttggaagctaccaggaatgctttctaattatcatttgcaactagaactgtaatcagaaagaaattttgtatttttgtataacttgattgtgtgccattttatataacaggtcctgttttacaaataaattttgttttactaacattgtgtttagaaattataatctatgtgtaaccatgtcatttgagttgcaaattaattgccaggctgttttccttaagtaaattcatgtgccgtgtagaaatatgcagatatgcattacacaggcacacacagagagatatttaatatgtggaatatcactctttcatgagctttattccttgattaatttgataaagcctcacagaggattttaagcaatatttaaatgtgttgaggttatgtttggatattcctgctgcctcttttcattcatttcaagtcattcttcagctagctatgggctgccttattgctattcgctcactgcttccatcttctgcccaagtgagaagaatagatgaagaacagaaatttctctgtgaaatgtggatacccgaataatttcataaatcattgattctatgtggtggtttttgtcttcttctgtggtgaatcttcaaaactgtattcaggactcatatttctagagttttaattggggtcctctattgtcaattgtagtagtgaccagagtatcgtggtttttgccatcagataattaaggctctggtgcataatttagactttctaagctcctgcctgaagaataaggtcttccataatatggaagagaaaagttatatttcagtgtaaatccaagagacccatcttctatgagaggcttaccagtgcattagtaataaaacattagcaatttagctagagcactgagattgtataatccttgcatggatgagcagagctcaaagccagttgttcctttaaagcatttaatgcaatggctaatgtttaggattaaagtttttattttatcctataagataattaagtcctaagtcactacaacttaagtagcttaactgtatgttggtacccaaactttttctataatggttaaggaggaggcacttactgagtttattttaaagttatgctagaaatgtttttcttttgtagagatgctctctctctctctctctttttttttttttttttttttttttttccgtgagggcattaggctgctgattgtaagttatttccaataccactgatcttggtatctgccaagggcttccttgccttccctgggcagttttaggatttcaccctagtagggggtatgaggcactgacccctttattctggacccaaactgctttagagcagagttaatacctctccctccctcttcaaaacagctacaggaactgcaggcaccacatatgtgtgaggccacatcactgcccctgaggcttcaactatttccaccatgcactattactagctactaacagccattttaagagatctcctagcctgcaaggtagaattctgggatcagttccaaaaccagaactgccagtaatggtgacttgaatattttatttgatttttggtcagtaaccttgtcatttaaattggactttccaatagccttaacatggcctctgagaagtttcctccagaaaggtctttaagctttcgcttttcaataagtaagttctttactgcttttctactgctactttaaaaaaaaaacaacaacaacaaataaaactctcagagtctggaggcttatcagtgcacctgccacagttaatttctgtattcttttcatacattccatctgacacatacgagtgcactataatggcttgcctagaactggtaagaagtggtctgtgaatgtatattgaaaaaatgtgggttcataagtaaaagcgtaacgcagatatttgtgtattctgtattcacagcgtaggctgccttttgctttaaatgcatattcatgtatctttgtgtgctaagaatgcatgttagcccttttgaaaagtaggcactattcatacacagtagcttcttggaattaactcatctttgttaacttagtggcacatagtccaaatttttaaaaagcaagacccttgaatatgccaagagaaaatctaaagctagcaaacttaaaaaacaaaacaaaaattacacgtcgtgtacagttatgaatttagaatagcacactttttccattcagatttcatacatttgagccaaattcttatactccatgttttaattttaaaaggataattttaatccaagatttaaatctttgaaaatatctttcttatagaaaactttaatgcagtttttaaacttactgatttctgtggaaaacctttcttttctatagaaatactgtagtgccctttcttcccatcttgattttgtacatgtaaagacaaatgatgattcagtttcaatattgcatgaacaattgccactttgtaaattatatggacagaatgtgttctaaggaaattcgttagtaaatttgtgaaaaacatgtgagattgttcgagacctattaggctattcttcagttttgatgctcagttttacaacttaaatgattttctccaggacacggagctcagaataataaagcttttattaatggtctagtgaagatctagttgaacatggaaacattgtaatttacaaatgtctcagaaatttctcacttttatttgctaagacctgaatttaatatttgatattcaaaaacaagttattttgaagagacaatgggtctctttgagcttaagaaagctatggactatctttccttcaaatgcacatcacatgtctgtgaacactcaaaatgctcatagaatttcagggccctcagacggccagcttccacccctgtaccccctcaggggctaatgaacccaagtcaaaaggctgctctaaagttgttctgataatgtgttttgaaatgaggaagtgattaggcctccactagagatacttttgagatgatgcttaccaccttctgacctggaatcatttttataacttaaagactttatgtaatttagtagcaggttagggaatagaaaccacactaatctgaaggaataacaagatgatcaacactgaatcttcatgacagtaagattttctttccttggaggtatgagggtgtgtatgtgtgtgtgtgtgtgtgtgtgtttgtgtgtgtgtgtgtgtgtcctggcggttatttgggggcaaggtaccagattatttgcagtgagccaaaaaaaaaaaaatatccaagaagaaataaatagggaatccttgtaattaatccatctaccaaaacacttgattctttttattgtagctcagctatgacattatgacattatgtggcttagtgttatcagtatactactgtcttaaaatatatttgtcaacatgtccagttccaacaacagttgaagatgatgataaattagcaaactcaagggtagtccatagttggcaaaaaataaatttggtagaaagttggaggagcagatgctgaaggtagaaatgcaaaagatgttttttcttcctgcataaatcacggaggtgtgttctgttttagtgttttccagtcacccactagagcagcttcagattcctctgccaatagaactccacccccagtcccttacctactctatcttctttagggaagcatgtggatttcttcacatctgcaccttactattaggtaagggtgctgcatctacatggaaggctccctgggcccttgaaaaagcaggcagaaactcatcaaggggtttgaagttcttgtgaaatttgatcccagtggctcatgacttatagtcaggcatcaaaccatttcctactttttcaggctgaagaaagtggaaatataactggctggtgaagaaaggagaaaagtcagccccctaccccaccccacactcctagaaaagtttgggggttttttttgtttgtttttggtgtttttttgagacggagtctcgctctatcgccagcttagagtgcagtggctcaatcttagctcactgcaacctccacctcccaggttcaagtgattctcctgcatcagcctcctgagtagctgggaccacaggcatgtgccaccacacccagctaatttttgtatttttagtagagacggggtttcaccacgttggccaggccaatctcgaactcctgacctcaggtgatccacccgcctcagcctcccaaagtgctgggattacaggcatgagccaccgcgcccggcctagaagagttttaatgaaccttccacagtagtaaatgcagagaccactggtggaaattcccatgttggatagaaaagggcgtaagtccagtctaagtatctaaatgtgatatgcccttttgtcacagaagtgtaagacttaaagggaatattctgaccttcgtgtatgaatctgatccacccatcctgtcagctaggattataatttgaactgtcgtttcaggagcatgtgttaaatcatatgagtaaaaaaaaagtagacattgaaaagaagacttgggaataattgggcagatagaatgggttccatggatcattctagttgccactagaaaatgtgagctccttcttcatttaccatgttgataatccggtggtgactttttttttttttttgtaaattgtattagataccccacaggaatgtgacaataataggatagctttgggggctggtgatttgaaacagggactattaagtagattttcccccatcctctaggttcctgtagtctgtgctcagaacttggtttttggcccctattgtttttgcctattttgattttcagagatgatcacatggggacagttaacttttcttctgctgtgttgccttaatgctactagattgtgttgtgttgttggagttttctgacttcttccctataaaaagatactgagagctccataatgaaagaagttgttatactttctcagaatattctggaccactgaatgcacttctaatagagctttaatctaaagaagttagttcagtggttattaactgattttattacaggagaaaaaaactttaacaaaaaggcagggagaaaagtgtgaagggcatcaagcaaaatgacaggggcttcaaaaaacaaccaaagacaaaaccctatcttctgaagaccaaaggtccaactttacttactggctggcacagcctttctgaactccttgagtttagaatagagctcctagaataataaggcggccaaatttaaagatcagtcaatacagtagggacctgctattgatctctcaggcactgagtcttcacatccagtgtcaagcccagcccagcatatggggtgatatgagcagaaaacacacatcggtgtgtcttgatttctcgcagctgtgtaatgtggcatgagaagtatgttttggtgccacatatttctcaatctgatgcctttttgtctttttttttttttgccatttgcatcctatttcatagtgccaaaatgaatttttgtatcttgtcttgtctttgtccattataaactggaggatcacagttaagccttccatgaattcatagtttggaatcatttaccttaccattattttggatttttttcttattacagtgtcactacactgtattcatgtgggggaacaaacatgtaggtgcttgaacatgccccacagacacagttgtagccctagtatttgtgacggtcattattgacacagtgcagactttgcagatggagcattatgctctcagaggactttaaaaatatgtatattaagcaattaactttctggagttggagttatcaaatcttgctgggaaattaacttccaagagctctgaattggatggaattccatctggcttcagagaacaatcagcctatatgaaacggagctttgaaatgtttttcttgtgcagaaatacgaactagaaagaaaagtgctgatctaatgctaagttttctctgtgtactgactcagttgccagaattataatgaaaactgtattttagtctaacaaatgtatagaattttttatgtaataaataaaattttataggaaagaa

SEQ ID NO: 29227 - DNA, 9640 bp, Homo sapiens
  source 1..9640: mol_type = unassigned DNA
agcagctgctgcagcaggagcagagcaggagacgcgtagccgccgtcgccgccgccgggggatgtggccggcgcctgcctctagccgcgccgcctcttgagtaccagccgccgctgcagccgccgccgccgcctagccgtgcggtgccaggccgcgccctccccgggcgcccgccggctcgcatgccgaggggctccggggcgtagctgcgcgcccggcgccgcctccgggctccttcggccccgccatgggctgctgcagctccgcctcctccgccgcgcagagctccaaacgagaatggaagccgctggaggaccgtagctgcacagacataccatggctgctgctcttcatcctcttctgcattgggatgggatttatttgtggcttttcaatagcaacaggtgcagcagcaagactagtgtcaggatacgacagctatggaaatatctgtgggcagaaaaatacaaagttggaagcaataccaaacagtggcatggaccacacccagcggaagtatgtattctttttggatccatgcaacctggacttgataaaccggaagattaagtctgtagcactgtgtgtagcagcgtgtccaaggcaagaactgaaaactctgagtgatgttcagaagtttgcagagataaatggttcagccctatgtagctacaacctaaagccttctgaatacactacatctccaaaatcttctgttctctgccccaaactaccagttccagcgagtgcacctattccattcttccatcgctgtgctcctgtgaacatttcctgctatgccaagtttgcagaggccctgatcacctttgtcagtgacaatagtgtcttacacaggctgattagtggagtaatgaccagcaaagaaattatattgggactttgcttgttatcactagttctatccatgattttgatggtgataatcaggtatatatcaagagtacttgtgtggatcttaacgattctggtcatactcggttcacttggaggcacaggtgtactatggtggctgtatgcaaagcaaagaaggtctcccaaagaaactgttactcctgagcagcttcagatagctgaagacaatcttcgggccctcctcatttatgccatttcagctacagtgttcacagtgatcttattcctgataatgttggttatgcgcaaacgtgttgctcttaccatcgccttgttccacgtagctggcaaggtcttcattcacttgccactgctagtcttccaacccttctggactttctttgctcttgtcttgttttgggtgtactggatcatgacacttctttttcttggcactaccggcagtcctgttcagaatgagcaaggctttgtggagttcaaaatttctgggcctctgcagtacatgtggtggtaccatgtggtgggcctgatttggatcagtgaatttattctagcatgtcagcagatgacagtggcaggagctgtggtaacatactattttactagggataaaaggaatttgccatttacacctattttggcatcagtaaatcgccttattcgttaccacctaggtacggtggcaaaaggatctttcattatcacattagtcaaaattccgcgaatgatccttatgtatattcacagtcagctcaaaggaaaggaaaatgcttgtgcacgatgtgtgctgaaatcttgcatttgttgcctttggtgtcttgaaaagtgcctaaattatttaaatcagaatgcatacacagccacagctatcaacagcaccaacttctgcacctcagcaaaggatgcctttgtcattctggtggagaatgctttgcgagtggctaccatcaacacagtaggagattttatgttattccttggcaaggtgctgatagtctgcagcacaggtttagctgggattatgctgctcaactaccagcaggactacacagtatgggtgctgcctctgatcatcgtctgcctctttgctttcctagtcgctcattgcttcctgtctatttatgaaatggtagtggatgtattattcttgtgttttgccattgatacaaaatacaatgatgggagccctggcagagaattctatatggataaagtgctgatggagtttgtggaaaacagtaggaaagcaatgaaagaagctggtaagggaggcgtcgctgattccagagagctaaagccgatgattaagtaatgctgggaggaataaagaagggacagaaacatggaacataaagcattgaaaattccggtgcttgggcttcggcttcagagtaacgtcagtggcttagggttaaacggccattttattcaaatgcttgctatacaatctgaaaacacactggcaggtgctcctctccttggcaattcattgagtatccagagttctacgatgtttaactgaagaattggctaatgttttgatcctccagtgtgactgttgtttttgtttgggggtgggtttggggttttttgcttttttattcctgaagcttaccagatatgaatggctaatactccattgttctgcttgttgtaatggtgaatgctttaagaaaaaaaagtgtaatttgctaagaataattcatgatctgtttatgcgataactcctttttgttacaatttttttaaaaaaagctatttttgttaatgtaaagtaaatatttcagagcaaattttttaaacttattgcactaaatacaggctctgtacaaaaaaaaaaaaaaaaaaaaagcctcagcattttatcattccatggaaggagaatcttttgaaagaaagcattgcctcctaccagaactagacagtgaattagatcggtattatggaaatgcatacaagtaatgtcactagggcttaataagcagccgtttgctaatgtgcttcctttcaaagggttggacctttaaattgctgcaaaaggtaaattgtatttttttttaagtattggtgttctttactctagctaggctaaaatttgctaaatgccttggtttcttttaaaagttcatgtaatatttctgatttttcagaatatttgcaataagagtctggattttaaaaaacacatgcatacacacaattaagagctcatgtcttagcaagatctgggaaaccaacattgcgagagtagctattttgaaagaataattctccagaagttaacatctaatatctagtatcaccaaacagtatcgctgttctcttttattcatttgaaatgaatataattatataactaacaattgtccaaatagatgagagagcaaatcatgtgagaaaattcagaataccatctgtttcatagccgcacagattttggactttcacaaacattgggaactaaatttagaattggcaaaagtctagaagatgggtatcaaaacagaagacattccaggagctagcaattttaagaggtgtccctccaaagtgacctgatggaagtcctgaacttggaaattaggttctactcacttggacatccctgcatcatggactgttgctgctccctgttccatatgctcgcaatctcagctatttggaagctaccaggaatgctttctaattatcatttgcaactagaactgtaatcagaaagaaattttgtatttttgtataacttgattgtgtgccattttatataacaggtcctgttttacaaataaattttgttttactaacattgtgtttagaaattataatctatgtgtaaccatgtcatttgagttgcaaattaattgccaggctgttttccttaagtaaattcatgtgccgtgtagaaatatgcagatatgcattacacaggcacacacagagagatatttaatatgtggaatatcactctttcatgagctttattccttgattaatttgataaagcctcacagaggattttaagcaatatttaaatgtgttgaggttatgtttggatattcctgctgcctcttttcattcatttcaagtcattcttcagctagctatgggctgccttattgctattcgctcactgcttccatcttctgcccaagtgagaagaatagatgaagaacagaaatttctctgtgaaatgtggatacccgaataatttcataaatcattgattctatgtggtggtttttgtcttcttctgtggtgaatcttcaaaactgtattcaggactcatatttctagagttttaattggggtcctctattgtcaattgtagtagtgaccagagtatcgtggtttttgccatcagataattaaggctctggtgcataatttagactttctaagctcctgcctgaagaataaggtcttccataatatggaagagaaaagttatatttcagtgtaaatccaagagacccatcttctatgagaggcttaccagtgcattagtaataaaacattagcaatttagctagagcactgagattgtataatccttgcatggatgagcagagctcaaagccagttgttcctttaaagcatttaatgcaatggctaatgtttaggattaaagtttttattttatcctataagataattaagtcctaagtcactacaacttaagtagcttaactgtatgttggtacccaaactttttctataatggttaaggaggaggcacttactgagtttattttaaagttatgctagaaatgtttttcttttgtagagatgctctctctctctctctctttttttttttttttttttttttttttccgtgagggcattaggctgctgattgtaagttatttccaataccactgatcttggtatctgccaagggcttccttgccttccctgggcagttttaggatttcaccctagtagggggtatgaggcactgacccctttattctggacccaaactgctttagagcagagttaatacctctccctccctcttcaaaacagctacaggaactgcaggcaccacatatgtgtgaggccacatcactgcccctgaggcttcaactatttccaccatgcactattactagctactaacagccattttaagagatctcctagcctgcaaggtagaattctgggatcagttccaaaaccagaactgccagtaatggtgacttgaatattttatttgatttttggtcagtaaccttgtcatttaaattggactttccaatagccttaacatggcctctgagaagtttcctccagaaaggtctttaagctttcgcttttcaataagtaagttctttactgcttttctactgctactttaaaaaaaaaacaacaacaacaaataaaactctcagagtctggaggcttatcagtgcacctgccacagttaatttctgtattcttttcatacattccatctgacacatacgagtgcactataatggcttgcctagaactggtaagaagtggtctgtgaatgtatattgaaaaaatgtgggttcataagtaaaagcgtaacgcagatatttgtgtattctgtattcacagcgtaggctgccttttgctttaaatgcatattcatgtatctttgtgtgctaagaatgcatgttagcccttttgaaaagtaggcactattcatacacagtagcttcttggaattaactcatctttgttaacttagtggcacatagtccaaatttttaaaaagcaagacccttgaatatgccaagagaaaatctaaagctagcaaacttaaaaaacaaaacaaaaattacacgtcgtgtacagttatgaatttagaatagcacactttttccattcagatttcatacatttgagccaaattcttatactccatgttttaattttaaaaggataattttaatccaagatttaaatctttgaaaatatctttcttatagaaaactttaatgcagtttttaaacttactgatttctgtggaaaacctttcttttctatagaaatactgtagtgccctttcttcccatcttgattttgtacatgtaaagacaaatgatgattcagtttcaatattgcatgaacaattgccactttgtaaattatatggacagaatgtgttctaaggaaattcgttagtaaatttgtgaaaaacatgtgagattgttcgagacctattaggctattcttcagttttgatgctcagttttacaacttaaatgattttctccaggacacggagctcagaataataaagcttttattaatggtctagtgaagatctagttgaacatggaaacattgtaatttacaaatgtctcagaaatttctcacttttatttgctaagacctgaatttaatatttgatattcaaaaacaagttattttgaagagacaatgggtctctttgagcttaagaaagctatggactatctttccttcaaatgcacatcacatgtctgtgaacactcaaaatgctcatagaatttcagggccctcagacggccagcttccacccctgtaccccctcaggggctaatgaacccaagtcaaaaggctgctctaaagttgttctgataatgtgttttgaaatgaggaagtgattaggcctccactagagatacttttgagatgatgcttaccaccttctgacctggaatcatttttataacttaaagactttatgtaatttagtagcaggttagggaatagaaaccacactaatctgaaggaataacaagatgatcaacactgaatcttcatgacagtaagattttctttccttggaggtatgagggtgtgtatgtgtgtgtgtgtgtgtgtgtgtttgtgtgtgtgtgtgtgtgtcctggcggttatttgggggcaaggtaccagattatttgcagtgagccaaaaaaaaaaaaatatccaagaagaaataaatagggaatccttgtaattaatccatctaccaaaacacttgattctttttattgtagctcagctatgacattatgacattatgtggcttagtgttatcagtatactactgtcttaaaatatatttgtcaacatgtccagttccaacaacagttgaagatgatgataaattagcaaactcaagggtagtccatagttggcaaaaaataaatttggtagaaagttggaggagcagatgctgaaggtagaaatgcaaaagatgttttttcttcctgcataaatcacggaggtgtgttctgttttagtgttttccagtcacccactagagcagcttcagattcctctgccaatagaactccacccccagtcccttacctactctatcttctttagggaagcatgtggatttcttcacatctgcaccttactattaggtaagggtgctgcatctacatggaaggctccctgggcccttgaaaaagcaggcagaaactcatcaaggggtttgaagttcttgtgaaatttgatcccagtggctcatgacttatagtcaggcatcaaaccatttcctactttttcaggctgaagaaagtggaaatataactggctggtgaagaaaggagaaaagtcagccccctaccccaccccacactcctagaaaagtttgggggttttttttgtttgtttttggtgtttttttgagacggagtctcgctctatcgccagcttagagtgcagtggctcaatcttagctcactgcaacctccacctcccaggttcaagtgattctcctgcatcagcctcctgagtagctgggaccacaggcatgtgccaccacacccagctaatttttgtatttttagtagagacggggtttcaccacgttggccaggccaatctcgaactcctgacctcaggtgatccacccgcctcagcctcccaaagtgctgggattacaggcatgagccaccgcgcccggcctagaagagttttaatgaaccttccacagtagtaaatgcagagaccactggtggaaattcccatgttggatagaaaagggcgtaagtccagtctaagtatctaaatgtgatatgcccttttgtcacagaagtgtaagacttaaagggaatattctgaccttcgtgtatgaatctgatccacccatcctgtcagctaggattataatttgaactgtcgtttcaggagcatgtgttaaatcatatgagtaaaaaaaaagtagacattgaaaagaagacttgggaataattgggcagatagaatgggttccatggatcattctagttgccactagaaaatgtgagctccttcttcatttaccatgttgataatccggtggtgactttttttttttttttgtaaattgtattagataccccacaggaatgtgacaataataggatagctttgggggctggtgatttgaaacagggactattaagtagattttcccccatcctctaggttcctgtagtctgtgctcagaacttggtttttggcccctattgtttttgcctattttgattttcagagatgatcacatggggacagttaacttttcttctgctgtgttgccttaatgctactagattgtgttgtgttgttggagttttctgacttcttccctataaaaagatactgagagctccataatgaaagaagttgttatactttctcagaatattctggaccactgaatgcacttctaatagagctttaatctaaagaagttagttcagtggttattaactgattttattacaggagaaaaaaactttaacaaaaaggcagggagaaaagtgtgaagggcatcaagcaaaatgacaggggcttcaaaaaacaaccaaagacaaaaccctatcttctgaagaccaaaggtccaactttacttactggctggcacagcctttctgaactccttgagtttagaatagagctcctagaataataaggcggccaaatttaaagatcagtcaatacagtagggacctgctattgatctctcaggcactgagtcttcacatccagtgtcaagcccagcccagcatatggggtgatatgagcagaaaacacacatcggtgtgtcttgatttctcgcagctgtgtaatgtggcatgagaagtatgttttggtgccacatatttctcaatctgatgcctttttgtctttttttttttttgccatttgcatcctatttcatagtgccaaaatgaatttttgtatcttgtcttgtctttgtccattataaactggaggatcacagttaagccttccatgaattcatagtttggaatcatttaccttaccattattttggatttttttcttattacagtgtcactacactgtattcatgtgggggaacaaacatgtaggtgcttgaacatgccccacagacacagttgtagccctagtatttgtgacggtcattattgacacagtgcagactttgcagatggagcattatgctctcagaggactttaaaaatatgtatattaagcaattaactttctggagttggagttatcaaatcttgctgggaaattaacttccaagagctctgaattggatggaattccatctggcttcagagaacaatcagcctatatgaaacggagctttgaaatgtttttcttgtgcagaaatacgaactagaaagaaaagtgctgatctaatgctaagttttctctgtgtactgactcagttgccagaattataatgaaaactgtattttagtctaacaaatgtatagaattttttatgtaataaataaaattttataggaaagaa

SEQ ID NO: 29228 - DNA, 3088 bp, Homo sapiens
  source 1..3088: mol_type = unassigned DNA
agcagctgctgcagcaggagcagagcaggagacgcgtagccgccgtcgccgccgccgggggatgtggccggcgcctgcctctagccgcgccgcctcttgagtaccagccgccgctgcagccgccgccgccgcctagccgtgcggtgccaggccgcgccctccccgggcgcccgccggctcgcatgccgaggggctccggggcgtagctgcgcgcccggcgccgcctccgggctccttcggccccgccatgggctgctgcagctccgcctcctccgccgcgcagagctccaaacgagaatggaagccgctggaggaccgtagctgcacagacataccatggctgctgctcttcatcctcttctgcattgggatgggatttatttgtggcttttcaatagcaacaggtgcagcagcaagactagtgtcaggatacgacagctatggaaatatctgtgggcagaaaaatacaaagttggaagcaataccaaacagtggcatggaccacacccagcggaagtatgtattctttttggatccatgcaacctggacttgataaaccggaagattaagtctgtagcactgtgtgtagcagcgtgtccaaggcaagaactgaaaactctgagtgatgttcagaagtttgcagagataaatggttcagccctatgtagctacaacctaaagccttctgaatacactacatctccaaaatcttctgttctctgccccaaactaccagttccagcgagtgcacctattccattcttccatcgctgtgctcctgtgaacatttcctgctatgccaagtttgcagaggccctgatcacctttgtcagtgacaatagtgtcttacacaggctgattagtggagtaatgaccagcaaagaaattatattgggactttgcttgttatcactagttctatccatgattttgatggtgataatcaggtatatatcaagagtacttgtgtggatcttaacgattctggtcatactcggttcacttggaggcacaggtgtactatggtggctgtatgcaaagcaaagaaggtctcccaaagaaactgttactcctgagcagcttcagatagctgaagacaatcttcgggccctcctcatttatgccatttcagctacagtgttcacagtgatcttattcctgataatgttggttatgcgcaaacgtgttgctcttaccatcgccttgttccacgtagctggcaaggtcttcattcacttgccactgctagtcttccaacccttctggactttctttgctcttgtcttgttttgggtgtactggatcatgacacttctttttcttggcactaccggcagtcctgttcagaatgagcaaggctttgtggagttcaaaatttctgggcctctgcagtacatgtggtggtaccatgtggtgggcctgatttggatcagtgaatttattctagcatgtcagcagatgacagtggcaggagctgtggtaacatactattttactagggataaaaggaatttgccatttacacctattttggcatcagtaaatcgccttattcgttaccacctaggtacggtggcaaaaggatctttcattatcacattagtcaaaattccgcgaatgatccttatgtatattcacagtcagctcaaaggaaaggaaaatgcttgtgcacgatgtgtgctgaaatcttgcatttgttgcctttggtgtcttgaaaagtgcctaaattatttaaatcagaatgcatacacagccacagctatcaacagcaccaacttctgcacctcagcaaaggatgcctttgtcattctggtggagaatgctttgcgagtggctaccatcaacacagtaggagattttatgttattccttggcaaggtgctgatagtctgcagcacaggtttagctgggattatgctgctcaactaccagcaggactacacagtatgggtgctgcctctgatcatcgtctgcctctttgctttcctagtcgctcattgcttcctgtctatttatgaaatggtagtggatgtattattcttgtgttttgccattgatacaaaatacaatgatgggagccctggcagagaattctatatggataaagtgctgatggagtttgtggaaaacagtaggaaagcaatgaaagaagctggtaagggaggcgtcgctgattccagagagctaaagccgatgctgaagaaaaggtgactggtctcatgagccctgaagaatgaactcagaggaggttgtttacatgaggttctcccactcaccagctgttgagagtctgcgattatgaagagcaggatcttattacttcaatgaaagcatgtaacaagtttctcaaaccaccaacagccaagtggatttggtacagtgcggctgtctaataaataatcaaaagcatttgatagaaatctgtcttgcagcactgtcttcacatttaatgttgctttctcttctagtctcgggtatgtttaaatgattcccttttctcactctagcgccaatactggcctgaaggctagatccccagcgaaattcttgttcaggctgggtctgtcgactttgactctgctatttatagagccaatgtgggttaataactactatttattgagtgcccgttccatgccaagcattaggctgggtgctttacataagtttaatcctcacaatagccctgtaaggttgcacctattatctccactttgaccacgaagaaacggagactcagagagtttgtatcctatgtgtaagatcacacagttgtcagagtcaggattcaaatctagttctaactccaaagctctccacactaacattgttttgcttattattgctccaaagataattaccccaacaccttatcaatgctatacttcctctcataatggcagtgtaggtatgtgggaagtgtctgagatggaggaccagggagtctttagaggcgcaaaagaatcacagaattatcttctaaaaaaaaacacaatattctttgagatcaggagttgataaaatatggcccccagctatttttgtaaataaaggtttattgggaacacagccacacccaatccttca

SEQ ID NO: 29229 - DNA, 10433 bp, Homo sapiens
  source 1..10433: mol_type = unassigned DNA
agcagctgctgcagcaggagcagagcaggagacgcgtagccgccgtcgccgccgccgggggatgtggccggcgcctgcctctagccgcgccgcctcttgagtaccagccgccgctgcagccgccgccgccgcctagccgtgcggtgccaggccgcgccctccccgggcgcccgccggctcgcatgccgaggggctccggggcgtagctgcgcgcccggcgccgcctccgggctccttcggccccgccatgggctgctgcagctccgcctcctccgccgcgcagagctccaaacgagaatggaagccgctggaggaccgtagctgcacagacataccatggctgctgctcttcatcctcttctgcattgggatgggatttatttgtggcttttcaatagcaacaggtgcagcagcaagactagtgtcaggatacgacagctatggaaatatctgtgggcagaaaaatacaaagttggaagcaataccaaacagtggcatggaccacacccagcggaagtatgtattctttttggatccatgcaacctggacttgataaaccggaagattaagtctgtagcactgtgtgtagcagcgtgtccaaggcaagaactgaaaactctgagtgatgttcagaagtttgcagagataaatggttcagccctatgtagctacaacctaaagccttctgaatacactacatctccaaaatcttctgttctctgccccaaactaccagttccagcgagtgcacctattccattcttccatcgctgtgctcctgtgaacatttcctgctatgccaagtttgcagaggccctgatcacctttgtcagtgacaatagtgtcttacacaggctgattagtggagtaatgaccagcaaagaaattatattgggactttgcttgttatcactagttctatccatgattttgatggtgataatcaggtatatatcaagagtacttgtgtggatcttaacgattctggtcatactcggttcacttggaggcacaggtgtactatggtggctgtatgcaaagcaaagaaggtctcccaaagaaactgttactcctgagcagcttcagatagctgaagacaatcttcgggccctcctcatttatgccatttcagctacagtgttcacagtgatcttattcctgataatgttggttatgcgcaaacgtgttgctcttaccatcgccttgttccacgtagctggcaaggtcttcattcacttgccactgctagtcttccaacccttctggactttctttgctcttgtcttgttttgggtgtactggatcatgacacttctttttcttggcactaccggcagtcctgttcagaatgagcaaggctttgtggagttcaaaatttctgggcctctgcagtacatgtggtggtaccatgtggtgggcctgatttggatcagtgaatttattctagcatgtcagcagatgacagtggcaggagctgtggtaacatactattttactagggataaaaggaatttgccatttacacctattttggcatcagtaaatcgccttattcgttaccacctaggtacggtggcaaaaggatctttcattatcacattagtcaaaattccgcgaatgatccttatgtatattcacagtcagctcaaaggaaaggaaaatgcttgtgcacgatgtgtgctgaaatcttgcatttgttgcctttggtgtcttgaaaagtgcctaaattatttaaatcagaatgcatacacagccacagctatcaacagcaccaacttctgcacctcagcaaaggatgcctttgtcattctggtggagaatgctttgcgagtggctaccatcaacacagtaggagattttatgttattccttggcaaggtgctgatagtctgcagcacaggtttagctgggattatgctgctcaactaccagcaggactacacagtatgggtgctgcctctgatcatcgtctgcctctttgctttcctagtcgctcattgcttcctgtctatttatgaaatggtagtggatgtattattcttgtgttttgccattgatacaaaatacaatgatgggagccctggcagagaattctatatggataaagtgctgatggagtttgtggaaaacagtaggaaagcaatgaaagaagctggtaagggaggcgtcgctgattccagagagctaaagccgatggcttcgggagcaagttctgcttgaacctagccgacggttatggaaacccattgacattccaaaacaatatatacacacacacataaatcagccaaaatcagagaaaaggaacagggatttaataccttttttatgcttatttttgtcaaacatgtactcctttcatacgggtggcttttacaaggcaacttccgtcatttaatgttttcaactgtaattgtcttaatggaaatgttaaaattcatatctgattaacatttttaataacttagaggagattttaactttatttaaaaataggtaaaattattgtacctaattatgtctaaagtttattcaggggtaatttccctgatgtctgtataaaatcaagatcttattttactgatgcataagtcctagtgggtcaagactaggcatatgctttcagataaataaggaattactccaatcagttttccccaatcaaagaagccatgtcattttacttttagaaacatacaattgggcccaatatgggaattttcataatagttcatacatttgtcagccaacattaaaaggtaaccaactcctcaggtatttgtagtttaccctaacgcttctttaaaagaaagtaggtaaaaaaagaaaagggtagataatctttcgtatgcaaacttttcccttatattttgtctttctttcctttttgactttagtagcatcctccacacatttgtgtgcctgatttgaaaggaagctggggcacccagcgagtttagcctttaagtttctgtgtattgatttgcagattaagtaatgctgggaggaataaagaagggacagaaacatggaacataaagcattgaaaattccggtgcttgggcttcggcttcagagtaacgtcagtggcttagggttaaacggccattttattcaaatgcttgctatacaatctgaaaacacactggcaggtgctcctctccttggcaattcattgagtatccagagttctacgatgtttaactgaagaattggctaatgttttgatcctccagtgtgactgttgtttttgtttgggggtgggtttggggttttttgcttttttattcctgaagcttaccagatatgaatggctaatactccattgttctgcttgttgtaatggtgaatgctttaagaaaaaaaagtgtaatttgctaagaataattcatgatctgtttatgcgataactcctttttgttacaatttttttaaaaaaagctatttttgttaatgtaaagtaaatatttcagagcaaattttttaaacttattgcactaaatacaggctctgtacaaaaaaaaaaaaaaaaaaaaagcctcagcattttatcattccatggaaggagaatcttttgaaagaaagcattgcctcctaccagaactagacagtgaattagatcggtattatggaaatgcatacaagtaatgtcactagggcttaataagcagccgtttgctaatgtgcttcctttcaaagggttggacctttaaattgctgcaaaaggtaaattgtatttttttttaagtattggtgttctttactctagctaggctaaaatttgctaaatgccttggtttcttttaaaagttcatgtaatatttctgatttttcagaatatttgcaataagagtctggattttaaaaaacacatgcatacacacaattaagagctcatgtcttagcaagatctgggaaaccaacattgcgagagtagctattttgaaagaataattctccagaagttaacatctaatatctagtatcaccaaacagtatcgctgttctcttttattcatttgaaatgaatataattatataactaacaattgtccaaatagatgagagagcaaatcatgtgagaaaattcagaataccatctgtttcatagccgcacagattttggactttcacaaacattgggaactaaatttagaattggcaaaagtctagaagatgggtatcaaaacagaagacattccaggagctagcaattttaagaggtgtccctccaaagtgacctgatggaagtcctgaacttggaaattaggttctactcacttggacatccctgcatcatggactgttgctgctccctgttccatatgctcgcaatctcagctatttggaagctaccaggaatgctttctaattatcatttgcaactagaactgtaatcagaaagaaattttgtatttttgtataacttgattgtgtgccattttatataacaggtcctgttttacaaataaattttgttttactaacattgtgtttagaaattataatctatgtgtaaccatgtcatttgagttgcaaattaattgccaggctgttttccttaagtaaattcatgtgccgtgtagaaatatgcagatatgcattacacaggcacacacagagagatatttaatatgtggaatatcactctttcatgagctttattccttgattaatttgataaagcctcacagaggattttaagcaatatttaaatgtgttgaggttatgtttggatattcctgctgcctcttttcattcatttcaagtcattcttcagctagctatgggctgccttattgctattcgctcactgcttccatcttctgcccaagtgagaagaatagatgaagaacagaaatttctctgtgaaatgtggatacccgaataatttcataaatcattgattctatgtggtggtttttgtcttcttctgtggtgaatcttcaaaactgtattcaggactcatatttctagagttttaattggggtcctctattgtcaattgtagtagtgaccagagtatcgtggtttttgccatcagataattaaggctctggtgcataatttagactttctaagctcctgcctgaagaataaggtcttccataatatggaagagaaaagttatatttcagtgtaaatccaagagacccatcttctatgagaggcttaccagtgcattagtaataaaacattagcaatttagctagagcactgagattgtataatccttgcatggatgagcagagctcaaagccagttgttcctttaaagcatttaatgcaatggctaatgtttaggattaaagtttttattttatcctataagataattaagtcctaagtcactacaacttaagtagcttaactgtatgttggtacccaaactttttctataatggttaaggaggaggcacttactgagtttattttaaagttatgctagaaatgtttttcttttgtagagatgctctctctctctctctctttttttttttttttttttttttttttccgtgagggcattaggctgctgattgtaagttatttccaataccactgatcttggtatctgccaagggcttccttgccttccctgggcagttttaggatttcaccctagtagggggtatgaggcactgacccctttattctggacccaaactgctttagagcagagttaatacctctccctccctcttcaaaacagctacaggaactgcaggcaccacatatgtgtgaggccacatcactgcccctgaggcttcaactatttccaccatgcactattactagctactaacagccattttaagagatctcctagcctgcaaggtagaattctgggatcagttccaaaaccagaactgccagtaatggtgacttgaatattttatttgatttttggtcagtaaccttgtcatttaaattggactttccaatagccttaacatggcctctgagaagtttcctccagaaaggtctttaagctttcgcttttcaataagtaagttctttactgcttttctactgctactttaaaaaaaaaacaacaacaacaaataaaactctcagagtctggaggcttatcagtgcacctgccacagttaatttctgtattcttttcatacattccatctgacacatacgagtgcactataatggcttgcctagaactggtaagaagtggtctgtgaatgtatattgaaaaaatgtgggttcataagtaaaagcgtaacgcagatatttgtgtattctgtattcacagcgtaggctgccttttgctttaaatgcatattcatgtatctttgtgtgctaagaatgcatgttagcccttttgaaaagtaggcactattcatacacagtagcttcttggaattaactcatctttgttaacttagtggcacatagtccaaatttttaaaaagcaagacccttgaatatgccaagagaaaatctaaagctagcaaacttaaaaaacaaaacaaaaattacacgtcgtgtacagttatgaatttagaatagcacactttttccattcagatttcatacatttgagccaaattcttatactccatgttttaattttaaaaggataattttaatccaagatttaaatctttgaaaatatctttcttatagaaaactttaatgcagtttttaaacttactgatttctgtggaaaacctttcttttctatagaaatactgtagtgccctttcttcccatcttgattttgtacatgtaaagacaaatgatgattcagtttcaatattgcatgaacaattgccactttgtaaattatatggacagaatgtgttctaaggaaattcgttagtaaatttgtgaaaaacatgtgagattgttcgagacctattaggctattcttcagttttgatgctcagttttacaacttaaatgattttctccaggacacggagctcagaataataaagcttttattaatggtctagtgaagatctagttgaacatggaaacattgtaatttacaaatgtctcagaaatttctcacttttatttgctaagacctgaatttaatatttgatattcaaaaacaagttattttgaagagacaatgggtctctttgagcttaagaaagctatggactatctttccttcaaatgcacatcacatgtctgtgaacactcaaaatgctcatagaatttcagggccctcagacggccagcttccacccctgtaccccctcaggggctaatgaacccaagtcaaaaggctgctctaaagttgttctgataatgtgttttgaaatgaggaagtgattaggcctccactagagatacttttgagatgatgcttaccaccttctgacctggaatcatttttataacttaaagactttatgtaatttagtagcaggttagggaatagaaaccacactaatctgaaggaataacaagatgatcaacactgaatcttcatgacagtaagattttctttccttggaggtatgagggtgtgtatgtgtgtgtgtgtgtgtgtgtgtttgtgtgtgtgtgtgtgtgtcctggcggttatttgggggcaaggtaccagattatttgcagtgagccaaaaaaaaaaaaatatccaagaagaaataaatagggaatccttgtaattaatccatctaccaaaacacttgattctttttattgtagctcagctatgacattatgacattatgtggcttagtgttatcagtatactactgtcttaaaatatatttgtcaacatgtccagttccaacaacagttgaagatgatgataaattagcaaactcaagggtagtccatagttggcaaaaaataaatttggtagaaagttggaggagcagatgctgaaggtagaaatgcaaaagatgttttttcttcctgcataaatcacggaggtgtgttctgttttagtgttttccagtcacccactagagcagcttcagattcctctgccaatagaactccacccccagtcccttacctactctatcttctttagggaagcatgtggatttcttcacatctgcaccttactattaggtaagggtgctgcatctacatggaaggctccctgggcccttgaaaaagcaggcagaaactcatcaaggggtttgaagttcttgtgaaatttgatcccagtggctcatgacttatagtcaggcatcaaaccatttcctactttttcaggctgaagaaagtggaaatataactggctggtgaagaaaggagaaaagtcagccccctaccccaccccacactcctagaaaagtttgggggttttttttgtttgtttttggtgtttttttgagacggagtctcgctctatcgccagcttagagtgcagtggctcaatcttagctcactgcaacctccacctcccaggttcaagtgattctcctgcatcagcctcctgagtagctgggaccacaggcatgtgccaccacacccagctaatttttgtatttttagtagagacggggtttcaccacgttggccaggccaatctcgaactcctgacctcaggtgatccacccgcctcagcctcccaaagtgctgggattacaggcatgagccaccgcgcccggcctagaagagttttaatgaaccttccacagtagtaaatgcagagaccactggtggaaattcccatgttggatagaaaagggcgtaagtccagtctaagtatctaaatgtgatatgcccttttgtcacagaagtgtaagacttaaagggaatattctgaccttcgtgtatgaatctgatccacccatcctgtcagctaggattataatttgaactgtcgtttcaggagcatgtgttaaatcatatgagtaaaaaaaaagtagacattgaaaagaagacttgggaataattgggcagatagaatgggttccatggatcattctagttgccactagaaaatgtgagctccttcttcatttaccatgttgataatccggtggtgactttttttttttttttgtaaattgtattagataccccacaggaatgtgacaataataggatagctttgggggctggtgatttgaaacagggactattaagtagattttcccccatcctctaggttcctgtagtctgtgctcagaacttggtttttggcccctattgtttttgcctattttgattttcagagatgatcacatggggacagttaacttttcttctgctgtgttgccttaatgctactagattgtgttgtgttgttggagttttctgacttcttccctataaaaagatactgagagctccataatgaaagaagttgttatactttctcagaatattctggaccactgaatgcacttctaatagagctttaatctaaagaagttagttcagtggttattaactgattttattacaggagaaaaaaactttaacaaaaaggcagggagaaaagtgtgaagggcatcaagcaaaatgacaggggcttcaaaaaacaaccaaagacaaaaccctatcttctgaagaccaaaggtccaactttacttactggctggcacagcctttctgaactccttgagtttagaatagagctcctagaataataaggcggccaaatttaaagatcagtcaatacagtagggacctgctattgatctctcaggcactgagtcttcacatccagtgtcaagcccagcccagcatatggggtgatatgagcagaaaacacacatcggtgtgtcttgatttctcgcagctgtgtaatgtggcatgagaagtatgttttggtgccacatatttctcaatctgatgcctttttgtctttttttttttttgccatttgcatcctatttcatagtgccaaaatgaatttttgtatcttgtcttgtctttgtccattataaactggaggatcacagttaagccttccatgaattcatagtttggaatcatttaccttaccattattttggatttttttcttattacagtgtcactacactgtattcatgtgggggaacaaacatgtaggtgcttgaacatgccccacagacacagttgtagccctagtatttgtgacggtcattattgacacagtgcagactttgcagatggagcattatgctctcagaggactttaaaaatatgtatattaagcaattaactttctggagttggagttatcaaatcttgctgggaaattaacttccaagagctctgaattggatggaattccatctggcttcagagaacaatcagcctatatgaaacggagctttgaaatgtttttcttgtgcagaaatacgaactagaaagaaaagtgctgatctaatgctaagttttctctgtgtactgactcagttgccagaattataatgaaaactgtattttagtctaacaaatgtatagaattttttatgtaataaataaaattttataggaaagaa

SEQ ID NO: 29230 - DNA, 3434 bp, Homo sapiens
  source 1..3434: mol_type = unassigned DNA
ggtttgggccgccccgcctggcgctgtgctgggaggagccgccgccagtcgcgcggtcagtgcctccctccagactcgggagggtcgagggggcgcgggagagagcgcgggcggccgccggggctggtcgcctgcagggatgggggacgagcggccccactactacgggaaacacggaacgccacagaagtatgatcccactttcaaaggacccatttacaataggggctgcacggatatcatatgctgtgtgttcctgctcctggccattgtgggctacgtggctgtaggcatcatagcctggactcatggagaccctcgaaaggtgatctaccccactgacagccggggcgagttctgcgggcagaagggcacaaaaaacgagaacaaaccctatctgttttatttcaacattgtgaaatgtgccagccccctggttctgctggaattccaatgtcccactccccagatctgcgtggaaaaatgccccgaccgctacctcacgtacctgaatgctcgcagctcccgggactttgagtactataagcagttctgtgttcctggcttcaagaacaataaaggagtggctgaggtgcttcaagatggtgactgccctgctgtcctcatccccagcaaacccttggcccggagatgcttccccgctatccacgcctacaagggtgtcctgatggtgggcaatgagacgacctatgaggatgggcatggctcccggaaaaacatcacagacctggtggagggcgccaagaaagccaatggagtcctagaggcgcggcaactcgccatgcgcatatttgaagattacaccgtctcttggtactggattatcataggcctggtcattgccatggcgatgagcctcctgttcatcatcctgcttcgcttcctggctggtattatggtctgggtgatgatcatcatggtgattctggtgctgggctacggaatatttcactgctacatggagtactcccgactgcgtggtgaggccggctctgatgtctctttggtggacctcggctttcagacggatttccgggtgtacctgcacttacggcagacctggttggcctttatgatcattctgagtatccttgaagtcattatcatcttgctgctcatctttctccggaagagaattctcatcgcgattgcactcatcaaagaagccagcagggctgtgggatacgtcatgtgctccttgctctacccactggtcaccttcttcttgctgtgcctctgcatcgcctactgggccagcactgctgtcttcctgtccacttccaacgaagcggtctataagatctttgatgacagcccctgcccatttactgcgaaaacctgcaacccagagaccttcccctcctccaatgagtcccgccaatgccccaatgcccgttgccagttcgccttctacggtggtgagtcgggctaccaccgggccctgctgggcctgcagatcttcaatgccttcatgttcttctggttggccaacttcgtgctggcgctgggccaggtcacgctggccggggcctttgcctcctactactgggccctgcgcaagccggacgacctgccggccttcccgctcttctctgcctttggccgggcgctcaggtaccacacaggctccctggcctttggcgcgctcatcctggccattgtgcagatcatccgtgtgatactcgagtacctggatcagcggctgaaagctgcagagaacaagtttgccaagtgcctcatgacctgtctcaaatgctgcttctggtgcctggagaagttcatcaaattccttaataggaatgcctacatcatgattgccatctacggcaccaatttctgcacctcggccaggaatgccttcttcctgctcatgagaaacatcatcagagtggctgtcctggataaagttactgacttcctcttcctgttgggcaaacttctgatcgttggtagtgtggggatcctggctttcttcttcttcacccaccgtatcaggatcgtgcaggatacagcaccacccctcaattattactgggttcctatactgacggtgatcgttggctcctacttgattgcacacggtttcttcagcgtctatggcatgtgtgtggacacgctgttcctctgcttcttggaggacctggagaggaatgacggctcggccgagaggccttacttcatgtcttccaccctcaagaaactcttgaacaagaccaacaagaaggcagcggagtcctgaaggccccgtgctccccacctctcaaggagtctcatgccgcagggtgctcagtagctgggtctgttcccccagccccttgggctcacctgaagtcctatcactgccgctctgcccctccccatgagccagatcccaccagtttctggacgtggagagtctggggcatctccttcttatgccaaggggcgcttggagttttcatggctgcccctccagactgcgagaaacaagtaaaaacccattggggcctcttgatgtctgggatggcacgtggcccgacctccacaagctccctcatgcttcctgtcccccgcttacacgacaacgggccagaccacaggaaggacggtgtttgtgtctgagggagctgctggccacagtgaacacccacgtttattcctgcctgctccggccaggactgaaccccttctccacacctgaacagttggctcaagggccaccagaagcatttctttattattattattttttaacctggacatgcattaaagggtctattagctttctttccgtctgtctcaacagctgagatggggccgccaaggagtgccttccttttgctccctcctagctgggagtgacgggtgggagtgtgtgtgcccaggtgggggtgtctcctggctgggaaggagggaaagggagggagagttttgcgggggttggcagtggagagcaggctggagaggagatggctaatagctgtttaatggaaacctgctgggctggagggagttaggctgaatttcccgacttcctctgccagttattgacacagctctctttgtaagagaggaaagaaactaaacccacccaagggatgatgtcagggggagaggtggagggcagatgtcctgggcaaaccgggcccctctgcccacacacctcacttgatccttttgccaaacttgtcaaactcaggggaactggcttcccagttgcccctttgccatattccaagtccccctcagacttcatgtctctgctcatcagcactgtcccaggatcctggagagggagaactcctggccccaggggaaagaggggggggtctcccgtttcctgtgcctgcaccagccctgcccccattgcgtctgcacacccctgcgtgtaactgcattccaaccactaataaagtgcctattgtacaggtcca

SEQ ID NO: 29231 - DNA, 2199 bp, Homo sapiens
  source 1..2199: mol_type = unassigned DNA
agtgcctccctccagactcgggagggtcgagggggcgcgggagagagcgcgggcggccgccggggctggtcgcctgcagggatgggggacgagcggccccactactacgggaaacacggaacgccacagaagtatgatcccactttcaaaggacccatttacaataggggctgcacggatatcatatgctgtgtgttcctgctcctggccattgtgggctacgtggctgtaggcatcatagcctggactcatggagaccctcgaaaggtgatctaccccactgacagccggggcgagttctgcgggcagaagggcacaaaaaacgagaacaaaccctatctgttttatttcaacattgtgaaatgtgccagccccctggttctgctggaattccaatgtcccactccccagatctgcgtggaaaaatgccccgaccgctacctcacgtacctgaatgctcgcagctcccgggactttgagtactataagcagttctgtgttcctggcttcaagaacaataaaggagtggctgaggtgcttcaagatggtgactgccctgctgtcctcatccccagcaaacccttggcccggagatgcttccccgctatccacgcctacaagggtgtcctgatggtgggcaatgagacgacctatgaggatgggcatggctcccggaaaaacatcacagacctggtggagggcgccaagaaagccaatggagtcctagaggcgcggcaactcgccatgcgcatatttgaagattacaccgtctcttggtactggattatcataggcctggtcattgccatggcgatgagcctcctgttcatcatcctgcttcgcttcctggctggtattatggtctgggtgatgatcatcatggtgattctggtgctgggctacggaatatttcactgctacatggagtactcccgactgcgtggtgaggccggctctgatgtctctttggtggacctcggctttcagacggatttccgggtgtacctgcacttacggcagacctggttggcctttatgatcattctgagtatccttgaagtcattatcatcttgctgctcatctttctccggaagagaattctcatcgcgattgcactcatcaaagaagccagcagggctgtgggatacgtcatgtgctccttgctctacccactggtcaccttcttcttgctgtgcctctgcatcgcctactgggccagcactgctgtcttcctgtccacttccaacgaagcggtctataagatctttgatgacagcccctgcccatttactgcgaaaacctgcaacccagagaccttcccctcctccaatgagtcccgccaatgccccaatgcccgttgccagttcgccttctacggtggtgagtcgggctaccaccgggccctgctgggcctgcagatcttcaatgccttcatgttcttctggttggccaacttcgtgctggcgctgggccaggtcacgctggccggggcctttgcctcctactactgggccctgcgcaagccggacgacctgccggccttcccgctcttctctgcctttggccgggcgctcaggtaccacacaggctccctggcctttggcgcgctcatcctggccattgtgcagatcatccgtgtgatactcgagtacctggatcagcggctgaaagctgcagagaacaagtttgccaagtgcctcatgacctgtctcaaatgctgcttctggtgcctggagaagttcatcaaattccttaataggaatgcctacatcatgattgccatctacggcaccaatttctgcacctcggccaggaatgccttcttcctgctcatgagaaacatcatcagagtggctgtcctggataaagttactgacttcctcttcctgttgggcaaacttctgatcgttggtagtgtggggatcctggctttcttcttcttcacccaccgtatcaggatcgtgcaggatacagcaccacccctcaattattactgggttcctatactgacggtgatcgttggctcctacttgattgcacacggtttcttcagcgtctatggcatgtgtgtggacacgctgttcctctgcttctgtgaggacctggaaaggaatgacggctctcaggagcgaccctacttcatgtcgcccgagctgagagacatcctgttgaaggggagtgcggaggaggggaagcgg

SEQ ID NO: 29232 - DNA, 3375 bp, Homo sapiens
  source 1..3375: mol_type = unassigned DNA
gcggggcgctgcagcccgcggagcctcccgcccgcccgggctggggtcgcgctggctcggactccgctccccgccccgccgcggccatggaggacgagcggaaaaacggagcctacggaacgccacagaagtatgatcccactttcaaaggacccatttacaataggggctgcacggatatcatatgctgtgtgttcctgctcctggccattgtgggctacgtggctgtaggcatcatagcctggactcatggagaccctcgaaaggtgatctaccccactgacagccggggcgagttctgcgggcagaagggcacaaaaaacgagaacaaaccctatctgttttatttcaacattgtgaaatgtgccagccccctggttctgctggaattccaatgtcccactccccagatctgcgtggaaaaatgccccgaccgctacctcacgtacctgaatgctcgcagctcccgggactttgagtactataagcagttctgtgttcctggcttcaagaacaataaaggagtggctgaggtgcttcaagatggtgactgccctgctgtcctcatccccagcaaacccttggcccggagatgcttccccgctatccacgcctacaagggtgtcctgatggtgggcaatgagacgacctatgaggatgggcatggctcccggaaaaacatcacagacctggtggagggcgccaagaaagccaatggagtcctagaggcgcggcaactcgccatgcgcatatttgaagattacaccgtctcttggtactggattatcataggcctggtcattgccatggcgatgagcctcctgttcatcatcctgcttcgcttcctggctggtattatggtctgggtgatgatcatcatggtgattctggtgctgggctacggaatatttcactgctacatggagtactcccgactgcgtggtgaggccggctctgatgtctctttggtggacctcggctttcagacggatttccgggtgtacctgcacttacggcagacctggttggcctttatgatcattctgagtatccttgaagtcattatcatcttgctgctcatctttctccggaagagaattctcatcgcgattgcactcatcaaagaagccagcagggctgtgggatacgtcatgtgctccttgctctacccactggtcaccttcttcttgctgtgcctctgcatcgcctactgggccagcactgctgtcttcctgtccacttccaacgaagcggtctataagatctttgatgacagcccctgcccatttactgcgaaaacctgcaacccagagaccttcccctcctccaatgagtcccgccaatgccccaatgcccgttgccagttcgccttctacggtggtgagtcgggctaccaccgggccctgctgggcctgcagatcttcaatgccttcatgttcttctggttggccaacttcgtgctggcgctgggccaggtcacgctggccggggcctttgcctcctactactgggccctgcgcaagccggacgacctgccggccttcccgctcttctctgcctttggccgggcgctcaggtaccacacaggctccctggcctttggcgcgctcatcctggccattgtgcagatcatccgtgtgatactcgagtacctggatcagcggctgaaagctgcagagaacaagtttgccaagtgcctcatgacctgtctcaaatgctgcttctggtgcctggagaagttcatcaaattccttaataggaatgcctacatcatgattgccatctacggcaccaatttctgcacctcggccaggaatgccttcttcctgctcatgagaaacatcatcagagtggctgtcctggataaagttactgacttcctcttcctgttgggcaaacttctgatcgttggtagtgtggggatcctggctttcttcttcttcacccaccgtatcaggatcgtgcaggatacagcaccacccctcaattattactgggttcctatactgacggtgatcgttggctcctacttgattgcacacggtttcttcagcgtctatggcatgtgtgtggacacgctgttcctctgcttcttggaggacctggagaggaatgacggctcggccgagaggccttacttcatgtcttccaccctcaagaaactcttgaacaagaccaacaagaaggcagcggagtcctgaaggccccgtgctccccacctctcaaggagtctcatgccgcagggtgctcagtagctgggtctgttcccccagccccttgggctcacctgaagtcctatcactgccgctctgcccctccccatgagccagatcccaccagtttctggacgtggagagtctggggcatctccttcttatgccaaggggcgcttggagttttcatggctgcccctccagactgcgagaaacaagtaaaaacccattggggcctcttgatgtctgggatggcacgtggcccgacctccacaagctccctcatgcttcctgtcccccgcttacacgacaacgggccagaccacaggaaggacggtgtttgtgtctgagggagctgctggccacagtgaacacccacgtttattcctgcctgctccggccaggactgaaccccttctccacacctgaacagttggctcaagggccaccagaagcatttctttattattattattttttaacctggacatgcattaaagggtctattagctttctttccgtctgtctcaacagctgagatggggccgccaaggagtgccttccttttgctccctcctagctgggagtgacgggtgggagtgtgtgtgcccaggtgggggtgtctcctggctgggaaggagggaaagggagggagagttttgcgggggttggcagtggagagcaggctggagaggagatggctaatagctgtttaatggaaacctgctgggctggagggagttaggctgaatttcccgacttcctctgccagttattgacacagctctctttgtaagagaggaaagaaactaaacccacccaagggatgatgtcagggggagaggtggagggcagatgtcctgggcaaaccgggcccctctgcccacacacctcacttgatccttttgccaaacttgtcaaactcaggggaactggcttcccagttgcccctttgccatattccaagtccccctcagacttcatgtctctgctcatcagcactgtcccaggatcctggagagggagaactcctggccccaggggaaagaggggggggtctcccgtttcctgtgcctgcaccagccctgcccccattgcgtctgcacacccctgcgtgtaactgcattccaaccactaataaagtgcctattgtacaggtcca

SEQ ID NO: 29233 - DNA, 2589 bp, Homo sapiens
  source 1..2589: mol_type = unassigned DNA
aatcactccggagactgagccatggggggaaagcagcgggacgaggatgacgaggcctacgggaagccagtcaaatacgacccctcctttcgaggccccatcaagaacagaagctgcacagatgtcatctgctgcgtcctcttcctgctcttcattctaggttacatcgtggtggggattgtggcctggttgtatggagacccccggcaagtcctctaccccaggaactctactggggcctactgtggcatgggggagaacaaagataagccgtatctcctgtacttcaacatcttcagctgcatcctgtccagcaacatcatctcagttgctgagaacggcctacagtgccccacaccccaggtgtgtgtgtcctcctgcccggaggacccatggactgtgggaaaaaacgagttctcacagactgttggggaagtcttctatacaaaaaacaggaacttttgtctgccaggggtaccctggaatatgacggtgatcacaagcctgcaacaggaactctgccccagtttcctcctcccctctgctccagctctggggcgctgctttccatggaccaacgttactccaccggcgctcccagggatcaccaatgacaccaccatacagcaggggatcagcggtcttattgacagcctcaatgcccgagacatcagtgttaagatctttgaagattttgcccagtcctggtattggattcttgttgccctgggggtggctctggtcttgagcctactgtttatcttgcttctgcgcctggtggctgggcccctggtgctggtgctgatcctgggagtgctgggcgtgctggcatacggcatctactactgctgggaggagtaccgagtgctgcgggacaagggcgcctccatctcccagctgggtttcaccaccaacctcagtgcctaccagagcgtgcaggagacctggctggccgccctgatcgtgttggcggtgcttgaagccatcctgctgctgatgctcatcttcctgcggcagcggattcgtattgccatcgccctcctgaaggaggccagcaaggctgtgggacagatgatgtctaccatgttctacccactggtcacctttgtcctcctcctcatctgcattgcctactgggccatgactgctctgtacctggctacatcggggcaaccccagtatgtgctctgggcatccaacatcagctcccccggctgtgagaaagtgccaataaatacatcatgcaaccccacggcccaccttgtgaactcctcgtgcccagggctgatgtgcgtcttccagggctactcatccaaaggcctaatccaacgttctgtcttcaatctgcaaatctatggggtcctggggctcttctggacccttaactgggtactggccctgggccaatgcgtcctcgctggagcctttgcctccttctactgggccttccacaagccccaggacatccctaccttccccttaatctctgccttcatccgcacactccgttaccacactgggtcattggcatttggagccctcatcctgacccttgtgcagatagcccgggtcatcttggagtatattgaccacaagctcagaggagtgcagaaccctgtagcccgctgcatcatgtgctgtttcaagtgctgcctctggtgtctggaaaaatttatcaagttcctaaaccgcaatgcatacatcatgatcgccatctacgggaagaatttctgtgtctcagccaaaaatgcgttcatgctactcatgcgaaacattgtcagggtggtcgtcctggacaaagtcacagacctgctgctgttctttgggaagctgctggtggtcggaggcgtgggggtcctgtccttcttttttttctccggtcgcatcccggggctgggtaaagactttaagagcccccacctcaactattactggctgcccatcatgacctccatcctgggggcctatgtcatcgccagcggcttcttcagcgttttcggcatgtgtgtggacacgctcttcctctgcttcctggaagacctggagcggaacaacggctccctggaccggccctactacatgtccaagagccttctaaagattctgggcaagaagaacgaggcgcccccggacaacaagaagaggaagaagtgacagctccggccctgatccaggactgcaccccacccccaccgtccagccatccaacctcacttcgccttacaggtctccattttgtggtaaaaaaaggttttaggccaggcgccgtggctcacgcctgtaatccaacactttgagaggctgaggcgggcggatcacctgagtcaggagttcgagaccagcctggccaacatggtgaaacctccgtctctattaaaaatacaaaaattagccgagagtggtggcatgcacctgtcatcccagctactcgggaggctgaggcaggagaatcgcttgaacccgggaggcagaggttgcagtgagccgagatcgcgccactgcactccaacctgggtgacagactctgtctccaaaacaaaacaaacaaacaaaaagattttattaaagatattttgttaactcagtaaa

SEQ ID NO: 29234 - DNA, 2505 bp, Homo sapiens
  source 1..2505: mol_type = unassigned DNA
agggcggggcgggcagcaggtgagacgccaggtctccagggctccaatcactccggagactgagccatggggggaaagcagcgggacgaggatgacgaggcctacgggaagccagtcaaatacgacccctcctttcgaggccccatcaagaacagaagctgcacagatgtcatctgctgcgtcctcttcctgctcttcattctaggttacatcgtggtggggattgtggcctggttgtatggagacccccggcaagtcctctaccccaggaactctactggggcctactgtggcatgggggagaacaaagataagccgtatctcctgtacttcaacatcttcagctgcatcctgtccagcaacatcatctcagttgctgagaacggcctacagtgccccacaccccagacggtgatcacaagcctgcaacaggaactctgccccagtttcctcctcccctctgctccagctctggggcgctgctttccatggaccaacgttactccaccggcgctcccagggatcaccaatgacaccaccatacagcaggggatcagcggtcttattgacagcctcaatgcccgagacatcagtgttaagatctttgaagattttgcccagtcctggtattggattcttgttgccctgggggtggctctggtcttgagcctactgtttatcttgcttctgcgcctggtggctgggcccctggtgctggtgctgatcctgggagtgctgggcgtgctggcatacggcatctactactgctgggaggagtaccgagtgctgcgggacaagggcgcctccatctcccagctgggtttcaccaccaacctcagtgcctaccagagcgtgcaggagacctggctggccgccctgatcgtgttggcggtgcttgaagccatcctgctgctgatgctcatcttcctgcggcagcggattcgtattgccatcgccctcctgaaggaggccagcaaggctgtgggacagatgatgtctaccatgttctacccactggtcacctttgtcctcctcctcatctgcattgcctactgggccatgactgctctgtacctggctacatcggggcaaccccagtatgtgctctgggcatccaacatcagctcccccggctgtgagaaagtgccaataaatacatcatgcaaccccacggcccaccttgtgaactcctcgtgcccagggctgatgtgcgtcttccagggctactcatccaaaggcctaatccaacgttctgtcttcaatctgcaaatctatggggtcctggggctcttctggacccttaactgggtactggccctgggccaatgcgtcctcgctggagcctttgcctccttctactgggccttccacaagccccaggacatccctaccttccccttaatctctgccttcatccgcacactccgttaccacactgggtcattggcatttggagccctcatcctgacccttgtgcagatagcccgggtcatcttggagtatattgaccacaagctcagaggagtgcagaaccctgtagcccgctgcatcatgtgctgtttcaagtgctgcctctggtgtctggaaaaatttatcaagttcctaaaccgcaatgcatacatcatgatcgccatctacgggaagaatttctgtgtctcagccaaaaatgcgttcatgctactcatgcgaaacattgtcagggtggtcgtcctggacaaagtcacagacctgctgctgttctttgggaagctgctggtggtcggaggcgtgggggtcctgtccttcttttttttctccggtcgcatcccggggctgggtaaagactttaagagcccccacctcaactattactggctgcccatcatgacctccatcctgggggcctatgtcatcgccagcggcttcttcagcgttttcggcatgtgtgtggacacgctcttcctctgcttcctggaagacctggagcggaacaacggctccctggaccggccctactacatgtccaagagccttctaaagattctgggcaagaagaacgaggcgcccccggacaacaagaagaggaagaagtgacagctccggccctgatccaggactgcaccccacccccaccgtccagccatccaacctcacttcgccttacaggtctccattttgtggtaaaaaaaggttttaggccaggcgccgtggctcacgcctgtaatccaacactttgagaggctgaggcgggcggatcacctgagtcaggagttcgagaccagcctggccaacatggtgaaacctccgtctctattaaaaatacaaaaattagccgagagtggtggcatgcacctgtcatcccagctactcgggaggctgaggcaggagaatcgcttgaacccgggaggcagaggttgcagtgagccgagatcgcgccactgcactccaacctgggtgacagactctgtctccaaaacaaaacaaacaaacaaaaagattttattaaagatattttgttaactcagt

SEQ ID NO: 29235 - DNA, 2589 bp, Homo sapiens; identical to SEQ ID NO: 29233
  source 1..2589: mol_type = unassigned DNA

SEQ ID NO: 29236 - DNA, 1233 bp, Homo sapiens
  source 1..1233: mol_type = unassigned DNA
agcgggacgaggatgacgaggcctacgggaagccagtcaaatacgacccctcctttcgaggccccatcaagaacagaagctgcacagatgtcatctgctgcgtcctcttcctgctcttcattctaggttacatcgtggtggggattgtggcctggttgtatggagacccccggcaagtcctctaccccaggaactctactggggcctactgtggcatgggggagaacaaagataagccgtatctcctgtacttcaacatcttcagctgcatcctgtccagcaacatcatctcagttgctgagaacggcctacagtgccccacaccccaggtgtgtgtgtcctcctgcccggaggacccatggactgtgggaaaaaacgagttctcacagactgttggggaagtcttctatacaaaaaacaggaacttttgtctgccaggggtaccctggaatatgacggtgatcacaagcctgcaacaggaactctgccccagtttcctcctcccctctgctccagctctggggcgctgctttccatggaccaacgttactccaccggcgctcccagggatcaccaatgacaccaccatacagcaggggatcagcggtcttattgacagcctcaatgcccgagacatcagtgttaagatctttgaagattttgcccagtcctggtattggattcttgtggctgtgggacagatgatgtctaccatgttctacccactggtcacctttgtcctcctcctcatctgcattgcctactgggccatgactgctctgtacctggctacatcggggcaaccccagtatgtgctctgggcatccaacatcagctcccccggctgtgagaaagtgccaataaatacatcatgcaaccccacggcccaccttgtgaactcctcgtgcccagggctgatgtgcgtcttccagggctactcatccaaaggcctaatccaacgttctgtcttcaatctgcaaatctatggggtcctggggctcttctggacccttaactgggtactggccctgggccaatgcgtcctcgctggagcctttgcctccttctactgggccttccacaagccccaggacatccctaccttccccttaatctctgccttcatccgcacactccgttaccacactgggtcattggcatttggagccctcatcctgacccttgtgcagatagcccgggtcatcttggagtatattgaccacaagctcagag

SEQ ID NO: 29237 - DNA, 1233 bp, Homo sapiens
  source 1..1233: mol_type = unassigned DNA
agcgggacgaggatgacgaggcctacgggaagccagtcaaatacgacccctcctttcgaggccccatcaagaacagaagctgcacagatgtcatctgctgcgtcctcttcctgctcttcattctaggttacatcgtggtggggattgtggcctggttgtatggagacccccggcaagtcctctaccccaggaactctactggggcctactgtggcatgggggagaacaaagataagccgtatctcctgtacttcaacatcttcagctgcatcctgtccagcaacatcatctcagttgctgagaacggcctacagtgccccacaccccaggtgtgtgtgtcctcctgcccggaggacccatggactgtgggaaaaaacgagttctcacagactgttggggaagtcttctatacaaaaaacaggaacttttgtctgccaggggtaccctggaatatgacggtgatcacaagcctgcaacaggaactctgccccagtttcctcctcccctctgctccagctctgggacgctgctttccatggaccaacattactccaccggcgctcccagggatcaccaatgacaccaccatacagcaggggatcagcggtcttattgacagcctcaatgcccgagacatcagtgttaagatctttgaagattttgcccagtcctggtattggattcttgtggctgtgggacagatgatgtctaccatgttctacccactggtcacctttgtcctcctcctcatctgcattgcctactgggccatgactgctctgtacctggctacatcggggcaaccccagtatgtgctctgggcatccaacatcagctcccccggctgtgagaaagtgccaataaatacatcatgcaaccccacggcccaccttgtgaactcctcgtgcccagggctgatgtgcgtcttccagggctactcatccaaaggcctaatccaacgttctgtcttcaatctgcaaatctatggggtcctggggctcttctggacccttaactgggtactggccctgggccaatgcgtcctcgctggagcctttgcctccttctactgggccttccacaagccccaggacatccctaccttccccttaatctctgccttcatccgcacactccgttaccacactgggtcattggcatttggagccctcatcctgacccttgtgcagatagcccgggtcatcttggagtatattgaccacaagctcagag

SEQ ID NO: 29238 - DNA, 2589 bp, Homo sapiens
  source 1..2589: mol_type = unassigned DNA
aatcactccggagactgagccatggggggaaagcagcgggacgaggatgacgaggcctacgggaagccagtcaaatacgacccctcctttcgaggccccatcaagaacagaagctgcacagatgtcatctgctgcgtcctcttcctgctcttcattctaggttacatcgtggtggggattgtggcctggttgtatggagacccccggcaagtcctctaccccaggaactctactggggcctactgtggcatgggggagaacaaagataagccgtatctcctgtacttcaacatcttcagctgcatcctgtccagcaacatcatctcagttgctgagaacggcctacagtgccccacaccccaggtgtgtgtgtcctcctgcccggaggacccatggactgtgggaaaaaacgagttctcacagactgttggggaagtcttctatacaaaaaacaggaacttttgtctgccaggggtaccctggaatatgacggtgatcacaagcctgcaacaggaactctgccccagtttcctcctcccctctgctccagctctgggacgctgctttccatggaccaacattactccaccggcgctcccagggatcaccaatgacaccaccatacagcaggggatcagcggtcttattgacagcctcaatgcccgagacatcagtgttaagatctttgaagattttgcccagtcctggtattggattcttgttgccctgggggtggctctggtcttgagcctactgtttatcttgcttctgcgcctggtggctgggcccctggtgctggtgctgatcctgggagtgctgggcgtgctggcatatggcatctactactgctgggaggagtaccgagtgctgcgggacaagggcgcctccatctcccagctgggtttcaccaccaacctcagtgcctaccagagcgtgcaggagacctggctggccgccctgatcgtgttggcggtgcttgaagccatcctgctgctggtgctcatcttcctgcggcagcggattcgtattgccatcgccctcctgaaggaggccagcaaggctgtgggacagatgatgtctaccatgttctacccactggtcacctttgtcctcctcctcatctgcattgcctactgggccatgactgctctgtacctggctacatcggggcaaccccagtatgtgctctgggcatccaacatcagctcccccggctgtgagaaagtgccaataaatacatcatgcaaccccacggcccaccttgtgaactcctcgtgcccagggctgatgtgcgtcttccagggctactcatccaaaggcctaatccaacgttctgtcttcaatctgcaaatctatggggtcctggggctcttctggacccttaactgggtactggccctgggccaatgcgtcctcgctggagcctttgcctccttctactgggccttccacaagccccaggacatccctaccttccccttaatctctgccttcatccgcacactccgttaccacactgggtcattggcatttggagccctcatcctgacccttgtgcagatagcccgggtcatcttggagtatattgaccacaagctcagaggagtgcagaaccctgtagcccgctgcatcatgtgctgtttcaagtgctgcctctggtgtctggaaaaatttatcaagttcctaaaccgcaatgcatacatcatgatcgccatctacgggaagaatttctgtgtctcagccaaaaatgcgttcatgctactcatgcgaaacattgtcagggtggtcgtcctggacaaagtcacagacctgctgctgttctttgggaagctgctggtggtcggaggcgtgggggtcctgtccttcttttttttctccggtcgcatcccggggctgggtaaagactttaagagcccccacctcaactattactggctgcccatcatgacctccatcctgggggcctatgtcatcgccagcggcttcttcagcgttttcggcatgtgtgtggacacgctcttcctctgcttcctggaagacctggagcggaacaacggctccctggaccggccctactacatgtccaagagccttctaaagattctgggcaagaagaacgaggcgcccccggacaacaagaagaggaagaagtgacagctccggccctgatccaggactgcaccccacccccaccgtccagccatccaacctcacttcgccttacaggtctccattttgtggtaaaaaaaggttttaggccaggcgccgtggctcacgcctgtaatccaacactttgagaggctgaggcgggcggatcacctgagtcaggagttcgagaccagcctggccaacatggtgaaacctccgtctctattaaaaatacaaaaattagccgagagtggtggcatgcacctgtcatcccagctactcgggaggctgaggcaggagaatcgcttgaacccgggaggcagaggttgcagtgagccgagatcgcgccactgcactccaacctgggtgacagactctgtctccaaaacaaaacaaacaaacaaaaagattttattaaagatattttgttaactcagtaaa

SEQ ID NO: 29239 - DNA, 2589 bp, Homo sapiens; identical to SEQ ID NO: 29238
  source 1..2589: mol_type = unassigned DNA

SEQ ID NO: 29240 - DNA, 2589 bp, Homo sapiens; identical to SEQ ID NO: 29233
  source 1..2589: mol_type = unassigned DNA

SEQ ID NO: 29241 - DNA, 1233 bp, Homo sapiens; identical to SEQ ID NO: 29236
  source 1..1233: mol_type = unassigned DNA

SEQ ID NO: 29242 - DNA, 1233 bp, Homo sapiens; identical to SEQ ID NO: 29236
  source 1..1233: mol_type = unassigned DNA

SEQ ID NO: 29243 - DNA, 1233 bp, Homo sapiens; identical to SEQ ID NO: 29237
  source 1..1233: mol_type = unassigned DNA

SEQ ID NO: 29244 - DNA, 2589 bp, Homo sapiens; identical to SEQ ID NO: 29238
  source 1..2589: mol_type = unassigned DNA

SEQ ID NO: 29245 - DNA, 1233 bp, Homo sapiens; identical to SEQ ID NO: 29237
  source 1..1233: mol_type = unassigned DNA

SEQ ID NO: 29246 - DNA, 2589 bp, Homo sapiens; identical to SEQ ID NO: 29233
  source 1..2589: mol_type = unassigned DNA

SEQ ID NO: 29247 - DNA, 1233 bp, Homo sapiens; identical to SEQ ID NO: 29236
  source 1..1233: mol_type = unassigned DNA

SEQ ID NO: 29248 - DNA, 2634 bp, Homo sapiens
  source 1..2634: mol_type = unassigned DNA
actgaggtcccaccagagtgaggatgtacagggccgcttccctccccaggccctgctggggttgacacctttgtctccagtttctttccccatagccttgaaccagaggggaagccagtcaaatacgacccctcctttcgaggccccatcaagaacagaagctgcacagatgtcatctgctgcgtcctcttcctgctcttcattctaggttacatcgtggtggggattgtggcctggttgtatggagacccccggcaagtcctctaccccaggaactctactggggcctactgtggcatgggggagaacaaagataagccgtatctcctgtacttcaacatcttcagctgcatcctgtccagcaacatcatctcagttgctgagaacggcctacagtgccccacaccccaggtgtgtgtgtcctcctgcccggaggacccatggactgtgggaaaaaacgagttctcacagactgttggggaagtcttctatacaaaaaacaggaacttttgtctgccaggggtaccctggaatatgacggtgatcacaagcctgcaacaggaactctgccccagtttcctcctcccctctgctccagctctggggcgctgctttccatggaccaacgttactccaccggcgctcccagggatcaccaatgacaccaccatacagcaggggatcagcggtcttattgacagcctcaatgcccgagacatcagtgttaagatctttgaagattttgcccagtcctggtattggattcttgttgccctgggggtggctctggtcttgagcctactgtttatcttgcttctgcgcctggtggctgggcccctggtgctggtgctgatcctgggagtgctgggcgtgctggcatacggcatctactactgctgggaggagtaccgagtgctgcgggacaagggcgcctccatctcccagctgggtttcaccaccaacctcagtgcctaccagagcgtgcaggagacctggctggccgccctgatcgtgttggcggtgcttgaagccatcctgctgctgatgctcatcttcctgcggcagcggattcgtattgccatcgccctcctgaaggaggccagcaaggctgtgggacagatgatgtctaccatgttctacccactggtcacctttgtcctcctcctcatctgcattgcctactgggccatgactgctctgtacctggctacatcggggcaaccccagtatgtgctctgggcatccaacatcagctcccccggctgtgagaaagtgccaataaatacatcatgcaaccccacggcccaccttgtgaactcctcgtgcccagggctgatgtgcgtcttccagggctactcatccaaaggcctaatccaacgttctgtcttcaatctgcaaatctatggggtcctggggctcttctggacccttaactgggtactggccctgggccaatgcgtcctcgctggagcctttgcctccttctactgggccttccacaagccccaggacatccctaccttccccttaatctctgccttcatccgcacactccgttaccacactgggtcattggcatttggagccctcatcctgacccttgtgcagatagcccgggtcatcttggagtatattgaccacaagctcagaggagtgcagaaccctgtagcccgctgcatcatgtgctgtttcaagtgctgcctctggtgtctggaaaaatttatcaagttcctaaaccgcaatgcatacatcatgatcgccatctacgggaagaatttctgtgtctcagccaaaaatgcgttcatgctactcatgcgaaacattgtcagggtggtcgtcctggacaaagtcacagacctgctgctgttctttgggaagctgctggtggtcggaggcgtgggggtcctgtccttcttttttttctccggtcgcatcccggggctgggtaaagactttaagagcccccacctcaactattactggctgcccatcatgacctccatcctgggggcctatgtcatcgccagcggcttcttcagcgttttcggcatgtgtgtggacacgctcttcctctgcttcctggaagacctggagcggaacaacggctccctggaccggccctactacatgtccaagagccttctaaagattctgggcaagaagaacgaggcgcccccggacaacaagaagaggaagaagtgacagctccggccctgatccaggactgcaccccacccccaccgtccagccatccaacctcacttcgccttacaggtctccattttgtggtaaaaaaaggttttaggccaggcgccgtggctcacgcctgtaatccaacactttgagaggctgaggcgggcggatcacctgagtcaggagttcgagaccagcctggccaacatggtgaaacctccgtctctattaaaaatacaaaaattagccgagagtggtggcatgcacctgtcatcccagctactcgggaggctgaggcaggagaatcgcttgaacccgggaggcagaggttgcagtgagccgagatcgcgccactgcactccaacctgggtgacagactctgtctccaaaacaaaacaaacaaacaaaaagattttattaaagatattttgttaactcagt

SEQ ID NO: 29249 - DNA, 2634 bp, Homo sapiens; identical to SEQ ID NO: 29248
  source 1..2634: mol_type = unassigned DNA

SEQ ID NO: 29250 - DNA, 2634 bp, Homo sapiens
  source 1..2634: mol_type = unassigned DNA
actgaggtcccaccagagtgaggatgtacagggccgcttccctccccaggccctgctggggttgacacctttgtctccagtttctttccccatagccttgaaccagaggggaagccagtcaaatacgacccctcctttcgaggccccatcaagaacagaagctgcacagatgtcatctgctgcgtcctcttcctgctcttcattctaggttacatcgtggtggggattgtggcctggttgtatggagacccccggcaagtcctctaccccaggaactctactggggcctactgtggcatgggggagaacaaagataagccgtatctcctgtacttcaacatcttcagctgcatcctgtccagcaacatcatctcagttgctgagaacggcctacagtgccccacaccccaggtgtgtgtgtcctcctgcccggaggacccatggactgtgggaaaaaacgagttctcacagactgttggggaagtcttctatacaaaaaacaggaacttttgtctgccaggggtaccctggaatatgacggtgatcacaagcctgcaacaggaactctgccccagtttcctcctcccctctgctccagctctgggacgctgctttccatggaccaacattactccaccggcgctcccagggatcaccaatgacaccaccatacagcaggggatcagcggtcttattgacagcctcaatgcccgagacatcagtgttaagatctttgaagattttgcccagtcctggtattggattcttgttgccctgggggtggctctggtcttgagcctactgtttatcttgcttctgcgcctggtggctgggcccctggtgctggtgctgatcctgggagtgctgggcgtgctggcatatggcatctactactgctgggaggagtaccgagtgctgcgggacaagggcgcctccatctcccagctgggtttcaccaccaacctcagtgcctaccagagcgtgcaggagacctggctggccgccctgatcgtgttggcggtgcttgaagccatcctgctgctggtgctcatcttcctgcggcagcggattcgtattgccatcgccctcctgaaggaggccagcaaggctgtgggacagatgatgtctaccatgttctacccactggtcacctttgtcctcctcctcatctgcattgcctactgggccatgactgctctgtacctggctacatcggggcaaccccagtatgtgctctgggcatccaacatcagctcccccggctgtgagaaagtgccaataaatacatcatgcaaccccacggcccaccttgtgaactcctcgtgcccagggctgatgtgcgtcttccagggctactcatccaaaggcctaatccaacgttctgtcttcaatctgcaaatctatggggtcctggggctcttctggacccttaactgggtactggccctgggccaatgcgtcctcgctggagcctttgcctccttctactgggccttccacaagccccaggacatccctaccttccccttaatctctgccttcatccgcacactccgttaccacactgggtcattggcatttggagccctcatcctgacccttgtgcagatagcccgggtcatcttggagtatattgaccacaagctcagaggagtgcagaaccctgtagcccgctgcatcatgtgctgtttcaagtgctgcctctggtgtctggaaaaatttatcaagttcctaaaccgcaatgcatacatcatgatcgccatctacgggaagaatttctgtgtctcagccaaaaatgcgttcatgctactcatgcgaaacattgtcagggtggtcgtcctggacaaagtcacagacctgctgctgttctttgggaagctgctggtggtcggaggcgtgggggtcctgtccttcttttttttctccggtcgcatcccggggctgggtaaagactttaagagcccccacctcaactattactggctgcccatcatgacctccatcctgggggcctatgtcatcgccagcggcttcttcagcgttttcggcatgtgtgtggacacgctcttcctctgcttcctggaagacctggagcggaacaacggctccctggaccggccctactacatgtccaagagccttctaaagattctgggcaagaagaacgaggcgcccccggacaacaagaagaggaagaagtgacagctccggccctgatccaggactgcaccccacccccaccgtccagccatccaacctcacttcgccttacaggtctccattttgtggtaaaaaaaggttttaggccaggcgccgtggctcacgcctgtaatccaacactttgagaggctgaggcgggcggatcacctgagtcaggagttcgagaccagcctggccaacatggtgaaacctccgtctctattaaaaatacaaaaattagccgagagtggtggcatgcacctgtcatcccagctactcgggaggctgaggcaggagaatcgcttgaacccgggaggcagaggttgcagtgagccgagatcgcgccactgcactccaacctgggtgacagactctgtctccaaaacaaaacaaacaaacaaaaagattttattaaagatattttgttaactcagt

SEQ ID NO: 29251 - DNA, 2505 bp, Homo sapiens
  source 1..2505: mol_type = unassigned DNA
agggcggggcgggcagcaggtgagacgccaggtctccagggctccaatcactccggagactgagccatggggggaaagcagcgggacgaggatgacgaggcctacgggaagccagtcaaatacgacccctcctttcgaggccccatcaagaacagaagctgcacagatgtcatctgctgcgtcctcttcctgctcttcattctaggttacatcgtggtggggattgtggcctggttgtatggagacccccggcaagtcctctaccccaggaactctactggggcctactgtggcatgggggagaacaaagataagccgtatctcctgtacttcaacatcttcagctgcatcctgtccagcaacatcatctcagttgctgagaacggcctacagtgccccacaccccagacggtgatcacaagcctgcaacaggaactctgccccagtttcctcctcccctctgctccagctctgggacgctgctttccatggaccaacattactccaccggcgctcccagggatcaccaatgacaccaccatacagcaggggatcagcggtcttattgacagcctcaatgcccgagacatcagtgttaagatctttgaagattttgcccagtcctggtattggattcttgttgccctgggggtggctctggtcttgagcctactgtttatcttgcttctgcgcctggtggctgggcccctggtgctggtgctgatcctgggagtgctgggcgtgctggcatatggcatctactactgctgggaggagtaccgagtgctgcgggacaagggcgcctccatctcccagctgggtttcaccaccaacctcagtgcctaccagagcgtgcaggagacctggctggccgccctgatcgtgttggcggtgcttgaagccatcctgctgctggtgctcatcttcctgcggcagcggattcgtattgccatcgccctcctgaaggaggccagcaaggctgtgggacagatgatgtctaccatgttctacccactggtcacctttgtcctcctcctcatctgcattgcctactgggccatgactgctctgtacctggctacatcggggcaaccccagtatgtgctctgggcatccaacatcagctcccccggctgtgagaaagtgccaataaatacatcatgcaaccccacggcccaccttgtgaactcctcgtgcccagggctgatgtgcgtcttccagggctactcatccaaaggcctaatccaacgttctgtcttcaatctgcaaatctatggggtcctggggctcttctggacccttaactgggtactggccctgggccaatgcgtcctcgctggagcctttgcctccttctactgggccttccacaagccccaggacatccctaccttccccttaatctctgccttcatccgcacactccgttaccacactgggtcattggcatttggagccctcatcctgacccttgtgcagatagcccgggtcatcttggagtatattgaccacaagctcagaggagtgcagaaccctgtagcccgctgcatcatgtgctgtttcaagtgctgcctctggtgtctggaaaaatttatcaagttcctaaaccgcaatgcatacatcatgatcgccatctacgggaagaatttctgtgtctcagccaaaaatgcgttcatgctactcatgcgaaacattgtcagggtggtcgtcctggacaaagtcacagacctgctgctgttctttgggaagctgctggtggtcggaggcgtgggggtcctgtccttcttttttttctccggtcgcatcccggggctgggtaaagactttaagagcccccacctcaactattactggctgcccatcatgacctccatcctgggggcctatgtcatcgccagcggcttcttcagcgttttcggcatgtgtgtggacacgctcttcctctgcttcctggaagacctggagcggaacaacggctccctggaccggccctactacatgtccaagagccttctaaagattctgggcaagaagaacgaggcgcccccggacaacaagaagaggaagaagtgacagctccggccctgatccaggactgcaccccacccccaccgtccagccatccaacctcacttcgccttacaggtctccattttgtggtaaaaaaaggttttaggccaggcgccgtggctcacgcctgtaatccaacactttgagaggctgaggcgggcggatcacctgagtcaggagttcgagaccagcctggccaacatggtgaaacctccgtctctattaaaaatacaaaaattagccgagagtggtggcatgcacctgtcatcccagctactcgggaggctgaggcaggagaatcgcttgaacccgggaggcagaggttgcagtgagccgagatcgcgccactgcactccaacctgggtgacagactctgtctccaaaacaaaacaaacaaacaaaaagattttattaaagatattttgttaactcagt

SEQ ID NO: 29252 - DNA, 2634 bp, Homo sapiens; identical to SEQ ID NO: 29248
  source 1..2634: mol_type = unassigned DNA

SEQ ID NO: 29253 - DNA, 2634 bp, Homo sapiens; identical to SEQ ID NO: 29248
  source 1..2634: mol_type = unassigned DNA

SEQ ID NO: 29254 - DNA, 2505 bp, Homo sapiens; identical to SEQ ID NO: 29234
  source 1..2505: mol_type = unassigned DNA

SEQ ID NO: 29255 - DNA, 2505 bp, Homo sapiens; identical to SEQ ID NO: 29234
  source 1..2505: mol_type = unassigned DNA

SEQ ID NO: 29256 - DNA, 2505 bp, Homo sapiens; identical to SEQ ID NO: 29251
  source 1..2505: mol_type = unassigned DNA

SEQ ID NO: 29257 - DNA, 2634 bp, Homo sapiens; identical to SEQ ID NO: 29250
  source 1..2634: mol_type = unassigned DNA

SEQ ID NO: 29258 - DNA, 2505 bp, Homo sapiens; identical to SEQ ID NO: 29234
  source 1..2505: mol_type = unassigned DNA

SEQ ID NO: 29259 - DNA, 2505 bp, Homo sapiens; identical to SEQ ID NO: 29251
  source 1..2505: mol_type = unassigned DNA

SEQ ID NO: 29260 - DNA, 2634 bp, Homo sapiens; identical to SEQ ID NO: 29250
  source 1..2634: mol_type = unassigned DNA

SEQ ID NO: 29261 - DNA, 2401 bp, Homo sapiens
  source 1..2401: mol_type = unassigned DNA
atgatccccgcagccagcagcaccccgccgggagatgccctcttccccagcgtggccccacaggacttctggaggtcccaggtcacgggctactcggggtccgtgacacgacacctcagtcaccgggccaacaacttcaaacgacaccccaagaggaggaagtgcattcgtccctccccacccccgccccccaacaccccgtgcccgcttgagctggtggacttcggggacctgcacccccagaggtccttccgggagctgcttttcaacggctgcattctctttggcatcgagttcagctacgccatggagacggcgtacgtgaccccggtgctcctgcagatgggcctgcccgaccagctctacagcctggtgtggttcatcagccccatcctcggattcctactgcagcctctgttgggtgcttggagtgaccggtgtacctcaaggtttggaaggagacgccctttcattcttgtcctggctataggggcactgctgggcctctcgctcttgctgaatggccgggacattggcatcgccctggctgacgtgaccgggaaccacaagtggggcctgctgctgaccgtgtgcggtgtggtgctgatggactttagcgccgactcggcggacaaccccagccacgcctacatgatggacgtgtgcagccccgcagaccaggaccgaggcctgaacatccacgccctcctggcaggtctcggaggaggctttggatacgtggtcggcggaatccactgggataaaacgggcttcgggagggccctggggggacagctccgagtcatttacctcttcactgcggtcaccctgagcgtcaccaccgtcctgaccctggtcagcatccctgagaggccgctgcggccgccgagtgagaagcgggcagccatgaagagccccagcctcccgctgcccccgtccccacccgtcctgccagaggaaggccctggcgacagcctcccgtcgcacacggccaccaacttctccagccccatctcgccgcccagccccctcacgcccaagtacggcagcttcatcagcagggacagctccctgacgggcatcagcgagttcgcctcatcctttggcacggccaacatagacagcgtcctcattgactgcttcacgggcggccacgacagctacctggccatccctggcagcgtccccaggccgcccatcagcgtcagcttcccccgggcccccgacggcttctaccgccaggaccgtggacttctggagggcagagagggtgccctgacctccggctgtgacggggacattctgagggtgggctccttggacacctctaagccgaggtcatcagggattctgaagagacctcagaccttggccatcccggacgcagccggaggagggggtcccgaaaccagcaggagaaggaatgtgaccttcagtcagcaggtggccaatatcctgctcaacggcgtgaagtatgagagcgagctgacgggctccagcgagcgcgcggagcagcctctgtccgtggggcgcctctgctccaccatctgcaacatgcccaaggcgctacgcaccctctgcgtcaaccacttcctggggtggctctcattcgaggggatgttgctcttctacacagacttcatgggcgaggtggtgtttcagggggaccccaaggccccgcacacatcagaggcgtatcagaagtacaacagcggcgtgaccatgggctgctggggcatgtgtatctacgccttcagtgctgccttctactcagctatcctggagaagctggaggagttcctcagcgtccgcaccctctacttcatcgcctatctcgccttcggcctggggaccgggcttgccaccctctccaggaacctctacgtggtcctgtcgctctgcataacctacgggattttattttccaccctgtgcaccttgccttactcgctgctctgcgattactatcagagtaagaagtttgcagggtccagtgcggacggcacccggcggggcatgggcgtggacatctctctgctgagctgccagtacttcctggctcagattctggtctccctggtcctggggcccctgacctcggccgtgggcagtgccaacggggtgatgtacttctccagcctcgtgtccttcctgggctgcctgtactcctccctgtttgtcatttatgaaattcctcccagcgacgctgcagacgaggagcaccggcccctcctgctgaacgtctgacatcgcggagcctcgactccggacacgcgcctgcacctgggggtctggagcaggccgaccagtgaggaccaaagggccttgttggacagggggactggctgcctactggaatgtaaatatgtgataaaataataaatgacagcggcaaagccta

SEQ ID NO: 29262 - DNA, 2503 bp, Homo sapiens
  source 1..2503: mol_type = unassigned DNA
atgctgcagcagccgggaccgcggccgggcaggcagcagcccagcggggacagggatgcctgccgtctccacccacagggacgcccaccagccctccccacgatgatccccgcagccagcagcaccccgccgggagatgccctcttccccagcgtggccccacaggacttctggaggtcccaggtcacgggctactcggggtccgtgacacgacacctcagtcaccgggccaacaacttcaaacgacaccccaagaggaggaagtgcattcgtccctccccacccccgccccccaacaccccgtgcccgcttgagctggtggacttcggggacctgcacccccagaggtccttccgggagctgcttttcaacggctgcattctctttggcatcgagttcagctacgccatggagacggcgtacgtgaccccggtgctcctgcagatgggcctgcccgaccagctctacagcctggtgtggttcatcagccccatcctcggattcctactgcagcctctgttgggtgcttggagtgaccggtgtacctcaaggtttggaaggagacgccctttcattcttgtcctggctataggggcactgctgggcctctcgctcttgctgaatggccgggacattggcatcgccctggctgacgtgaccgggaaccacaagtggggcctgctgctgaccgtgtgcggtgtggtgctgatggactttagcgccgactcggcggacaaccccagccacgcctacatgatggacgtgtgcagccccgcagaccaggaccgaggcctgaacatccacgccctcctggcaggtctcggaggaggctttggatacgtggtcggcggaatccactgggataaaacgggcttcgggagggccctggggggacagctccgagtcatttacctcttcactgcggtcaccctgagcgtcaccaccgtcctgaccctggtcagcatccctgagaggccgctgcggccgccgagtgagaagcgggcagccatgaagagccccagcctcccgctgcccccgtccccacccgtcctgccagaggaaggccctggcgacagcctcccgtcgcacacggccaccaacttctccagccccatctcgccgcccagccccctcacgcccaagtacggcagcttcatcagcagggacagctccctgacgggcatcagcgagttcgcctcatcctttggcacggccaacatagacagcgtcctcattgactgcttcacgggcggccacgacagctacctggccatccctggcagcgtccccaggccgcccatcagcgtcagcttcccccgggcccccgacggcttctaccgccaggaccgtggacttctggagggcagagagggtgccctgacctccggctgtgacggggacattctgagggtgggctccttggacacctctaagccgaggtcatcagggattctgaagagacctcagaccttggccatcccggacgcagccggaggagggggtcccgaaaccagcaggagaaggaatgtgaccttcagtcagcaggtggccaatatcctgctcaacggcgtgaagtatgagagcgagctgacgggctccagcgagcgcgcggagcagcctctgtccgtggggcgcctctgctccaccatctgcaacatgcccaaggcgctacgcaccctctgcgtcaaccacttcctggggtggctctcattcgaggggatgttgctcttctacacagacttcatgggcgaggtggtgtttcagggggaccccaaggccccgcacacatcagaggcgtatcagaagtacaacagcggcgtgaccatgggctgctggggcatgtgtatctacgccttcagtgctgccttctactcagctatcctggagaagctggaggagttcctcagcgtccgcaccctctacttcatcgcctatctcgccttcggcctggggaccgggcttgccaccctctccaggaacctctacgtggtcctgtcgctctgcataacctacgggattttattttccaccctgtgcaccttgccttactcgctgctctgcgattactatcagagtaagaagtttgcagggtccagtgcggacggcacccggcggggcatgggcgtggacatctctctgctgagctgccagtacttcctggctcagattctggtctccctggtcctggggcccctgacctcggccgtgggcagtgccaacggggtgatgtacttctccagcctcgtgtccttcctgggctgcctgtactcctccctgtttgtcatttatgaaattcctcccagcgacgctgcagacgaggagcaccggcccctcctgctgaacgtctgacatcgcggagcctcgactccggacacgcgcctgcacctgggggtctggagcaggccgaccagtgaggaccaaagggccttgttggacagggggactggctgcctactggaatgtaaatatgtgataaaataataaatgacagcggcaaagccta

SEQ ID NO: 29263 - DNA, 2784 bp, Homo sapiens
  source 1..2784: mol_type = unassigned DNA
tttatacatgaagacacgaaaatgtatttatttcttttaaaatcagaagaaaacggtgagaactgtgaggccggggggacgttttcctccgggatcctggcagatcctgcagaccgcgccgtcgtgcgcgaagcaccgggacgggcctcccgcgggaagggcccaggaggacaccgggctcccctcccgcccgcggggccccagacgcggcgccgctttaaggctccgggccccgcgcggatgcggaggctgcggccgtgacgtcagcgccccgccccgggtgatgctgcagcagccgggaccgcggccgggcaggcagcagcccagcggggacagggatgcctgccgtctccacccacagggacgcccaccagccctccccacgatgatccccgcagccagcagcaccccgccgggagatgccctcttccccagcgtggccccacaggacttctggaggtcccaggtcacgggctactcggggtccgtgacacgacacctcagtcaccgggccaacaacttcaaacgacaccccaagaggaggaagtgcattcgtccctccccacccccgccccccaacaccccgtgcccgcttgagctggtggacttcggggacctgcacccccagaggtccttccgggagctgcttttcaacggctgcattctctttggcatcgagttcagctacgccatggagacggcgtacgtgaccccggtgctcctgcagatgggcctgcccgaccagctctacagcctggtgtggttcatcagccccatcctcggattcctactgcagcctctgttgggtgcttggagtgaccggtgtacctcaaggtttggaaggagacgccctttcattcttgtcctggctataggggcactgctgggcctctcgctcttgctgaatggccgggacattggcatcgccctggctgacgtgaccgggaaccacaagtggggcctgctgctgaccgtgtgcggtgtggtgctgatggactttagcgccgactcggcggacaaccccagccacgcctacatgatggacgtgtgcagccccgcagaccaggaccgaggcctgaacatccacgccctcctggcaggtctcggaggaggctttggatacgtggtcggcggaatccactgggataaaacgggcttcgggagggccctggggggacagctccgagtcatttacctcttcactgcggtcaccctgagcgtcaccaccgtcctgaccctggtcagcatccctgagaggccgctgcggccgccgagtgagaagcgggcagccatgaagagccccagcctcccgctgcccccgtccccacccgtcctgccagaggaaggccctggcgacagcctcccgtcgcacacggccaccaacttctccagccccatctcgccgcccagccccctcacgcccaagtacggcagcttcatcagcagggacagctccctgacgggcatcagcgagttcgcctcatcctttggcacggccaacatagacagcgtcctcattgactgcttcacgggcggccacgacagctacctggccatccctggcagcgtccccaggccgcccatcagcgtcagcttcccccgggcccccgacggcttctaccgccaggaccgtggacttctggagggcagagagggtgccctgacctccggctgtgacggggacattctgagggtgggctccttggacacctctaagccgaggtcatcagggattctgaagagacctcagaccttggccatcccggacgcagccggaggagggggtcccgaaaccagcaggagaaggaatgtgaccttcagtcagcaggtggccaatatcctgctcaacggcgtgaagtatgagagcgagctgacgggctccagcgagcgcgcggagcagcctctgtccgtggggcgcctctgctccaccatctgcaacatgcccaaggcgctacgcaccctctgcgtcaaccacttcctggggtggctctcattcgaggggatgttgctcttctacacagacttcatgggcgaggtggtgtttcagggggaccccaaggccccgcacacatcagaggcgtatcagaagtacaacagcggcgtgaccatgggctgctggggcatgtgtatctacgccttcagtgctgccttctactcagctatcctggagaagctggaggagttcctcagcgtccgcaccctctacttcatcgcctatctcgccttcggcctggggaccgggcttgccaccctctccaggaacctctacgtggtcctgtcgctctgcataacctacgggattttattttccaccctgtgcaccttgccttactcgctgctctgcgattactatcagagtaagaagtttgcagggtccagtgcggacggcacccggcggggcatgggcgtggacatctctctgctgagctgccagtacttcctggctcagattctggtctccctggtcctggggcccctgacctcggccgtgggcagtgccaacggggtgatgtacttctccagcctcgtgtccttcctgggctgcctgtactcctccctgtttgtcatttatgaaattcctcccagcgacgctgcagacgaggagcaccggcccctcctgctgaacgtctgacatcgcggagcctcgactccggacacgcgcctgcacctgggggtctggagcaggccgaccagtgaggaccaaagggccttgttggacagggggactggctgcctactggaatgtaaatatgtgataaaataataaatgacagcggcaaagcc

SEQ ID NO: 29264 - DNA, 1772 bp, Homo sapiens
  source 1..1772: mol_type = unassigned DNA
ggcaggaaagaatttgagcccctcccccagcctgaccatctctgttggttgctcggccaggctccacgtcaaatccagtttgaaacacagaccctaggaccacgcaggaggtggtgggctcgcaggaaggttcctctcccagtggccatgggtagcaacagtgggcaggctggccgccacatctataaatccctagctgatgatggcccctttgactctgtggagccgcctaaaagacccaccagcagactcatcatgcacagcatggccatgttcggaagagagttctgctacgcggtggaggcagcgtatgtgaccccagtcctgctcagcgtaggtctgcccagcagcctgtacagcattgtgtggttcctcagccccatcctgggattcctgctgcagcccgtggtcggatcggccagcgaccactgccggtccaggtggggccgccggagaccctacatcctcaccctgggagtcatgatgctcgtgggcatggctctgtacctcaatggggctactgttgtagcagctttgattgctaacccaaggaggaagctggtttgggccataagtgtcaccatgataggtgtcgttctctttgattttgctgccgacttcattgatgggcccatcaaagcctacttatttgatgtctgctcccatcaggacaaggagaagggcctccactaccatgccctcttcacaggttttggaggtgccctgggttaccttttgggtgctatagactgggcccatctggagctgggaagactgttgggtacagaattccaggtcatgttcttcttctctgcattggtgctcactttgtgttttactgttcatctgtgcagtatctctgaagccccacttacagaggttgcaaagggcattcccccacagcaaacccctcaggaccctccattgtcatcagatggaatgtacgagtatggttctatcgagaaagttaaaaatggttacgtaaatccagagctggcaatgcagggagcaaaaaacaaaaatcatgctgaacagactcgcagggcaatgacattaaagtcactgctgagagcactggtgaacatgcctcctcactaccgctacctttgcatcagccacctcattggatggacagccttcctgtccaacatgctgttcttcacagatttcatgggccagattgtgtaccgcggggatccctatagtgcacacaactccacagagtttctcatctacgaaagaggagtcgaggttggatgttggggcttgtgcatcaactccgtgttttcctcactttattcttactttcagaaagttttggtatcctacattggattaaagggtctttacttcacgggatatttgctgtttggcctggggacgggatttattgggctcttcccgaatgtctactccaccctggtcctgtgcagcctgtttggtgtaatgtccagcaccctgtacactgtgccctttaacctcattactgagtaccaccgcgaggaagaaaaggagaggcagcaggccccaggaggggacccagacaacagcgtgagagggaagggcatggactgcgccaccctcacatgcatggtgcagctggctcagatcctggtcggaggtggcctgggctttctggtcaacacagccgggaccgttgtcgtcgtggtgatcacagcgtctgcggtggcactgataggctgttgctttgtcgctctctttgttagatatgtggattaggtcaataaagagacaatgaccctaacctcaga

SEQ ID NO: 29265 - DNA, 1537 bp, Homo sapiens
  source 1..1537: mol_type = unassigned DNA
gccaggctccacgtcaaatccagtttgaaacacagaccctaggaccacgcaggaggtggtgggctcgcaggaaggttcctctcccagtggccatgggtagcaacagtgggcaggctggccgccacatctataaatccctagctgatgatggcccctttgactctgtggagccgcctaaaagacccaccagcagactcatcatgcacagcatggccatgttcggaagagagttctgctacgcggtggaggcagcgtatgtgaccccagtcctgctcagcgtaggtctgcccagcagcctgtacagcattgtgtggttcctcagccccatcctgggattcctgctgcagcccgtggtcggatcggccagcgaccactgccggtccaggtggggccgccggagaccctacatcctcaccctgggagtcatgatgctcgtgggcatggctctgtacctcaatggggctactgttgtagcaggttttggaggtgccctgggttaccttttgggtgctatagactgggcccatctggagctgggaagactgttgggtacagaattccaggtcatgttcttcttctctgcattggtgctcactttgtgttttactgttcatctgtgcagtatctctgaagccccacttacagaggttgcaaagggcattcccccacagcaaacccctcaggaccctccattgtcatcagatggaatgtacgagtatggttctatcgagaaagttaaaaatggttacgtaaatccagagctggcaatgcagggagcaaaaaacaaaaatcatgctgaacagactcgcagggcaatgacattaaagtcactgctgagagcactggtgaacatgcctcctcactaccgctacctttgcatcagccacctcattggatggacagccttcctgtccaacatgctgttcttcacagatttcatgggccagattgtgtaccgcggggatccctatagtgcacacaactccacagagtttctcatctacgaaagaggagtcgaggttggatgttggggcttgtgcatcaactccgtgttttcctcactttattcttactttcagaaagttttggtatcctacattggattaaagggtctttacttcacgggatatttgctgtttggcctggggacgggatttattgggctcttcccgaatgtctactccaccctggtcctgtgcagcctgtttggtgtaatgtccagcaccctgtacactgtgccctttaacctcattactgagtaccaccgcgaggaagaaaaggagaggcagcaggccccaggaggggacccagacaacagcgtgagagggaagggcatggactgcgccaccctcacatgcatggtgcagctggctcagatcctggtcggaggtggcctgggctttctggtcaacacagccgggaccgttgtcgtcgtggtgatcacagcgtctgcggtggcactgataggctgttgctttgtcgctctctttgttagatatgtggattaggtcaataaagagacaatgaccctaacctc

SEQ ID NO: 29266 - DNA, 989 bp, Homo sapiens
  source 1..989: mol_type = unassigned DNA
gccaggctccacgtcaaatccagtttgaaacacagaccctaggaccacgcaggaggtggtgggctcgcaggaaggttcctctcccagtggccatgggtagcaacagtgggcaggctggccgccacatctataaatccctagctgatgatggcccctttgactctgtggagccgcctaaaagacccaccagcagactcatcatgcacagcatggccatgttcggaagagagttctgctacgcggtggaggcagcgtatgtgaccccagtcctgctcagcgtaggtctgcccagcagcctgtacagcattgtgtggttcctcagccccatcctgggattcctgctgcagcccgtggtcggatcggccagcgaccactgccggtccaggtggggccgccggagaccctacatcctcaccctgggagtcatgatgctcgtgggcatggctctgtacctcaatggggctactgttgtagcagctttgattgctaacccaaggaggaagctggtttgggccataagtgtcaccatgataggtgtcgttctctttgattttgctgccgacttcattgatgggcccatcaaagcctacttatttgatgtctgctcccatcaggacaaggagaagggcctccactaccatgccctcttcacaggtactcgcagggcaatgacattaaagtcactgctgagagcactggtgaacatgcctcctcactaccgctacctttgcatcagccacctcattggatggacagccttcctgtccaacatgctgttcttcacagatttcatgggccagattgtgtaccgcggggatccctatagtgcacacaactccacagagtttctcatctacgaaagaggagtcgaggttggatgttggggcttgtgcatcaactccgtgttttcctcactttattcttgtaagtctttctctctcctaaggatgtcttctaaaagtttctggtctagcacaacttggatttga

SEQ ID NO: 29267 - DNA, 2723 bp, Homo sapiens
  source 1..2723: mol_type = unassigned DNA
gaccctaggaccacgcaggaggtggtgggctcgcaggaaggttcctctcccagtggccatgggtagcaacagtgggcaggctggccgccacatctataaatccctagctgatgatggcccctttgactctgtggagccgcctaaaagacccaccagcagactcatcatgcacagcatggccatgttcggaagagagttctgctacgcggtggaggcagcgtatgtgaccccagtcctgctcagcgtaggtctgcccagcagcctgtacagcattgtgtggttcctcagccccatcctgggattcctgctgcagcccgtggtcggatcggccagcgaccactgccggtccaggtggggccgccggagaccctacatcctcaccctgggagtcatgatgctcgtgggcatggctctgtacctcaatggggctactgttgtagcagctttgattgctaacccaaggaggaagctggtttgggccataagtgtcaccatgataggtgtcgttctctttgattttgctgccgacttcattgatgggcccatcaaagcctacttatttgatgtctgctcccatcaggacaaggagaagggcctccactaccatgccctcttcacaggttttggaggtgccctgggttaccttttgggtgctatagactgggcccatctggagctgggaagactgttgggtacagaattccaggtcatgttcttcttctctgcattggtgctcactttgtgttttactgttcatctgtgcagtatctctgaagccccacttacagaggttgcaaagggcattcccccacagcaaacccctcaggaccctccattgtcatcagatggaatgtacgagtatggttctatcgagaaagttaaaaatggttacgtaaatccagagctggcaatgcagggagcaaaaaacaaaaatcatgctgaacagactcgcagggcaatgacattaaagtcactgctgagagcactggtgaacatgcctcctcactaccgctacctttgcatcagccacctcattggatggacagccttcctgtccaacatgctgttcttcacagatttcatgggccagattgtgtaccgcggggatccctatagtgcacacaactccacagagtttctcatctacgaaagaggagtcgaggttggatgttggggcttgtgcatcaactccgtgttttcctcactttattcttactttcagaaagttttggtatcctacattggattaaagggtctttacttcacgggatatttgctgtttggcctggggacgggatttattgggctcttcccgaatgtctactccaccctggtcctgtgcagcctgtttggtgtaatgtccagcaccctgtacactgtgccctttaacctcattactgagtaccaccgcgaggaagaaaaggaggtgtgctgtcattgaacctctgccttgggtaacatccagactcatctgaaggctggggaggatttggtagcaatgtgtagagcagagctggaaaataagggttcttgaaacagcaacagtcaaatgcccaaccaactgcaaccatgatctggtacaggcatgctcaccagcccagcccagcccagctgtcctgtcctccttattctcaactcctgctcacttagggagctgtagggcaagaagtgttactcccatttttctaattagaaaaaggcttggtgaggctgagaaaccagcccacaattacacaaagacaaaaaaagggggacccaggtcttctgtaaccacctcataggtctccctggtgccacctgcagcatttctagataccgacaataagggtctccctatccccaactttcagaggtacatagtggaatttcttggcattatttgctgagggtaggaaagtcctaggcaatggagtccagattttagtaagtcagaccccatgtgtgagaaggaaagctggaatcatgggtggtaatccccactttgctgccctgagcgggacctgtgccatttaaaccttggaacgcaactagtgaacaagcgcctatgcagtgcttataacagagttggtgtttccactctaaaattaccacctcttcttatcaaaatttgcaactttcttcctgtgaaaataggcttatagttccttaactggagcaatgatataaaagctacagagataactccaagtttaatccagctcagcatgaaactgcaaaaacactgaacatataaccatcagactataattctggccatgtttttcatcatttgatctggcagcagggcagaggtgcaccaggagtaaaaacctttcaaaaaagaggtgtggctttcctcatcccctggcaaacattgtcaccaaggtgggatgttgctgctaatgggagagtcatcataaaaaactgtccctacaaggagagtgttacatggtgttgggggaagaaaacctacgcttcaggctcagagaaacctggattcaaatcctgcctctctcacttggaagctgtgttacactggggatgttatttacttgtttattagttagcacttagaatgagttcatttttaggtgagataatatattcacaatgatacacaaaagtgcacactgtgtgctccctttaccatttactatctccctccagccccaacgtgttaccactcttactagttttttgttaatctttccggcatttttaaataaaaaccaagcaaatgtaaa

SEQ ID NO: 29268 - DNA, 1040 bp, Homo sapiens
  source 1..1040: mol_type = unassigned DNA
acagaccctaggaccacgcaggaggtggtgggctcgcaggaaggttcctctcccagtggccatgggtagcaacagtgggcaggctggccgccacatctataaatccctagctgatgatggcccctttgactctgtggagccgcctaaaagacccaccagcagactcatcatgcacagcatggccatgttcggaagagagttctgctacgcggtggaggcagcgtatgtgaccccagtcctgctcagcgtaggtctgcccagcagcctgtacagcattgtgtggttcctcagccccatcctgggattcctgctgcagcccgtggtcggatcggccagcgaccactgccggtccaggtggggccgccggagaccctacatcctcaccctgggagtcatgatgctcgtgggcatggctctgtacctcaatggggctactgttgtagcagctttgattgctaacccaaggaggaagctggtttgggccataagtgtcaccatgataggtgtcgttctctttgattttgctgccgacttcattgatgggcccatcaaagcctacttatttgatgtctgctcccatcaggacaaggagaagggcctccactaccatgccctcttcacagactcgcagggcaatgacattaaagtcactgctgagagcactggtgaacatgcctcctcactaccgctacctttgcatcagccacctcattggatggacagccttcctgtccaacatgctgttcttcacagatttcatgggccagattgtgtaccgcggggatccctatagtgcacacaactccacagagtttctcatctacgaaagaggagtcgaggttggatgttggggcttgtgcatcaactccgtgttttcctcactttattcttgtaagtctttctctctcctaaggatgtcttctaaaagtttctggtctagcacaacttggatttgatatttctatgtgtatttcctactgtttaaaataccagattcttaataaatctatggacgtcaggaaaaactatcaccttaaaaa

SEQ ID NO: 29269 - DNA, 740 bp, Homo sapiens
  source 1..740: mol_type = unassigned DNA
gcatggctctgtacctcaatggggctactgttgtagcaggttttggaggtgccctgggttaccttttgggtgctatagactgggcccatctggagctgggaagactgttgggtacagaattccaggtcatgttcttcttctctgcattggtgctcactttgtgttttactgttcatctgtgcagtatctctgaagccccacttacagaggttgcaaagggcattcccccacagcaaacccctcaggaccctccattgtcatcagatggaatgtacgagtatggttctatcgagaaagttaaaaatggttacgtaaatccagagctggcaatgcagggagcaaaaaacaaaaatcatgctgaacagactcgcagggcaatgacattaaagtcactgctgagagcactggtgaacatgcctcctcactaccgctacctttgcatcagccacctcattggatggacagccttcctgtccaacatgctgttcttcacagatttcatgggccagattgtgtaccgcggggatccctatagtgcacacaactccacagagtttctcatctacgaaagaggagtcgaggttggatgttggggcttgtgcatcaactccgtgttttcctcactttattcttactttcagaaagttttggtatcctacattggattaaagggtctttacttcacgggatatttgctgtttggcctggggacgggatttattgggctcttcccgaatgtc

SEQ ID NO: 29270 - DNA, 3341 bp, Homo sapiens
  source 1..3341: mol_type = unassigned DNA
aaggaagggggggcggaaccagcctgcacgcgctggctccgggtgacagccgcgcgcctcggccaggatctgagtgatgagacgtgtccccactgaggtgccccacagcagcaggtgttgagcatgggctgagaagctggaccggcaccaaagggctggcagaaatgggcgcctggctgattcctaggcagttggcggcagcaaggaggagaggccgcagcttctggagcagagccgagacgaagcagttctggagtgcctgaacggccccctgagccctacccgcctggcccactatggtccagaggctgtgggtgagccgcctgctgcggcaccggaaagcccagctcttgctggtcaacctgctaacctttggcctggaggtgtgtttggccgcaggcatcacctatgtgccgcctctgctgctggaagtgggggtagaggagaagttcatgaccatggtgctgggcattggtccagtgctgggcctggtctgtgtcccgctcctaggctcagccagtgaccactggcgtggacgctatggccgccgccggcccttcatctgggcactgtccttgggcatcctgctgagcctctttctcatcccaagggccggctggctagcagggctgctgtgcccggatcccaggcccctggagctggcactgctcatcctgggcgtggggctgctggacttctgtggccaggtgtgcttcactccactggaggccctgctctctgacctcttccgggacccggaccactgtcgccaggcctactctgtctatgccttcatgatcagtcttgggggctgcctgggctacctcctgcctgccattgactgggacaccagtgccctggccccctacctgggcacccaggaggagtgcctctttggcctgctcaccctcatcttcctcacctgcgtagcagccacactgctggtggctgaggaggcagcgctgggccccaccgagccagcagaagggctgtcggccccctccttgtcgccccactgctgtccatgccgggcccgcttggctttccggaacctgggcgccctgcttccccggctgcaccagctgtgctgccgcatgccccgcaccctgcgccggctcttcgtggctgagctgtgcagctggatggcactcatgaccttcacgctgttttacacggatttcgtgggcgaggggctgtaccagggcgtgcccagagctgagccgggcaccgaggcccggagacactatgatgaaggcgttcggatgggcagcctggggctgttcctgcagtgcgccatctccctggtcttctctctggtcatggaccggctggtgcagcgattcggcactcgagcagtctatttggccagtgtggcagctttccctgtggctgccggtgccacatgcctgtcccacagtgtggccgtggtgacagcttcagccgccctcaccgggttcaccttctcagccctgcagatcctgccctacacactggcctccctctaccaccgggagaagcaggtgttcctgcccaaataccgaggggacactggaggtgctagcagtgaggacagcctgatgaccagcttcctgccaggccctaagcctggagctcccttccctaatggacacgtgggtgctggaggcagtggcctgctcccacctccacccgcgctctgcggggcctctgcctgtgatgtctccgtacgtgtggtggtgggtgagcccaccgaggccagggtggttccgggccggggcatctgcctggacctcgccatcctggatagtgccttcctgctgtcccaggtggccccatccctgtttatgggctccattgtccagctcagccagtctgtcactgcctatatggtgtctgccgcaggcctgggtctggtcgccatttactttgctacacaggtagtatttgacaagagcgacttggccaaatactcagcgtagaaaacttccagcacattggggtggagggcctgcctcactgggtcccagctccccgctcctgttagccccatggggctgccgggctggccgccagtttctgttgctgccaaagtaatgtggctctctgctgccaccctgtgctgctgaggtgcgtagctgcacagctgggggctggggcgtccctctcctctctccccagtctctagggctgcctgactggaggccttccaagggggtttcagtctggacttatacagggaggccagaagggctccatgcactggaatgcggggactctgcaggtggattacccaggctcagggttaacagctagcctcctagttgagacacacctagagaagggtttttgggagctgaataaactcagtcacctggtttcccatctctaagccccttaacctgcagcttcgtttaatgtagctcttgcatgggagtttctaggatgaaacactcctccatgggatttgaacatatgaaagttatttgtaggggaagagtcctgaggggcaacacacaagaaccaggtcccctcagcccacagcactgtctttttgctgatccacccccctcttaccttttatcaggatgtggcctgttggtccttctgttgccatcacagagacacaggcatttaaatatttaacttatttatttaacaaagtagaagggaatccattgctagcttttctgtgttggtgtctaatatttgggtagggtgggggatccccaacaatcaggtcccctgagatagctggtcattgggctgatcattgccagaatcttcttctcctggggtctggccccccaaaatgcctaacccaggaccttggaaattctactcatcccaaatgataattccaaatgctgttacccaaggttagggtgttgaaggaaggtagagggtggggcttcaggtctcaacggcttccctaaccacccctcttctcttggcccagcctggttccccccacttccactcccctctactctctctaggactgggctgatgaaggcactgcccaaaatttcccctacccccaactttcccctacccccaactttccccaccagctccacaaccctgtttggagctactgcaggaccagaagcacaaagtgcggtttcccaagcctttgtccatctcagcccccagagtatatctgtgcttggggaatctcacacagaaactcaggagcaccccctgcctgagctaagggaggtcttatctctcagggggggtttaagtgccgtttgcaataatgtcgtcttatttatttagcggggtgaatattttatactgtaagtgagcaatcagagtataatgtttatggtgacaaaattaaaggctttcttatatgttta

SEQ ID NO: 29271 - DNA, 6400 bp, Homo sapiens
  source 1..6400: mol_type = unassigned DNA
acagcgcaagccccacgccacgcgtcgctggtcccaggcagcgagtcgctcgcgcgccccgccgcccgcctggcgacagctccgccgcgcacgcacatggaggggagcgcgagccccccggaaaagccccgcgcccgccctgcggctgccgtgctgtgccggggcccggtagagccgctggtcttcctggccaactttgccttggtcctgcagggcccgctcaccacgcagtatctgtggcaccgcttcagcgccgacctcggctacaatggcacccgccaaagggggggctgcagcaaccgcagcgcggaccccaccatgcaggaagtggagacccttacctcccactggaccctctacatgaacgtgggcggcttcctggtggggctcttctcgtccaccctgctgggagcttggagcgacagtgtgggccgccgcccgctgctagtgctggcctcgctgggcctgctgctccaggccctagtgtccgtttttgtggtgcagctgcagctccacgtcggctacttcgtgctgggtcgcatcctttgtgccctcctcggcgacttcggtggccttctggctgctagctttgcgtccgtggcagatgtcagctccagtcgcagccgcaccttccggatggccctgctggaagccagcatcggggtggctgggatgctggcaagcctcctcgggggccactggctccgggcccagggttatgccaaccccttctggctggccttggccttgctgatagccatgactctctatgcagctttctgctttggtgagaccttaaaggagccaaagtccacccggctcttcacgttccgtcaccaccgatccattgtccagctctatgtggctcccgccccagagaagtccaggaaacatttagccctctactcactggccatcttcgtggtgatcactgtgcactttggggcccaggacatcttaaccctttatgaactaagcacacccctctgctgggactccaaactaatcggctatggttctgcagctcagcatctcccctacctcaccagcctgctggccctgaagctcctgcagtactgcctggccgatgcctgggtagctgagatcggcctggccttcaacatcctggggatggtggtctttgcctttgccactatcacgcctctcatgttcacaggtgctctcttttctgctgtggcctgtgtgaatagcctggccatgctgacggcctccggcttcaactcactctacccagccactctgaactttatgaaggggttccccttcctcctgggagctggcctcctgctcatcccggctgttctgattgggatgctggaaaaggctgatcctcacctcgagttccagcagtttccccagagcccctgatctgcctggaccagaagacagagggcaagaggagcaaagtgaacaccaagcaactggaggtctgcagctggaagcccagcccacagcaggacaagcaactcttgtctaagggcagtgctctctttggacgaggtagtcaagagagaccaaggcaccaccccatccacagctgacccagcctctgtctaggatctagaatcataacccacacaggcccactgcaggacaggtggcagaggagctatttgggacaggagtcagttctccctttctgctatccatcacttataaccccacaggccagaggagaggtcctgagagaggtgacacttcagggaccagaggcagcacgagggctggcatctctccttccagcccaaactgcacagccccaaccaggttcccaacacgtgtagcagtcatcagccattccttaacaatgaatgtggtacctggttagtgccagccttgggaaggagggagggaggtaagaggggcttggtgatctctggaggaagagtgttgcctttgctgtggttggggaatcgatccttggctatggcctacccactcccctggctgaagagtgccaatcattacaaatcagcttcagcaaactgaaacaaaccttctggtgccttgggctttggggccctctgttttcctgctcccagtctgcctgccatacgttagacaacagaagctgctgggctgggcaggagccctgagctgcctggtggattggtaccaagtggggccagccagggcttctactgactcgctgtgcaaccttgagcaagccccactaggaacggctagatcagcaatgccccaaattgttgaatcgtggtgatcacatttggatggacaagttaggaaacttagctgattctctgagatacttcccacttcctcatacattctacaatgagatgcctctcttcatgggcctggggaaaggatgaatgagtgtggctggacttttgacctttaatgtccctgagcagttcttggcccttggggagaagtagggggaggatctggctgactcagccccaaccgaggggtagcagctgcagcccagccaagcagaacaccctggccctacagacctgtgtctgagcaggctttggaggaaaggccacttctgagtcctctgtctcaggagaagccaggcctaggtgcttgacctggtgatctgagctgtgtttgtcctagtatgggtggcagtcacctctgaacacactggccttggcttagaggaggcttgtgacttcagctgttccagctggggctggatgctggactctgattccctcagagagacagaagatcgggcagaggtcaaccagaaggccacacagggcagtggacaacagtggagggtataccaaatagaaataaaacgcaggaaacctctctgaatactgcccttggggacctcaggagggagtgggactgattggagacaaagagccagaaatcatcccctggagatactcagacactgtattgttattggcgctgtcctgtgagggcagtgtccaggctgccctgcttgtcatatccatgccctggctctggccccggtgagcacttgtgctgcatgaggaaaggaggatcaggtggggtcaaaaccaaagcatcgaggctggcactggccaagacagactctggcagggaggggagtggaaggaaggagccccaaacctggagtgagacctttgactttctgatgatgtggccaagaactaggagtcacctggccagcacagccaagagtggggctgggggcgccagctttaaggtgtcaacacctggcccttgcggggaaagagccttcagcagcccccacggcctggagcctgggtttattggagggtgctttcttaccctctgaacccagtggaggagggggcaatgggatattcctgctctgtatggcctctgggtcagctttttgttgcaaaatcctatcccccgctgctagattctttgaagcaagggagaagcaatagcccagcctcagaatgattctcaggaaagcaattccactgccagtggactgggtgccaggaggcctaggtctggatctggggctgccactaatgacaggaaagtgggcttatcctcaacctttctgagcctcagtgtcattatctgtaaaatggggatgataataccaggtagagttgctctgatgactggagaccatggagcggagtgtttgggaaatggcaaagatttgtgagggcttcgtgctttagagatttgctacccttaaccaccagcatcagctcacctgggaatctgtaagaaatgcagagtcctaggccccaccccagatctcctgattttaacaacattcccaggtgacttggatgcatgttaaagttggagaagctgccctaagtgacaaccctttgccttttcaggactttgcctctttccacagagctgcaggttctgtctaggctgcttttactgccatgggggctgcctggtccctgagtaagcagtgggtagccctggatggctgaggggctggggaagccagctgggccagaccaggaaggagcctgaggcacagcaccaaggcatggggtagggtgggctttgaggcacggcctccccatgcccagacccaggcccaaacaggaggctcctgtgcaccagcaagtgcagcaaagctggctgcagtgacaaggaagtcagagggagggctggtttgcctcaaccctcgccctggatgtggcaaaagataccacaccgaaggaagctgtaggggatctgggacttagtcaggctagctaagggcactgagtgattacagggcaaggccacagagcggcaggaagttgtaagtgcaggggccaggcacagtctgagtggagagccatgatggcactcatccctggctggctcctgggcccaggcctttgctcagaatacagtgcccaggcccgcctgggcattgccttaattcctgtctgaggctgccttccttcatcctcctcaagctgactgctatcagcaggagaagggaatgcagaaccacccccaccccaactccagtgtctccagaactgagcagggaccctccccatgacggagacagacaacccaatggcagggcctgggggagttctaacctcccgtgcccaagcctgacttcccttccctctccagatactgaggaaagtgggttggaggtgggccatgagggtgggggacagggggagggagagccatttcctaagaagagcccaggttgtctcagcccagggagactggtttcaggagctgttccttcagaaaggacgatggaaatggaagtcacagcagggctggggaactggggactggttaggttggacccatgggtgcagcaccctccaaactggtgtcagagcctgcagatgagtcccgggaggagcggccctgcaggaagcggatgatcttctcaatggtggcctcctggtattcgtgggaccacctgtgggcacaggagccaatgtggttcagacagctgggcagagggagctgctagtcagctgtttgcccacactctgcctgtcatggtgatttgtaccctacccccctggtcccagggccctggggctcacttgataccgttgaaagtaagcacagcctgcatgtcctcaggcaggacctggggctcaggccactcgaagccatcaatgatgggcacaatgttcttgccgcagcttaaagcagtcacaatctcctggagaaagaaaggaaaggaggaagatacccctgtacccatctagggacccttgtagccaggcaggtgctgggaggcccactggcccgaggctgggcccagggcaggacaccagtcctgatgtccaccttgatgtctaccttaacccttgtagtgtaataaaaaataaatatttttcctttgcccagagttcctggcacagagctgctaaaacccttggaatctcttgagtgatgagtgtctttgtatgctaaagagatgattccccactgggggcccggggggtgctatgggggtagcctagatagtttcaggaagagggctggtcaccagggagaccagggcatgactagaggattggaactttcagccccacctcccagcctccagagaggtgctggagattgagttcaatcaccaatggccaatgatttaatcaatcatgcctacataatggaacctccataaaaacccccaaacaaggggttttgaagagcctccaggttgataaacaggtgtaggtgctgggaaggtggtagaaggcatggcatccacacctccaccctccatacgtagagatcctatgtatctcttccatttggctattcttgagctgtgtcctttataactgtgaaattaaataattcagctgggcatggtgggtcacgcctgtaatcccaacactttgggaggctgaggcaggaggatcacttgagcccaggattttgagattaataatattatttattactattattcaagctttgttaaatcaaacctaaagctcttggaactttaagttattctgagccttgacaggaattggtctctgcagcctgagtcatggggcatgcagctgcaacttccacctattttttttttttctgtaattacttaggaagaccaaatggcaccagagataagactcccttagatccccacttagatcaccaccctttctcagggggtaataaagtcatcttccttggaatgtagcaatctataaccaatcaaagcactgtaacatacgcactggtcttgtatggaaaatgttgtaatcctgctaaaattcctctctctttgcctgtggaagtgaaaccttaacttctccagtttggaatgctcaccccatgcctttggagtcaatgcttactgggtggctattctcaaactttgcactcaaagaaactctatacttagtcttattttctgaatctcattatttaaggttgacataataaacaactaatagtaagtaaagtg

SEQ ID NO: 29272 - DNA, 6487 bp, Homo sapiens
  source 1..6487: mol_type = unassigned DNA
acagcgcaagccccacgccacgcgtcgctggtcccaggcagcgagtcgctcgcgcgccccgccgcccgcctggcgacagctccgccgcgcacgcacatggaggggagcgcgagccccccggaaaagccccgcgcccgccctgcggctgccgtgctgtgccggggcccggtagagccgctggtcttcctggccaactttgccttggtcctgcagggcccgctcaccacgcagtatctgtggcaccgcttcagcgccgacctcggctacaatggcacccgccaaagggggggctgcagcaaccgcagcgcggaccccaccatgcaggaagtggagacccttacctcccactggaccctctacatgaacgtgggcggcttcctggtggggctcttctcgtccaccctgctgggagcttggagcgacagtgtgggccgccgcccgctgctagtgctggcctcgctgggcctgctgctccaggccctagtgtccgtttttgtggtgcagctgcagctccacgtcggctacttcgtgctgggtcgcatcctttgtgccctcctcggcgacttcggtggccttctggctgctagctttgcgtccgtggcagatgtcagctccagtcgcagccgcaccttccggatggccctgctggaagccagcatcggggtggctgggatgctggcaagcctcctcgggggccactggctccgggcccagggttatgccaaccccttctggctggccttggccttgctgatagccatgactctctatgcagctttctgctttggtgagaccttaaaggagccaaagtccacccggctcttcacgttccgtcaccaccgatccattgtccagctctatgtggctcccgccccagagaagtccaggaaacatttagccctctactcactggccatcttcgtggtgatcactgtgcactttggggcccaggacatcttaaccctttatgaactaagcacacccctctgctgggactccaaactaatcggctatggttctgcagctcagcatctcccctacctcaccagcctgctggccctgaagctcctgcagtactgcctggccgatgcctgggtagctgagatcggcctggccttcaacatcctggggatggtggtctttgcctttgccactatcacgcctctcatgttcacaggatatgggttgcttttcctgtcattagtcatcacacctgtcatccgggctaaactctccaagctggtgagagagacagagcagggtgctctcttttctgctgtggcctgtgtgaatagcctggccatgctgacggcctccggcattttcaactcactctacccagccactctgaactttatgaaggggttccccttcctcctgggagctggcctcctgctcatcccggctgttctgattgggatgctggaaaaggctgatcctcacctcgagttccagcagtttccccagagcccctgatctgcctggaccagaagacagagggcaagaggagcaaagtgaacaccaagcaactggaggtctgcagctggaagcccagcccacagcaggacaagcaactcttgtctaagggcagtgctctctttggacgaggtagtcaagagagaccaaggcaccaccccatccacagctgacccagcctctgtctaggatctagaatcataacccacacaggcccactgcaggacaggtggcagaggagctatttgggacaggagtcagttctccctttctgctatccatcacttataaccccacaggccagaggagaggtcctgagagaggtgacacttcagggaccagaggcagcacgagggctggcatctctccttccagcccaaactgcacagccccaaccaggttcccaacacgtgtagcagtcatcagccattccttaacaatgaatgtggtacctggttagtgccagccttgggaaggagggagggaggtaagaggggcttggtgatctctggaggaagagtgttgcctttgctgtggttggggaatcgatccttggctatggcctacccactcccctggctgaagagtgccaatcattacaaatcagcttcagcaaactgaaacaaaccttctggtgccttgggctttggggccctctgttttcctgctcccagtctgcctgccatacgttagacaacagaagctgctgggctgggcaggagccctgagctgcctggtggattggtaccaagtggggccagccagggcttctactgactcgctgtgcaaccttgagcaagccccactaggaacggctagatcagcaatgccccaaattgttgaatcgtggtgatcacatttggatggacaagttaggaaacttagctgattctctgagatacttcccacttcctcatacattctacaatgagatgcctctcttcatgggcctggggaaaggatgaatgagtgtggctggacttttgacctttaatgtccctgagcagttcttggcccttggggagaagtagggggaggatctggctgactcagccccaaccgaggggtagcagctgcagcccagccaagcagaacaccctggccctacagacctgtgtctgagcaggctttggaggaaaggccacttctgagtcctctgtctcaggagaagccaggcctaggtgcttgacctggtgatctgagctgtgtttgtcctagtatgggtggcagtcacctctgaacacactggccttggcttagaggaggcttgtgacttcagctgttccagctggggctggatgctggactctgattccctcagagagacagaagatcgggcagaggtcaaccagaaggccacacagggcagtggacaacagtggagggtataccaaatagaaataaaacgcaggaaacctctctgaatactgcccttggggacctcaggagggagtgggactgattggagacaaagagccagaaatcatcccctggagatactcagacactgtattgttattggcgctgtcctgtgagggcagtgtccaggctgccctgcttgtcatatccatgccctggctctggccccggtgagcacttgtgctgcatgaggaaaggaggatcaggtggggtcaaaaccaaagcatcgaggctggcactggccaagacagactctggcagggaggggagtggaaggaaggagccccaaacctggagtgagacctttgactttctgatgatgtggccaagaactaggagtcacctggccagcacagccaagagtggggctgggggcgccagctttaaggtgtcaacacctggcccttgcggggaaagagccttcagcagcccccacggcctggagcctgggtttattggagggtgctttcttaccctctgaacccagtggaggagggggcaatgggatattcctgctctgtatggcctctgggtcagctttttgttgcaaaatcctatcccccgctgctagattctttgaagcaagggagaagcaatagcccagcctcagaatgattctcaggaaagcaattccactgccagtggactgggtgccaggaggcctaggtctggatctggggctgccactaatgacaggaaagtgggcttatcctcaacctttctgagcctcagtgtcattatctgtaaaatggggatgataataccaggtagagttgctctgatgactggagaccatggagcggagtgtttgggaaatggcaaagatttgtgagggcttcgtgctttagagatttgctacccttaaccaccagcatcagctcacctgggaatctgtaagaaatgcagagtcctaggccccaccccagatctcctgattttaacaacattcccaggtgacttggatgcatgttaaagttggagaagctgccctaagtgacaaccctttgccttttcaggactttgcctctttccacagagctgcaggttctgtctaggctgcttttactgccatgggggctgcctggtccctgagtaagcagtgggtagccctggatggctgaggggctggggaagccagctgggccagaccaggaaggagcctgaggcacagcaccaaggcatggggtagggtgggctttgaggcacggcctccccatgcccagacccaggcccaaacaggaggctcctgtgcaccagcaagtgcagcaaagctggctgcagtgacaaggaagtcagagggagggctggtttgcctcaaccctcgccctggatgtggcaaaagataccacaccgaaggaagctgtaggggatctgggacttagtcaggctagctaagggcactgagtgattacagggcaaggccacagagcggcaggaagttgtaagtgcaggggccaggcacagtctgagtggagagccatgatggcactcatccctggctggctcctgggcccaggcctttgctcagaatacagtgcccaggcccgcctgggcattgccttaattcctgtctgaggctgccttccttcatcctcctcaagctgactgctatcagcaggagaagggaatgcagaaccacccccaccccaactccagtgtctccagaactgagcagggaccctccccatgacggagacagacaacccaatggcagggcctgggggagttctaacctcccgtgcccaagcctgacttcccttccctctccagatactgaggaaagtgggttggaggtgggccatgagggtgggggacagggggagggagagccatttcctaagaagagcccaggttgtctcagcccagggagactggtttcaggagctgttccttcagaaaggacgatggaaatggaagtcacagcagggctggggaactggggactggttaggttggacccatgggtgcagcaccctccaaactggtgtcagagcctgcagatgagtcccgggaggagcggccctgcaggaagcggatgatcttctcaatggtggcctcctggtattcgtgggaccacctgtgggcacaggagccaatgtggttcagacagctgggcagagggagctgctagtcagctgtttgcccacactctgcctgtcatggtgatttgtaccctacccccctggtcccagggccctggggctcacttgataccgttgaaagtaagcacagcctgcatgtcctcaggcaggacctggggctcaggccactcgaagccatcaatgatgggcacaatgttcttgccgcagcttaaagcagtcacaatctcctggagaaagaaaggaaaggaggaagatacccctgtacccatctagggacccttgtagccaggcaggtgctgggaggcccactggcccgaggctgggcccagggcaggacaccagtcctgatgtccaccttgatgtctaccttaacccttgtagtgtaataaaaaataaatatttttcctttgcccagagttcctggcacagagctgctaaaacccttggaatctcttgagtgatgagtgtctttgtatgctaaagagatgattccccactgggggcccggggggtgctatgggggtagcctagatagtttcaggaagagggctggtcaccagggagaccagggcatgactagaggattggaactttcagccccacctcccagcctccagagaggtgctggagattgagttcaatcaccaatggccaatgatttaatcaatcatgcctacataatggaacctccataaaaacccccaaacaaggggttttgaagagcctccaggttgataaacaggtgtaggtgctgggaaggtggtagaaggcatggcatccacacctccaccctccatacgtagagatcctatgtatctcttccatttggctattcttgagctgtgtcctttataactgtgaaattaaataattcagctgggcatggtgggtcacgcctgtaatcccaacactttgggaggctgaggcaggaggatcacttgagcccaggattttgagattaataatattatttattactattattcaagctttgttaaatcaaacctaaagctcttggaactttaagttattctgagccttgacaggaattggtctctgcagcctgagtcatggggcatgcagctgcaacttccacctattttttttttttctgtaattacttaggaagaccaaatggcaccagagataagactcccttagatccccacttagatcaccaccctttctcagggggtaataaagtcatcttccttggaatgtagcaatctataaccaatcaaagcactgtaacatacgcactggtcttgtatggaaaatgttgtaatcctgctaaaattcctctctctttgcctgtggaagtgaaaccttaacttctccagtttggaatgctcaccccatgcctttggagtcaatgcttactgggtggctattctcaaactttgcactcaaagaaactctatacttagtcttattttctgaatctcattatttaaggttgacataataaacaactaatagtaagtaaagtg

SEQ ID NO: 29273 - DNA, 2502 bp, Homo sapiens
  source 1..2502: mol_type = unassigned DNA
ctcgggaggtcactcggctgctgggcgggctgctgtcacaggcgctgcgtgccctggctctgctcgccactggccggcgcgctcccggcgcacggagcacactcgcgctcccggcgcacggagcacactcgcgctccgggactgaaacctgagcagccgtagcagccgaatttgggagcatatccttgtcactgcagccagaaagcccttcgatccccatcagagaggtcacatgagccccgaggtcacctgcccgcggaggggccacctgcctcgcttccacccgaggacctgggttgagcccgtggtggcctcgtcccaggtggctgcctccctctacgatgcggggctactcctcgtggtgaaggcgtcctacggaaccggaggctcctccaaccacagtgccagcccatcgccccggggggctctagaggaccaacagcagagagccatctccaatttctacattatctacaaccttgtggtgggcctgtcccccctgctgtccgcctacgggctgggatggctcagcgaccgctaccaccgaaagatctccatctgcatgtcgctgctgggcttcctgctctcccgcctcgggctgctgctcaaggtgctgctggactggccagtggaggtgctgtacggggcggcggcgctgaacgggctattcggcggcttctccgccttctggtccggggtcatggcgctgggatcgctgggctcctccgagggccgccgctctgtgcgcctcatcctcattgacctgatgctgggcttggcggggttctgcgggagcatggcttccgggcatctcttcaagcagatggctgggcactctgggcagggcctgatactgacggcctgcagcgtgagctgtgcctcgtttgccctgctctacagccttttggtgctaaaggtccctgagtcggtggccaaacccagccaggagctccccgccgtggataccgtgtctggcacggttggcacataccgcactctggatcctgatcagttggaccaacagtatgcagtggggcaccctccatctcctggaaaagcaaaaccccataaaaccaccattgccttgctctttgtgggtgctatcatatatgacctggcggtggtgggcacagtggacgtgatccctctttttgtgctgagggagcctctcggttggaaccaagtgcaggtgggctatggtatggctgcagggtacaccatcttcatcaccagcttcctgggtgtcctggtcttctcccgctgctttcgggacaccaccatgatcatgattgggatggtctcctttgggtcaggagccctcctcttggcttttgtgaaagagacatacatgttctatattgctcgagccgtcatgctgtttgctctcatccccgtcacaaccatccgatcagctatgtccaaactcataaagggctcctcttatggaaaggtgttcgtcatactgcagctgtccttggctctgaccggcgtggtgacatccaccttgtacaacaagatctaccagctcaccatggacatgtttgtgggctcctgctttgctctctcctcctttctctccttcctggccatcattccaattagcatcgtggcctataaacaagtcccattgtcaccatatggagacatcatagagaaatgaagatgcttacctgcaggaactgaaaacatcagccatggccaggcccccagaagacaaaagaagggaccagggaactggtgacctaagcaacccactgcttaagaaacctgcgttccagccagagttggcctcagaatgacctgctctggctcagggatccctggtggatggggaaaagcactttcctggtgatggaaaaacgttctcagctttaagacacccccattaggcagacactgggttctgtgacagcagagcatgaccttaagggttacaggcaggctgcacacagcagtcccaggccctgtgaggggcttcagactccagctacagcgagcctgccccttttcttcaagggactgtcttgagggctccaaagtatagctaactagtcacctgggtgctgtgctgaaagtcccatgggagaactcaaagcgtgcattatcacagcctgaggggaatgtggaagggatgttttgtaagaactaccaacagttttgcacgaacaatgtcttttaaattaaaataaaaccttgaaaaaagtcagctttctttcctgagtcttccttacctacaaacactcaggagggggatggagctcaggcccttgtcttctgggtagttttgttactactgttgcttttaagaagcaaatgtcacaaggctttcttcaatgggatgttcaattgagtacttccagtcaacagtgcttcccaaagtgggtggtgtgaaggaagaggaggtacattaagagctattttatttgaggtagtcatttttataaccttgtttacttggatttataaaagcagactcacctaataaaatcaacattcattgta

SEQ ID NO: 29274 - DNA, 3280 bp, Homo sapiens
  source 1..3280: mol_type = unassigned DNA
actgccggcctgcgcggtactcactgccggcctccgcggtacccactgccggcctccgcgctacccggccgcagcgcgcgagtcacatggaagctcctgaggagcccgcgccagtgcgcggaggcccggaggccacccttgaggtccgtgggtcgcgctgcttgcggctgtccgccttccgagaagagctgcgggcgctcttggtcctggctggccccgcgttcttggttcagctgatggtgttcctgatcagcttcataagctccgtgttctgtggccacctgggcaagctggagctggatgcagtcacgctggcaatcgcggttatcaatgtcactggtgtctcagtgggattcggcttatcttctgcctgtgacaccctcatctcccagacgtacgggagccagaacctgaagcacgtgggcgtgatcctgcagcggagtgcgctcgtcctgctcctctgctgcttcccctgctgggcgctctttctcaacacccagcacatcctgctgctcttcaggcaggacccagatgtgtccaggcttacccagacctatgtcacgatcttcattccagctcttcctgcaacctttctttatatgttacaagttaaatatttgctcaaccagggaattgtactgccccagatcgtaactggagttgcagccaaccttgtcaatgccctcgccaactatctgtttctccatcaactgcatcttggggtgataggctctgcactggcaaacttgatttcccagtacaccctggctctactcctctttctctacatcctcgggaaaaaactgcatcaagctacatggggaggctggtccctcgagtgcctgcaggactgggcctccttcctccgcctggccatccccagcatgctcatgctgtgcatggagtggtgggcctatgaggtcgggagcttcctcagtggcatcctcggcatggtggagctgggcgctcagtccatcgtgtatgaactggccatcattgtgtacatggtccctgcaggcttcagtgtggctgccagtgtccgggtaggaaacgctctgggtgctggagacatggagcaggcacggaagtcctctaccgtttccctgctgattacagtgctctttgctgtagccttcagtgtcctgctgttaagctgtaaggatcacgtggggtacatttttactaccgaccgagacatcattaatctggtggctcaggtggttccaatttatgctgtttcccacctctttgaagctcttgcttgcacgagtggtggtgttctgagggggagtggaaatcagaaggttggagccattgtgaataccattgggtactatgtggttggcctccccatcgggatcgcgctgatgtttgcaaccacacttggagtgatgggtctgtggtcagggatcatcatctgtacagtctttcaagctgtgtgttttctaggctttattattcagctaaattggaaaaaagcctgtcagcaggctcaggtacacgccaatttgaaagtaaacaacgtgcctcggagtgggaattctgctctccctcaggatccgcttcacccagggtgccctgaaaaccttgaaggaattttaacgaacgatgttggaaagacaggcgagcctcagtcagatcagcagatgcgccaagaagaacctttgccggaacatccacaggacggcgctaaattgtccaggaaacagctggtgctgcggcgagggcttctgctcctgggggtcttcttaatcttgctggtggggattttagtgagattctatgtcagaattcagtgacgtggtaggaaagaaagtcaggtcaagtgatgcttttgagcttacacacaattcacaggcccaccagtgacaatttactgtgagttaatgtcattcaggtgtgcccatggattttgagggctggaaatgcaaagacacatttttctataaaaagaaaaagcaactaaggttaaaagctatattgtggcccaagacactgtctgaaagatgacatgagtagtaattcaccactatctgaaccaagcaaggatcaatgtgctgactgcattggccaatggctttgatacttctgctatttttttagacacaaacccataaactaactgcttaagaattcatactgcttgaattatgtaaaatatattttacagtatatctttccttgggccttagattactattcactgggcaaatggtatttgtttttgttttaattttttttttaatagacggaagtcttgctctgtcatgcaggctggagtgcggtggtgcgatcatagctcactgcagcctcgaactcttgggcttcaagcaatcctcctgtgtcagccaccagagtagctgagactacaggggtatgccaccatgcccagctggcatttgttaatcttcatttgaggtctagatctaggcactgtggacactgaaaaacagttgggaaatctttcgagctgtggaaatccaaacaaagactgataattcctggtaggggtgtgtgcgtgacgtactgcagcctcaacctcctgggctcaagtgatcctcccacctcagcctcctgagtagctgagaccacaggcgtgtgccaccacgcctagctaattttttataccagggtctaccctttgtttcccaggctggtcttgaattcctgggatcaagcaatccttccaccttgccctcccaaagtgttgggattataggcatgagccaccacgactggccagaggacaaaattttaataaaggtcttagcttaagcagtaatcctacttcattaagccttcctggggtgcggtacacaccgttaattcagcaaccctcagtacatactaagtatgctcagtgctgtgaaagtggattacaccaaattaagtcattcttatcacacccaatcaaaagtcaagaagccagggataaaagcacctcaggcacataacattaatctagtaatgtaattctctgcacatccagctggtgaaactgcgtgctgtaagctgggaccagctttgtccataactgctgagagaacttgctgaagctctaggaataattttgcctgcccggttgctcaccagttgtagcttgccagctcccaacacccttcctggtgccaataaactttctcaaagagcaatactgacatttcttttgataaaacctccagccttctctgtgttgttccgacataccgaggaccaactggtctacatggatgccctgaacatgcaattctttcttccaaaataaaacattaaatagaga

SEQ ID NO: 29275 - DNA, 1998 bp, Homo sapiens
  source 1..1998: mol_type = unassigned DNA
ccggcctccgcggtacccactgccggcctccgcgctacccggccgcagcgcgcgagtcacatggaagctcctgaggagcccgcgccagtgcgcggaggcccggaggccacccttgaggtccgtgggtcgcgctgcttgcggctgtccgccttccgagaagagctgcgggcgctcttggtcctggctggccccgcgttcttggttcagctgatggtgttcctgatcagcttcataagctccgtgttctgtggccacctgggcaagctggagctggatgcagtcacgctggcaatcgcggttatcaatgtcactggtgtctcagtgggattcggcttatcttctgcctgtgacaccctcatctcccagacgtacgggagccagaacctgaagcacgtgggcgtgatcctgcagcggagtgcgctcgtcctgctcctctgctgcttcccctgctgggcgctctttctcaacacccagcacatcctgctgctcttcaggcaggacccagatgtgtccaggcttacccagacctatgtcacgatcttcattccagctcttcctgcaacctttctttatatgttacaagttaaatatttgctcaaccagggaattgtactgccccagatcgtaactggagttgcagccaaccttgtcaatgccctcgccaactatctgtttctccatcaactgcatcttggggtgataggctctgcactggcaaacttgatttcccagtacaccctggctctactcctctttctctacatcctcgggaaaaaactgcatcaagctacatggggaggctggtccctcgagtgcctgcaggactgggcctccttcctccgcctggccatccccagcatgctcatgctgtgcatggagtggtgggcctatgaggtcgggagcttcctcagtggcatcctcggcatggtggagctgggcgctcagtccatcgtgtatgaactggccatcattgtgtacatggtccctgcaggcttcagtgtggctgccagtgtccgggtaggaaacgctctgggtgctggagacatggagcaggcacggaagtcctctaccgtttccctgctgattacagtgctctttgctgtagccttcagtgtcctgctgttaagctgtaaggatcacgtggggtacatttttactaccgaccgagacatcattaatctggtggctcaggtggttccaatttatgctgtttcccacctctttgaagctcttgcttgcacgagtggtggtgttctgagggggagtggaaatcagaaggttggagccattgtgaataccattgggtactatgtggttggcctccccatcgggatcgcgctgatgtttgcaaccacacttggagtgatgggtctgtggtcagggatcatcatctgtacagtctttcaagctgtgtgttttctaggctttattattcagctaaattggaaaaaagcctgtcagcaggctcaggtacacgccaatttgaaagtaaacaacgtgcctcggagtgggaattctgctctccctcaggatccgcttcacccagggtgccctgaaaaccttgaaggaattttaacgaacgatgttggaaagacaggcgagcctcagtcagatcagcagatgcgccaagaagaacctttgccggaacatccacaggacggcgctaaattgtccaggaaacagctggtgctgcggcgagggcttctgctcctgggggtcttcttaatcttgctggctggagtgcggtggtgcgatcatagctcactgcagcctcgaactcttgggcttcaagcaatcctcctgtgtcagccaccagagtagctgagactacagggctggtgaaactgcgtgctgtaagctgggaccagctttgtccataactgctgagagaacttgctgaagctctaggaataattttgcctgcccggttgctcaccagttgtagcttgccagctcccaacacccttcctggtgccaataaactttctcaaagagcaa

SEQ ID NO: 29276 - DNA, 1362 bp, Homo sapiens
  source 1..1362: mol_type = unassigned DNA
attgggactgttctttccagaggctctgcactggcaaacttgatttcccagtacaccctggctctactcctctttctctacatcctcgggaaaaaactgcatcaagctacatggggaggcatcctcggcatggtggagctgggcgctcagtccatcgtgtatgaactggccatcattgtgtacatggtccctgcaggcttcagtgtggctgccagtgtccgggtaggaaacgctctgggtgctggagacatggagcaggcacggaagtcctctaccgtttccctgctgattacagtgctctttgctgtagccttcagtgtcctgctgttaagctgtaaggatcacgtggggtacatttttactaccgaccgagacatcattaatctggtggctcaggtggttccaatttatgctgtttcccacctctttgaagctcttgcttgcacgagtggtggtgttctgagggggagtggaaatcagaaggttggagccattgtgaataccattgggtactatgtggttggcctccccatcgggatcgcgctgatgtttgcaaccacacttggagtgatgggtctgtggtcagggatcatcatctgtacagtctttcaagctgtgtgttttctaggctttattattcagctaaattggaaaaaagcctgtcagcaggctcaggtacacgccaatttgaaagtaaacaacgtgcctcggagtgggaattctgctctccctcaggatccgcttcacccagggtgccctgaaaaccttgaaggaattttaacgaacgatgttggaaagacaggcgagcctcagtcagatcagcagatgcgccaagaagaacctttgccggaacatccacaggacggcgctaaattgtccaggaaacagctggtgctgcggcgagggcttctgctcctgggggtcttcttaatcttgctggtggggattttagtgagattctatgtcagaattcagtgacgtggtaggaaagaaagtcaggtcaagtgatgcttttgagcttacacacaattcacaggcccaccagtgacaatttactgtgagttaatgtcattcaggtgtgcccatggattttgagggctggaaatgcaaagacacatttttctataaaaagaaaaagcaactaaggttaaaagctatattgtggcccaagacactgtctgaaagatgacatgagtagtaattcaccactatctgaaccaagcaaggatcaatgtgctgactgcattggccaatggctttgatacttctgctatttttttagacacaaacccataaactaactgcttaagaattcatactgcttgaattatgtaaaatatattttacagtatatctttcctt

SEQ ID NO: 29277 - DNA, 1719 bp, Homo sapiens
  source 1..1719: mol_type = unassigned DNA
agagcaggctgcactgcgcggtacccactgccggcctgcgcggtactcactgccggcctccgcggtacccactgccggcctccgcgctacccggccgcagcgcgcgagtcacatggaagctcctgaggagcccgcgccagtgcgcggaggcccggaggccacccttgaggtccgtgggtcgcgctgcttgcggctgtccgccttccgagaagagctgcgggcgctcttggtcctggctggccccgcgttcttggttcagctgatggtgttcctgatcagcttcataagctccgtgttctgtggccacctgggcaagctggagctggatgcagtcacgctggcaatcgcgacgtacgggagccagaacctgaagcacgtgggcgtgatcctgcagcggagtgcgctcgtcctgctcctctgctgcttcccctgctgggcgctctttctcaacacccagcacatcctgctgctcttcaggcaggacccagatgtgtccaggcttacccagacctatgtcacgatcttcattccagctcttcctgcaacctttctttatatgttacaagttaaatatttgctcaaccagggaattgtactgccccagatcgtaactggagttgcagccaaccttgtcaatgccctcgccaactatctgtttctccatcaactgcatcttggggtgataggctctgcactggcaaacttgatttcccagtacaccctggctctactcctctttctctacatcctcgggaaaaaactgcatcaagctacatggggaggctggtccctcgagtgcctgcaggactgggcctccttcctccgcctggccatccccagcatgctcatgctgtgcatggagtggtgggcctatgaggtcgggagcttcctcagtggcatcctcggcatggtggagctgggcgctcagtccatcgtgtatgaactggccatcattgtgtacatggtccctgcaggcttcagtgtggctgccagtgtccgggtaggaaacgctctgggtgctggagacatggagcaggcacggaagtcctctaccgtttccctgctgattacagtgctctttgctgtagccttcagtgtcctgctgttaagctgtaaggatcacgtggggtacatttttactaccgaccgagacatcattaatctggtggctcaggtggttccaatttatgctgtttcccacctctttgaagctcttgcttgcacgagtggtggtgttctgagggggagtggaaatcagaaggttggagccattgtgaataccattgggtactatgtggttggcctccccatcgggatcgcgctgatgtttgcaaccacacttggagtgatgggctcaggtacacgccaatttgaaagtaaacaacgtgcctcggagtgggaattctgctctccctcaggatccgcttcacccagggtgccctgaaaaccttgaaggaattttaacgaacgatgttggaaagacaggcgagcctcagtcagatcagcagatgcgccaagaagaacctttgccggaacatccacaggacggcgctaaattgtccaggaaacagctggtgctgcggcgagggcttctgctcctgggggtcttcttaatcttgctggtggggattttagtgagattctatgtcagaattcagtgacgtggtaggaaagaaagtcaggtcaagtgatgcttttgagcttacacacaattcacag

SEQ ID NO: 29278 - DNA, 1002 bp, Homo sapiens
  source 1..1002: mol_type = unassigned DNA
attgggactgttctttccagaggctctgcactggcaaacttgatttcccagtacaccctggctctactcctctttctctacatcctcgggaaaaaactgcatcaagctacatggggaggctggtccctcgagtgcctgcaggactgggcctccttcctccgcctggccatccccagcatgctcatgctgtgcatggagtggtgggcctatgaggtcgggagcttcctcagtggcatcctcggcatggtggagctgggcgctcagtccatcgtgtatgaactggccatcattgtgtacatggtccctgcaggcttcagtgtggctgccagtgtccgggtaggaaacgctctgggtgctggagacatggagcaggcacggaagtcctctaccgtttccctgctgattacagtgctctttgctgtagccttcagtgtcctgctgttaagctgtaaggatcacgtggggtacatttttactaccgaccgagacatcattaatctggtggctcaggtggttccaatttatgctgtttcccacctctttgaagctcttgcttgcacgagtggtggtgttctgagggggagtggaaatcagaaggttggagccattgtgaataccattgggtactatgtggttggcctccccatcgggatcgcgctgatgtttgcaaccacacttggagtgatggggtgccctgaaaaccttgaaggaattttaacgaacgatgttggaaagacaggcgagcctcagtcagatcagcagatgcgccaagaagaacctttgccggaacatccacaggacggcgctaaattgtccaggaaacagctggtgctgcggcgagggcttctgctcctgggggtcttcttaatcttgctggtggggattttagtgagattctatgtcagaattcagtgacgtggtaggaaagaaagtcaggtcaagtgatgcttttgagcttacacacaattcacaggcccaccagtgacaatttactgtgagtta

SEQ ID NO: 29279 - DNA, 1847 bp, Homo sapiens
  source 1..1847: mol_type = unassigned DNA
actgccggcctgcgcggtactcactgccggcctccgcggtacccactgccggcctccgcgctacccggccgcagcgcgcgagtcacatggaagctcctgaggagcccgcgccagtgcgcggaggcccggaggccacccttgaggtccgtgggtcgcgctgcttgcggctgtccgccttccgagaagagctgcgggcgctcttggtcctggctggccccgcgttcttggttcagctgatggtgttcctgatcagcttcataagctccgtgttctgtggccacctgggcaagctggagctggatgcagtcacgctggcaatcgcggttatcaatgtcactggtgtctcagtgggattcggcttatcttctgcctgtgacaccctcatctcccagacgtacgggagccagaacctgaagcacgtgggcgtgatcctgcagcggagtgcgctcgtcctgctcctctgctgcttcccctgctgggcgctctttctcaacacccagcacatcctgctgctcttcaggcaggacccagatgtgtccaggcttacccagacctatgtcacgatcttcattccagctcttcctgcaacctttctttatatgttacaagttaaatatttgctcaaccagggaattgtactgccccagatcgtaactggagttgcagccaaccttgtcaatgccctcgccaactatctgtttctccatcaactgcatcttggggtgataggctctgcactggcaaacttgatttcccagtacaccctggctctactcctctttctctacatcctcgggaaaaaactgcatcaagctacatggggaggctggtccctcgagtgcctgcaggactgggcctccttcctccgcctggccatccccagcatgctcatgctgtgcatggagtggtgggcctatgaggtcgggagcttcctcagtggcatcctcggcatggtggagctgggcgctcagtccatcgtgtatgaactggccatcattgtgtacatggtccctgcaggcttcagtgtggctgccagtgtccgggtaggaaacgctctgggtgctggagacatggagcaggcacggaagtcctctaccgtttccctgctgattacagtgctctttgctgtagccttcagtgtcctgctgttaagctgtaaggatcacgtggggtacatttttactaccgaccgagacatcattaatctggtggctcaggtggttccaatttatgctgtttcccacctctttgaagctcttgcttgcacgagtggtggtgttctgagggggagtggaaatcagaaggttggagccattgtgaataccattgggtactatgtggttggcctccccatcgggatcgcgctgatgtttgcaaccacacttggagtgatgggtctgtggtcagggatcatcatctgtacagtctttcaagctgtgtgttttctaggctttattattcagctaaattggaaaaaagcctgtcagcaggctcaggtacacgccaatttgaaagtaaacaacgtgcctcggagtgggaattctgctctccctcaggatccgcttcacccagggtgccctgaaaaccttgaaggaattttaacgaacgatgttggaaagacaggcgagcctcagtcagatcagcagatgcgccaagaagaacctttgccggaacatccacaggacggcgctaaattgtccaggaaacagctggtgctgcggcgagggcttctgctcctgggggtcttcttaatcttgctggctggagtgcggtggtgcgatcatagctcactgcagcctcgaactcttgggcttcaagcaatcctcctgtgtcagccaccagagtag

SEQ ID NO: 29280 - DNA, 974 bp, Homo sapiens
  source 1..974: mol_type = unassigned DNA
actgccggcctgcgcggtactcactgccggcctccgcggtacccactgccggcctccgcgctacccggccgcagcgcgcgagtcacatggaagctcctgaggagcccgcgccagtgcgcggaggcccggaggccacccttgaggtccgtgggtcgcgctgcttgcggctgtccgccttccgagaagagctgcgggcgctcttggtcctggctggccccgcgttcttggttcagctgatggtgttcctgatcagcttcataagctccgtgttctgtggccacctgggcaagctggagctggatgcagtcacgctggcaatcgcggttatcaatgtcactggtgtctcagtgggattcggcttatcttctgcctgtgacaccctcatctcccagacgtacgggagccagaacctgaagcacgtgggcgtgatcctgcagcggagtgcgctcgtcctgctcctctgctgcttcccctgctgggcgctctttctcaacacccagcacatcctgctgctcttcaggcaggacccagatgtgtccaggcttacccagacctatgtcacgatcttcattccagctcttcctgcaacctttctttatatgttacaagttaaatatttgctcaaccagaggctctgcactggcaaacttgatttcccagtacaccctggctctactcctctttctctacatcctcgggaaaaaactgcatcaagctacatggggaggctggtccctcgagtgcctgcaggactgggcctccttcctccgcctggccatccccagcatgctcatgctgtgcatggagtggtgggcctatgaggtcgggagcttcctcagtggcatcctcggcatggtggagctgggcgctcagtccatcgtgtatgaactggccatcattgtgtacatggtccctgcaggcttcagtgtggctgccagtgtccgggtaggaaacgctctgggtgctggagacat

SEQ ID NO: 29281 - DNA, 2231 bp, Homo sapiens
  source 1..2231: mol_type = unassigned DNA
ctggccgtgcaggcgctcaggcgtgcagggtagccagtgccccggccaggaatggacagcctccaggacacagtggccctggaccatgggggctgctgccctgccctcagcaggctggttcccagaggctttgggactgagatgtggactctctttgccctttctggacccctgttcctgttccaggtgctgacttttatgatctacatcgtgagcactgtgttctgcgggcacctgggcaaggtggagctggcatcggtgaccctcgcggtggcctttgtcaatgtctgcggagtttctgtaggagttggtttgtcttcggcatgtgacaccttgatgtctcagagcttcggcagccccaacaagaagcacgtgggcgtgatcctgcagcggggcgcgctggtcctgctcctctgctgcctcccttgctgggcgctcttcctcaacacccagcacatcctgctgctcttccggcaggacccggacgtgtccaggttgacccaggactatgtaatgattttcattccaggacttccggtgatttttctttacaatctgctggcaaaatatttgcaaaatcagggatggctgaaggggcaggaggaggagtccccattccaaaccccgggtttgtccatcctccatccatctcactcacaccttagcagggccagttttcatttatttcagaagatcacctggccccaagtcctcagtggtgtggtgggcaactgtgtcaacggtgtggccaactatgccctggtttctgtgctgaacctgggggtcaggggctccgcctatgccaacatcatctcccagtttgcacagaccgtcttcctccttctctacattgtgctgaagaagctgcacctggagacgtgggcaggttggtccagccagtgcctgcaggactggggccccttcttctccctggctgtccccagcatgctcatgatctgtgttgagtggtgggcctatgagatcgggagcttcctcatggggctgctcagtgtggtggatctctctgcccaggctgtcatctacgaggtggccactgtgacctacatgattcccttggggctcagcatcggggtctgtgtccgagtggggatggctctgggggctgcggatactgtgcaggccaagcgctcggccgtctcgggcgtgctcagcatagttggcatttccctggtcctgggcaccctgataagcatcctgaaaaatcagctggggcatatttttaccaatgatgaagatgtcattgccctggtgagccaggtcttgccggtttatagtgtctttcacgtgtttgaggccatctgttgtgtctatggcggagttctgagaggaactgggaagcaggcctttggtgccgctgtgaatgccatcacatattacatcatcggcctaccactgggcatccttctgacctttgtggtcagaatgagaatcatgggcctctggctgggcatgctggcctgtgtcttcctggcaactgctgcctttgttgcttatactgcccggctggactggaagcttgctgcagaggaggctaagaaacattcaggccggcagcagcagcagagagcagagagcactgcaaccagacctgggcctgagaaagcagtcctatcttcagtggctacaggcagttcccctggcattaccttgacaacgtattcaaggtctgagtgccacgtggacttcttcaggactccagaggaggcccacgccctttcagctcctaccagcagactatcagtgaaacagctggtcatccgccgtggggctgctctgggggcggcgtcagccacactgatggtggggctcacggtcaggatcctagccaccaggcactagcaaagaagcttggaaatagaaagccaggagtggctgtccccagtatgcaaacacaccacggtctgccctgcaaaaacaccaatggggtctagtgcaggtggacactttgaaccactcctcaaaaaaagaactttggctgattccttgtggtgacactcagaggggtctgaacagacttgacaattctgttctggtcaagctggagttttcttctgtgacttggactgctctacagaagacatcagccaactgcacgagtcagagtccagggattgtcactattattaataatgtaaatggcttcaaatgggacactgcagataaaatcacaaaaaccactgttatattaaagattacacatttcctgggca

SEQ ID NO: 29282 - DNA, 2181 bp, Homo sapiens
  source 1..2181: mol_type = unassigned DNA
ggctcgctggacaaagctggccgtgcaggcgctcaggcgtgcagggtagccagtgccccggccaggaatggacagcctccaggacacagtggccctggaccatgggggctgctgccctgccctcagcaggctggttcccagaggctttgggactgagatgtggactctctttgccctttctggacccctgttcctgttccaggtgctgacttttatgatctacatcgtgagcactgtgttctgcgggcacctgggcaaggtggagctggcatcggtgaccctcgcggtggcctttgtcaatgtctgcggagtttctgtaggagttggtttgtcttcggcatgtgacaccttgatgtctcagagcttcggcagccccaacaagaagcacgtgggcgtgatcctgcagcggggcgcgctggtcctgctcctctgctgcctcccttgctgggcgctcttcctcaacacccagcacatcctgctgctcttccggcaggacccggacgtgtccaggttgacccaggactatgtaatgattttcattccaggacttccggtgatttttctttacaatctgctggcaaaatatttgcaaaatcagaagatcacctggccccaagtcctcagtggtgtggtgggcaactgtgtcaacggtgtggccaactatgccctggtttctgtgctgaacctgggggtcaggggctccgcctatgccaacatcatctcccagtttgcacagaccgtcttcctccttctctacattgtgctgaagaagctgcacctggagacgtgggcaggttggtccagccagtgcctgcaggactggggccccttcttctccctggctgtccccagcatgctcatgatctgtgttgagtggtgggcctatgagatcgggagcttcctcatggggctgctcagtgtggtggatctctctgcccaggctgtcatctacgaggtggccactgtgacctacatgagacacagccatcgtcttgcttatgcagcccatgtcactcggattcccttggggctcagcatcggggtctgtgtccgagtggggatggctctgggggctgcggatactgtgcaggccaagcgctcggccgtctcgggcgtgctcagcatagttggcatttccctggtcctgggcaccctgataagcatcctgaaaaatcagctggggcatatttttaccaatgatgaagatgtcattgccctggtgagccaggtcttgccggtttatagtgtctttcacgtgtttgaggccatctgttgtgtctatggcggagttctgagaggaactgggaagcaggcctttggtgccgctgtgaatgccatcacatattacatcatcggcctaccactgggcatccttctgacctttgtggtcagaatgagaatcatgggcctctggctgggcatgctggcctgtgtcttcctggcaactgctgcctttgttgcttatactgcccggctggactggaagcttgctgcagaggaggctaagaaacattcaggccggcagcagcagcagagagcagagagcactgcaaccagacctgggcctgagaaagcagtcctatcttcagtggctacaggcagttcccctggcattaccttgacaacgtattcaaggtctgagtgccacgtggacttcttcaggactccagaggaggcccacgccctttcagctcctaccagcagactatcagtgaaacagctggtcatccgccgtggggctgctctgggggcggcgtcagccacactgatggtggggctcacggtcaggatcctagccaccaggcactagcaaagaagcttggaaatagaaagccaggagtggctgtccccagtatgcaaacacaccacggtctgccctgcaaaaacaccaatggggtctagtgcaggtggacactttgaaccactcctcaaaaaaagaactttggctgattccttgtggtgacactcagaggggtctgaacagacttgacaattctgttctggtcaagctggagttttcttctgtgacttggactgctctacagaagacatcagccaactgcacgagtcagagtccagggattgtcactattattaataatgtaaatggcttcaaatgggacactgcagataaaatcacaaaaaccactgttatattaaagattacacatttcctgggca

SEQ ID NO: 29283 - DNA, 1100 bp, Homo sapiens
  source 1..1100: mol_type = unassigned DNA
cccggccaggaatggacagcctccaggacacagtggccctggaccatgggggctgctgccctgccctcagcaggctggttcccagaggctttgggactgagatgtggactctctttgccctttctggacccctgttcctgttccaggtgctgacttttatgatctacatcgtgagcactgtgttctgcgggcacctgggcaaggtggagctggcatcggtgaccctcgcggtggcctttgtcaatgtctgcggagtttctgtaggagttggtttgtcttcggcatgtgacaccttgatgtctcagagcttcggcagccccaacaagaagcacgtgggcgtgatcctgcagcggggcgcgctggtcctgctcctctgctgcctcccttgctgggcgctcttcctcaacacccagcacatcctgctgctcttccggcaggacccggacgtgtccaggttgacccaggactatgtaatgattttcattccaggacttccggtgatttttctttacaatctgctggcaaaatatttgcaaaatcagaagatcacctggccccaagtcctcagtggtgtggtgggcaactgtgtcaacggtgtggccaactatgccctggtttctgtgctgaacctgggggtcaggggctccgcctatgccaacatcatctcccagtttgcacagaccgtcttcctccttctctacattgtgctgaagaagctgcacctggagacgtgggcaggttggtccagccagtgcctgcaggactggggccccttcttctccctggctgtccccagcatgctcatgatctgtgttgagtggtgggcctatgagatcgggagcttcctcatggggctgctcagtgtggtggatctctctgcccaggctgtcatctacgaggtggccactgtgacctacatgattcccttggggctcagcatcggggtctgtgtccgagtggggatggctctgggggctgcggatactgtgcaggccaagcgctcggccgtctcgggcgtgctcagcatagttggcatttccctggtcctgggcaccctgataagcatcctgaaaaatcagctggggcatatttttaccaat

SEQ ID NO: 29284 - DNA, 1213 bp, Homo sapiens
  source 1..1213: mol_type = unassigned DNA
agtgccctaggaggcagggctcatcccacaagttgccatggtagcccctcctcctgccccttactcatcagccaggctgtaccgacacgggctgcccaggcagggggtggctcgctggacaaagctggccgtgcaggcgctcaggcgtgcagggtagccagtgccccggccaggaatggacagcctccaggacacagtggccctggaccatgggggctgctgccctgccctcagcaggctggttcccagaggctttgggactgagatgtggactctctttgccctttctggacccctgttcctgttccaggtgctgacttttatgatctacatcgtgagcactgtgttctgcgggcacctgggcaaggtggagctggcatcggtgaccctcgcggtggcctttgtcaatgtctgcggagtttctgtaggagttggtttgtcttcggcatgtgacaccttgatgtctcagagcttcggcagccccaacaagaagcacgtgggcgtgatcctgcagcggggcgcgctggtcctgctcctctgctgcctcccttgctgggcgctcttcctcaacacccagcacatcctgctgctcttccggcaggacccggacgtgtccaggttgacccaggactatgtaatgattttcattccaggacttccggtgatttttctttacaatctgctggcaaaatatttgcaaaatcagaagatcacctggccccaagtcctcagtggtgtggtgggcaactgtgtcaacggtgtggccaactatgccctggtttctgtgctgaacctgggggtcaggggctccgcctatgccaacatcatctcccagtttgcacagaccgtcttcctccttctctacattgtgctgaagaagctgcacctggagacgtgggcaggttggtccagccagtgcctgcaggactggggccccttcttctccctggctgtccccagcatgctcatgatctgtgttgagtggtgggcctatgagatcgggagcttcctcatggggctgctcagtgtggtggatctctctgcccaggctgtcatctacgaggtggccactgtgacctacatgattcccttggggctcagcatcggggtctgtgtccgagtggggatggctctgggggctgcggatactgtgcaggccaagcgctcggccgtctcgggcgtgctcagcatagcaagatcagatccttggtaa

SEQ ID NO: 29285 - DNA, 3575 bp, Homo sapiens
  source 1..3575: mol_type = unassigned DNA
gctgtcagcgctgagcacagcgcccagggagagggacagacagccggctgcatgggacagcggaacccagagtgagaggggaggtggcaggacagacagacagcaggggcggacgcagagacagacagcggggacagggaggccgacacggacatcgacagcccatagattcctaacccagggagccccggcccctctcgccgcttcccaccccagacggagcggggacaggctgccgagcatcctcccacccgccctccccgtcctgcctcctcggcccctgccagcttcccccgcttgagcacgcagggcgtccgaggacgcgctgggcctccgcacccgccctcatggaggccgtggagaccggggaacggcccaccttcggagcctgggactacggggtctttgccctcatgctcctggtgtccactggcatcgggctgtgggtcgggctggctcggggcgggcagcgcagcgctgaggacttcttcaccgggggccggcgcctggcggccctgcccgtgggcctgtcgctgtctgccagcttcatgtcggccgtgcaggtgctgggcgtgccgtcggaggcctatcgctatggcctcaagttcctctggatgtgcctgggccagcttctgaactcggtcctcaccgccctgctcttcatgcccgtcttctaccgcctgggcctcaccagcacctacgagtacctggagatgcgcttcagccgcgcagtgcggctctgcgggactttgcagtacattgtagccacgatgctgtacaccggcatcgtaatctacgcaccggccctcatcctgaaccaagtgaccgggctggacatctgggcgtcgctcctgtccaccggaattatctgcaccttctacacggctgtgggcggcatgaaggctgtggtctggactgatgtgttccaggtcgtggtgatgctaagtggcttctgggttgtcctggcacgcggtgtcatgcttgtgggcgggccccgccaggtgctcacgctggcccagaaccactcccggatcaacctcatggactttaaccctgacccgaggagccgctatacattctggacttttgtggtgggtggcacgttggtgtggctctccatgtatggcgtgaaccaggcgcaggtgcagcgctacgtggcttgccgcacagagaagcaggccaagctggccctgctcatcaaccaggtcggcctgttcctgatcgtgtccagcgctgcctgctgtggcatcgtcatgtttgtgttctacactgactgcgaccctctcctcctggggcgcatctctgccccagaccagtacatgcctctgctggtgctggacatcttcgaagatctgcctggagtccccgggcttttcctggcctgtgcttacagtggcaccctcagcacagcatccaccagcatcaatgctatggctgcagtcactgtagaagacctcatcaaacctcggctgcggagcctggcacccaggaaactcgtgattatctccaaggggctctcactcatctacggatcggcctgtctcaccgtggcagccctgtcctcactgctcggaggaggtgtccttcagggctccttcaccgtcatgggagtcatcagcggccccctgctgggagccttcatcttgggaatgttcctgccggcctgcaacacaccgggcgtcctcgcgggactaggcgcgggcttggcgctgtcgctgtgggtggccttgggcgccacgctgtacccacccagcgagcagaccatgagggtcctgccatcgtcggctgcccgctgcgtggctctctcagtcaacgcctctggcctcctggacccggctctcctccctgctaacgactccagcagggcccccagctcaggaatggacgccagccgacccgccttagctgacagcttctatgccatctcctatctctattacggtgccctgggcacgctgaccactgtgctgtgcggagccctcatcagctgcctgacaggccccaccaagcgcagcaccctggccccgggattgttgtggtgggacctcgcacggcagacagcatcagtggcccccaaggaagaagtggccatcctggatgacaacttggtcaagggtcctgaagaactccccactggaaacaagaagccccctggcttcctgcccaccaatgaggatcgtctgtttttcttggggcagaaggagctggagggggctggctcttggaccccctgtgttggacatgatggtggtcgagaccagcaggagacaaacctctgaggacagggccagccgcgggactgacaccctgggatggaacctcaggatgggccaaacccagacaacgggcccatggccttgggctctgattggctggattgccttgtatgcaaatgagttcaggactacaataccctaccctatggggaggccctgcctccgggaggtcattttttaaatccagccccttgcttcaaccgtccccagtattagacgctgcagccctgacggctccccccaaataaggctgggtttttctctctctcttttttttttttttttttttttgagacagggtcatgctctgtcacccaggctggagtgcagtggtgtgatctcggctcactgcaacctctgcctcccaggctcaagtgattctcctgcctcagcctcttgagtagctgggattgtaggtgcccaccaccatgcccagccaactttttgtatttttagtagagacagggtttcaccatgttggtcaggctggtctcgaactcctgacctcaagtgatccacctgcctcggcctcccaaagtgctgggttacaggcgtaagctaccatgcccagcctaccgtttttctcaatctataatagaaagccaccacgcccaggtaatttttgtaattttgtatttttgtagagacggggttttgccatgttggccaggctggtctcaaactcctgatctcaggtgatcctcctgccttggcctcccaaagggctgggattacaggggtgagccaccgcgccccacctctttcttattttcttcctgggattggggaggggatgattcagaccccacatggcctccaaccttggcccacacacctgccatggctcccatcatcctgagcatgctagcgtcccctcctcacctgacaatggaggctctcgaattgggttgtgtccccccaaaatttatgtctacccagaacctcagaacatgagcttacttggaaatagggtctttgcaggtgtaactggttaaattaaaagaggtattactggaggaggatggatgaatccagtgactggttcctcatatgaagtagagaagagatgcagagaaacacatggggaagatgccacgtgaagacagaggcagtggttggatcaatgcatctacgagtcggagaacccaaggattgccagcaacaaccagaaatcaggaggggggcatgagatgcattatttcttagagcctttagagggaacatggccctactgacaccttgatgtcagacttctggctgctagaactgtcagagaataaatttctgttgtttgatgcc

SEQ ID NO: 29286 - DNA, 5061 bp, Homo sapiens
  source 1..5061: mol_type = unassigned DNA
ccccattcgcaggacagctcttacctgccgggccgccgccccagccaacagctcagccgggtgctccttcctgggctccacgcccggagctgcttcctgacggtgcagccgcaaggcatcgcaggggccccgcgctactgccctgctccctcaaagtcccaggtcccctcccctggtgctgatcattaaccaggaggccgtataaggagctagcggccctggcgagagggaaggacgcaacgctgccaccatggacagtagcacctggagccccaagaccaccgcggtcacccggcctgttgagacccacgagctcattcgcaatgcagccgatatctccatcatcgttatctacttcgtggtagtgatggccgtcggactgtgggctatgttttccaccaatcgtgggactgttggaggcttcttcctggcaggccgaagtatggtgtggtggccgattggagcctccctctttgctagtaacattggaagtggccactttgtggggctggccgggactggggcagcttcaggcatcgccattggaggctttgaatggaatgccctggttttggtggttgtgctgggctggctgtttgtccccatctatattaaggctggggtggtgacaatgccagagtacctgaggaagcggtttggaggccagcggatccaggtctacctttcccttctgtccctgctgctctacattttcaccaagatctcggcagacatcttctcgggggccatattcatcaatctggccttaggcctgaatctgtatttagccatctttctcttattggcaatcactgccctttacacaattacagggggcctggcggcggtgatttacacggacaccttgcagacggtgatcatgctggtggggtctttaatcctgactgggtttgcttttcacgaagtgggaggctatgacgccttcatggaaaagtacatgaaagccattccaaccatagtgtctgatggcaacaccacctttcaggaaaaatgctacactccaagggccgactccttccacatcttccgagatcccctcacgggagacctcccatggcctgggttcatctttgggatgtccatccttaccttgtggtactggtgcacagatcaggtcattgtgcagcgctgcctctcagccaagaatatgtctcacgtgaagggtggctgcatcctgtgtgggtatctaaagctgatgcccatgttcatcatggtgatgccaggaatgatcagccgcattctgtacacagaaaaaattgcctgtgtcgtcccttcagaatgtgagaaatattgcggtaccaaggttggctgtaccaacatcgcctatccaaccttagtggtggagctcatgcccaatggactgcgaggcctgatgctatcagtcatgctggcctccctcatgagctccctgacctccatcttcaacagcgccagcaccctcttcaccatggacatctacgccaaggtccgcaagagagcatctgagaaagagctcatgattgccggaaggttgtttatcctggtgctgattggcatcagcatcgcctgggtgcccattgtgcagtcagcacaaagtgggcaactcttcgattacatccagtccatcaccagttacttgggaccacccattgcggctgtcttcctgcttgctattttctggaagagagtcaatgagccaggagccttttggggactgatcctaggacttctgattgggatttcacgtatgattactgagtttgcttatggaaccgggagctgcatggagcccagcaactgtcccacgattatctgtggggtgcactacttgtactttgccattatcctcttcgccatttctttcatcaccatcgtggtcatctccctcctcaccaaacccattccggatgtgcatctctaccgtctgtgttggagcctgcgcaacagcaaagaggagcgtattgacctggatgcggaagaggagaacatccaagaaggccctaaggagaccattgaaatagaaacacaagttcctgagaagaaaaaaggaatcttcaggagagcctatgacctattttgtgggctagagcagcacggtgcacccaagatgactgaggaagaggagaaagccatgaagatgaagatgacggacacctctgagaagcctttgtggaggacagtgttgaacgtcaatggcatcatcctggtgaccgtggctgtcttttgccatgcatattttgcctgagtcctaccttttgctgtagatttaccatggctggactcttactcaccttcctttagtctcgtcctgtggtgttgaagggaaatcagccagttgtaaattttgcccaggtggataaatgtgtacatgtgtaattataggctagctggaagaaaaccattagtttgctgttaatttatgcatttgaagccagtgtgatacagccatctgtacctactggagctgcagaagggaagtccactcagtcacatccagaaaaaggcagactaagaatcagaagccatgtgattgatgtctgacgtgagtctgtctcaggtagattccgggtgtcagtgtggtttataatccttgaatattgttttagaaactttggtctccctggttcctgccacttttcctgtccgtcctcctccccattttttttttaaaagaaagctgttttcccctcatcatatccctcttgagttttgcctggactttccctctcaagtgtgtcaatcaggtaaactgaggaatgcatggaagctgaggatggagcttgatgggctccctgtcctgggtgtttgctctctgaagtggaggcctgaggaaggtagtacttccacaaaagggagggacccgggccccagcctcaagctagtgggggaggcagatagcctgaatccaggggattttctgggcttcttaaaatgtccattgtgagttccccgtgtttgggattccactcattttggcattcacagtgcctggaatgtcttagattttcagcaatgcgtgttgaataaatgaatgacataggcatttatttttaaatctttgcttgctttttacatgagcctggcccttagttaaccttttcttgtggctacacaaagtatgctcactggttactaatgacttgggatgcatttgtcaaactgattatattagttttctagggatgccataacaaagtagcacagaccagatggctcaagcagcagacatttattttctcacagttctagaggctagaagttggaggccaagatgtcagcagggttggtttcttctgaggcctctctccttggttgcagatggtcatatctcactctgtcttccgtggccttccttttgtctgtgtcctaaatctactcttctgataaggacatcagtcatattggaataggacccaccctaatgtcttcattttaatcacctctttaaagcccctacctccaaatacagtcacactgtgagaaactgagggttaggaagtcagcaagtgagtcttgaagagatactaaacaaacccacaacacagataaagtatgcattttggagatttccaagccagagtctcccgtgaaaaaggtaaacggaagcagttattgtgcagcaaaaggaaaaagaattacaaactgaacgtatgtaggtgaggcaaggcagggtagggcagggcctttgggtaggctgatcagagggtttttcaacaataaatcaatgggaatgcatttgttgctcccaggaccctggcaccttgactctggtactatagcatgtcagcaaatacaagcaaagcccaacactctgatttgcatttatgccaatctaaactatccggtgtttagtttgattttttgagtgcaggttcattcaaggaccaggttcccttgtgctcagggtgaagtagaaccagaaaacatcgttatccattcccagaagttttggaagagccttggtagaaaagcagaagctgctttgaccgtgaaaatatttgactcctatcagtttttggtcaggagaagatatccacctagaccaacctgaggagaaggctcagagtacagatataccccgagcaacgtgatcaatgtccttgaaccttcatttttcatctgaaaacagagacataaatgcctggctcacagatttaaatgttatacattgacagcatttatcagtataacatttatttaaataagtaggtgctcaataggtgttggtcttctaacttgtctacatcccatccccattccagggtcttcagaattgaaggagagatgttgtatcactgttagaaggctgctttgggacattctgcagcagggaggagggactgtcaacccctacaccatgaccaccaagttcctcaccttggctgagtccctaaaactctctgaacctcaggttcctccaagcataatgcagacttcacagagctgttgtaaagattaggtgaggtcaattgatactgcttaaaaggcccggtccgtagaaaatgcccaataaacattactgctttccccctcaccctactgcctgaaaaaatattacacctgtgagactgactttgagaaccagtgtgggtggggagttgtgcatataaactatttaatgagtaccaaacacaaaagtcaagcttgtaaaatatcaggccttgccccagaaagacaaataccacatgatctcactgatatgtagaatcttaaaaagtcaaactcagaagcagagagtagaatgatggttatcaagggctgggggagggagggactggggagatgttggtcaaatgatacaaaggtttagttaggtggaataagttcagaaaatcaattgtacaatgtatcaattatagttaatagcaatataacatatacttgaaaattgctgagagtagtgtgagtgttctaccacaaaaaaatatgtgcagtaatagatgttaattaccttaatttagtcatttcacaatatgtacatatataaaaatatgttgtatgccatgagtatatataattattatttgtgaatttaaaaaataaaaataatttccaaaaaaa

SEQ ID NO: 29287 - DNA, 2088 bp, Homo sapiens
  source 1..2088: mol_type = unassigned DNA
actgcactcctgcctgggcgacagaaaaagactctgtcccaaaagtgggctctttgaaggctagaaggtatttggggcagcagacttgtgtggaagcagttatcaaagtggggatgtgacacgcaccaggagaggggaacagacaacacatgagattggagcctccctctttgctagtaacattggaagtggccactttgtggggctggccgggactggggcagcttcaggcatcgccattggaggctttgaatggaatgccctggttttggtggttgtgctgggctggctgtttgtccccatctatattaaggctggggtggtgacaatgccagagtacctgaggaagcggtttggaggccagcggatccaggtctacctttcccttctgtccctgctgctctacattttcaccaagatctcggcagacatcttctcgggggccatattcatcaatctggccttaggcctgaatctgtatttagccatctttctcttattggcaatcactgccctttacacaattacagggggcctggcggcggtgatttacacggacaccttgcagacggtgatcatgctggtggggtctttaatcctgactgggtttgcttttcacgaagtgggaggctatgacgccttcatggaaaagtacatgaaagccattccaaccatagtgtctgatggcaacaccacctttcaggaaaaatgctacactccaagggccgactccttccacatcttccgagatcccctcacgggagacctcccatggcctgggttcatctttgggatgtccatccttaccttgtggtactggtgcacagatcaggtcattgtgcagcgctgcctctcagccaagaatatgtctcacgtgaagggtggctgcatcctgtgtgggtatctaaagctgatgcccatgttcatcatggtgatgccaggaatgatcagccgcattctgtacacagaaaaaattgcctgtgtcgtcccttcagaatgtgagaaatattgcggtaccaaggttggctgtaccaacatcgcctatccaaccttagtggtggagctcatgcccaatggactgcgaggcctgatgctatcagtcatgctggcctccctcatgagctccctgacctccatcttcaacagcgccagcaccctcttcaccatggacatctacgccaaggtccgcaagagagcatctgagaaagagctcatgattgccggaaggttgtttatcctggtgctgattggcatcagcatcgcctgggtgcccattgtgcagtcagcacaaagtgggcaactcttcgattacatccagtccatcaccagttacttgggaccacccattgcggctgtcttcctgcttgctattttctggaagagagtcaatgagccaggagccttttggggactgatcctaggacttctgattgggatttcacgtatgattactgagtttgcttatggaaccgggagctgcatggagcccagcaactgtcccacgattatctgtggggtgcactacttgtactttgccattatcctcttcgccatttctttcatcaccatcgtggtcatctccctcctcaccaaacccattccggatgtgcatctctaccgtctgtgttggagcctgcgcaacagcaaagaggagcgtattgacctggatgcggaagaggagaacatccaagaaggccctaaggagaccattgaaatagaaacacaagttcctgagaagaaaaaaggaatcttcaggagagcctatgacctattttgtgggctagagcagcacggtgcacccaagatgactgaggaagaggagaaagccatgaagatgaagatgacggacacctctgagaagcctttgtggaggacagtgttgaacgtcaatggcatcatcctggtgaccgtggctgtcttttgccatgcatattttgcctgagtcctaccttttgctgtagatttaccatggctggactcttactcaccttcctttagtctcgtcctgtggtgttgaagggaaatcagccagttgtaaattttgcccaggtggataaatgtgtacatgtgtaattataggctagctgg

SEQ ID NO: 29288 - DNA, 2269 bp, Homo sapiens
  source 1..2269: mol_type = unassigned DNA
ctttaggagaggagcagacagctcttagctagggtcagatttcaaattctcatctcttggtgccaataccaccaccagattcttctttgaagtcaacttttgagatcttcactaagtacacgttggtgtctgaagattcacacgagtgcctctggtaatcattttcttcagggaatcacagtctctcctctcagcaaagcatccactgtactgaactttgcttttggaaacatcttcttcctgagacctcgttgaaagaaactctctggtgtcatactttccaatatggaggtgaagaactttgcagtttgggattatgttgtatttgcagccctctttttcatttcctctggaattggggtgttctttgccattaaggagagaaaaaaggcaacttcccgagagttcctggttgggggaaggcaaatgagctttggccctgtcggcttgtctctgacagccagcttcatgtcagctgtcacggtcctggggaccccttctgaagtctaccgctttggggcatccttcctagtcttcttcattgcttacctatttgtcatcctcttaacatcagagctctttctccctgtgttctacagatctggtatcaccagcacttatgagtacttacaactacgattcaacaaaccagttcgctatgctgccacggtcatctacattgtacagacgattctctacacaggagtggtggtgtatgctcctgccctggcactcaatcaagtgactgggtttgatctctggggctctgtgtttgcaacaggaattgtttgcacattctactgtaccctgggaggattaaaagcagtggtgtggacagatgcatttcagatggttgtcatgattgtgggcttcttaacggttctcattcaaggatcaactcatgctgggggattccacaatgtattagagcaatcaacaaatggatctcgactacatatatttgactttgatgtagatcctctcaggcgacacactttttggactatcacagtgggaggaacttttacttggctcggaatctatggggtcaatcaatcaactattcagcgatgcatctcttgcaaaacagaaaagcatgctaagcttgccttgtattttaacttgctgggtctctggatcattctggtgtgtgctgtcttctctggcttaatcatgtactctcactttaaagactgtgacccttggacttctggcatcatctcagcaccagaccagctgatgccgtactttgtcatggagatatttgccacaatgccaggactgccaggactttttgtggcttgtgccttcagtggaactctgagcaccgtggcttccagcatcaatgccttggcaacagtgacctttgaggattttgtcaagagctgttttcctcatctctccgacaagctgagcacctggatcagtaaaggcttatgtaggtacagctggtggactttctattccatatcatgaaatgtacatgtggtagatgtcaaaatcctgcatgtgctattcaggacacacttataaacacaaatgcactgtgagatatgtgaagaatcccacacatagattcttacacttccaaagatccagcagggtatcaggaaagaatgactagctagtttaccttaactgcctttattttcagatactcttctatacttaccctacactctagacgaggcttatccaacccacggcctgtgggccgcatacggcccaggatggctttgaatgcagcccaacacaaattcgtaaactttcttaaaacattctggaatttttttgtaattttttaaatcttagcagctatcattagtgtttgtgtattttatgtgtactccaaggcaactccttctttcaacgtggcccagggaggccaaaagattggacacccctgcaaactaatcacatcaatctctcttgattacactgtgtgatggtcatattagtctctctacatgggaagatgttgtgcttactatggccagtcactttgacaaagaaaagccaaattcttttctaaagaattgttccttattaccaaactcccagtaaccccctcaaagaataattgccccttgcttaatcatgcaattgcatattatgtttatactcacttcagcacttatcagagataattgcagtttcacaaggtttactttttaaagtataaacaaattatgtatttacttactaatagaaaatataggtaatttggggaaatttatgtacattgttaaataaaattatatctatctaa

SEQ ID NO: 29289 - DNA, 6250 bp, Homo sapiens
  source 1..6250: mol_type = unassigned DNA
ctgaattccttctctgtggcatatgctttaggagaggagcagacagctcttagctagggtcagatttcaaattctcatctcttggtgccaataccaccaccagattcttctttgaagtcaacttttgagatcttcactaagtacacgttggtgtctgaagattcacacgagtgcctctggtaatcattttcttcagggaatcacagtctctcctctcagcaaagcatccactgtactgaactttgcttttggaaacatcttcttcctgagacctcgttgaaagaaactctctggtgtcatactttccaatatggaggtgaagaactttgcagtttgggattatgttgtatttgcagccctctttttcatttcctctggaattggggtgttctttgccattaaggagagaaaaaaggcaacttcccgagagttcctggttgggggaaggcaaatgagctttggccctgtcggcttgtctctgacagccagcttcatgtcagctgtcacggtcctggggaccccttctgaagtctaccgctttggggcatccttcctagtcttcttcattgcttacctatttgtcatcctcttaacatcagagctctttctccctgtgttctacagatctggtatcaccagcacttatgagtacttacaactacgattcaacaaaccagttcgctatgctgccacggtcatctacattgtacagacgattctctacacaggagtggtggtgtatgctcctgccctggcactcaatcaagtgactgggtttgatctctggggctctgtgtttgcaacaggaattgtttgcacattctactgtaccctgggaggattaaaagcagtggtgtggacagatgcatttcagatggttgtcatgattgtgggcttcttaacggttctcattcaaggatcaactcatgctgggggattccacaatgtattagagcaatcaacaaatggatctcgactacatatatttgactttgatgtagatcctctcaggcgacacactttttggactatcacagtgggaggaacttttacttggctcggaatctatggggtcaatcaatcaactattcagcgatgcatctcttgcaaaacagaaaagcatgctaagcttgccttgtattttaacttgctgggtctctggatcattctggtgtgtgctgtcttctctggcttaatcatgtactctcactttaaagactgtgacccttggacttctggcatcatctcagcaccagaccagctgatgccgtactttgtcatggagatatttgccacaatgccaggactgccaggactttttgtggcttgtgccttcagtggaactctgagcaccgtggcttccagcatcaatgccttggcaacagtgacctttgaggattttgtcaagagctgttttcctcatctctccgacaagctgagcacctggatcagtaaaggcttatgtctcttatttggcgtgatgtgtacctctatggctgtggctgcatctgtcatgggaggtgttgtgcaggcttccctcagcattcacggcatgtgtggaggaccaatgctgggcttattctccctgggaatcgtgttcccttttgtgaattggaagggtgcactaggaggtcttcttactggaatcaccttgtcattttgggtggccattggggccttcatttaccctgcaccagcctctaagacatggcctttgcctctgtcaacagaccaatgtatcaaatcaaatgtgacagcaacagggcctccagtactatccagcagacctggaatagctgatacctggtactcgatctcctacctttactacagtgcagtgggctgcttaggatgcattgttgctggagtaatcatcagcctcataacaggtcgccaaagaggtgaggatattcaaccactgttaattagaccagtttgtaatttattttgcttttggtctaagaagtacaaaacactatgctggtgtggagttcagcatgacagtgggacagagcaggaaaaccttgagaatggcagtgcccggaaacagggggctgaatctgtcttacagaacggactcagaagagaaagcctggtacatgttccaggctatgatcctaaggacaaaagctacaacaatatggcatttgagactacccatttctaaggcaatacctgtatgaatgcacacacacacgtgcaatacacacacacacacacaaactccacatacttcttgcctacttgttagtagatatgtatagttgccattgctagaagacagggatgtctggtgcctatttctacttatttataactacatgcaaaatgactgtctctcgggatattctttgaaagactccaactttcacagagaaaaaccaacctgctccaaatgcccttgactacttccttcttgaataaattagggctggatttcattaccattcaagaaagcgaagtctttttgcttggtgtcatattaaacttcaggtttttcgttttagtagttttttaaccatcaaaatatcttggagtttagaggcagaacgggaaacagaaatatgcatatttaacactttcctgccacgagggataaaatagaggaatgacatccacccctgacctcatacctgacatacatgtagatatattttatgccacccatctcccatcctgtagctacaattggcatacaactactattaacctcccttcaccaccactgtcaggtcctcttccagtcattccagtcattagctgtcctgaccaaacattaaaaaaaaaattcagctaaatacagaagaagatggtatgtctggctagtgggagtgattataactaaaaactttgctccttttgtgctgtccatgcagtatgtcttcttcctttctatcactttacaatgaaaaattgcctcagagctcaataagaagtctagagcctttttccagggctaaggaaagagaaaaggaatgtcctatagaaggttgttaggatagaatttggtaaaagaacgttgcaaatattgtaacagaccataggagatttcatcagcaataggattcttctttggagaaaatacattgtccataagacttgtactctgctcattcaactcatgtgagcaagctcaactcactccacctgggttaggtaacagaagtggagaacttcatagttcgtgtctagaaaataatgtttaaagttctggagaatgagggtattgcagattaaaaggcgagttgacaaatgaaggagcagtgaaagatttttggaagaagtgaagaagtgaaattctgaaaaggtaaaagaaagaaccagtatgtcacaggggccaagtcagaggacagataataagaaacaaagttgtatctgagagtcatatattaggacaggtgtcagatatttattttggtggccagataaaagcaaaaggcctagaaacagtgtgttagcaaagtaagaagaaatggtccaaataggcaaggataaggaaatccaaaggttgtctttaaatatttctcaaaagagaaagccttgaaagaagcatacaatagagaaaaaataaattaccagtatttattattagaaaagatagaaagacagacaaatcagtggaggaattaaaacagagaaactggagtttataaaacagagcccaatccttgccttctctccctccactcaaatagaaaaggagaatggagaaagagaaagaaggtattaggctacagtttataagagagatgagaaaaaaatacatttgggaatagagggaaagggtcaaaaggggtcacatttggagaaatatctgaaaatgagaaggagcagaatttttggaaacattttttaaagtctggcaacgctaattaagctgttgatctaaggatttgcaaattgagaggtgcaattattttccaaatgatttgtgacactcttattaattagaatatatattttgtgaatattgaaatctgagccaaaactagttagctttattaatatcttagggaaagaagagagaaagaaagagggagggagagagagaaagaaagaaagaaagaaagaaagaaagaaaagaagaaagaaagaaagaaaaagacaggaagaggaagagagagacagaaagaataaaaaaacagcaattctgaggatgagaataaattaatggtaggtattacatatgcatatacatatatatatctgtacacatatatatgtaaatatgatttggaatacatcaggattgtgaacttccacttgggatagcataaaagcaaaatataccatacaatttttcattttactcacaaattttactcacaaattctcctaaagacatttcactaggtcagtacatttccgagaaagttttaaaaacgtttcttcttttatagtccctaattatcttacctggagtgttatcaaaatgtcatacaactggaaaatgcaattattattataaaaatatctctgccttctcttgtgtaatgaaatttatggcattaggagatgacatttcaagagattttagaggtcaatgtagagactccccccattcttcttaattgaacaaacatgcataaatctagggtttcaggtagagagcagatgggaatctacaggaaactgtcttccatagtgtatgaaaaccgtgtttgttgtgtggtgaagcaaaaggaaactatgaagcgcacagtcaatagattcagctagtgagtcccagcactcctttcaggccctcactaggattagcagcccagagtcatgccaaggccactggtgcagtacaaagacagttcagtgacaagttccatccataccatggaagagggttaaacttgtggctgtttttgccacagcatgaccagagacattctcaataaatggcactaggaatgatgagttttagaggggcctaaaatgttccaaacttgatactcaccactgtacctttaaagcacaaccacagatattggtaaaaatggaacagaattacctcaatacctctttaactcattctgtatgaattcattttgatgacagacattttttgtcaccatttggaataagaactacaacagcttatgattgaggtgaggaactgcagtcaaatggcttaggttcaaacacgagttctgacacaaatctaggtaattttgggcaatattttaaaatcttagtttattcaccaattaataggagtaaaaattacccctacttaatagaattattatgaagatttatataagtaaatcatataaagtgcttagcacagtgtgactggcccacatggaacatttaatacttggtctgcagtatatgaagaaaatggtgtacatgttaacttaaatggtttcattatttctcttcaggatttttaagatgtgggatcagaatatatgttactattttgagaattagaaataataagaaaaacagaatgtatacattaaaagtcatgcctaaatttccaaagagtagtttttttaatgccagagtttaaataaaatattattttccagagagtaacttttctaaaggtcctaaattctgaaaagagagaaaactactgttataaacaagtttattactaaaagatgcaattcattactatgatttattattattttgtacatgtaaaccttgataaataaacagcatctcaacccaagtttattactcattgcacagttcaaagcaactatgactctcaaaatagcaacagaaggtggggagggtcttttccctttgtttatatagtatttgctaaaaatgaactttactattttgtggctttatagggttacaccatttcattctaaagagaaacaaaaagtaaaccattggccatgtggctttcaaacagtatttcaaagagaatattactgaaatatttttgtgctgttacagtcttaatcaaacattattacaaagatcagatacggaaaaaatagaggagtctccccttaattgttccctttgaaataaattgttttaaattattacagaagttatagctgtatgtacatgcacatttgtatatttacaagtctcatgtacttaatctcaatattgcaaattagctaggtttactatagagttaactgcttttatctagcatttataatcttgtagtataacctattttcaaataactaaaatttaattgatgtcatcaatggtacacatgaaaatgatacaaatttataaactaataaaatgtaactcgtcattgatagtaaat

SEQ ID NO: 29290 - DNA, 1932 bp, Homo sapiens
  source 1..1932: mol_type = unassigned DNA
ggtaaatatattaaagaccaagatttgcagtaacatttatcatatcaaatctccaaatctagtggaggaatttaaacagaggacacagacagctcttgggagagtcttcatatttttattgtacttacaactacgattcaacaaaccagttcgctatgctgccacggtcatctacattgtacagacgattctctacacaggagtggtggtgtatgctcctgccctggcactcaatcaagtgactgggtttgatctctggggctctgtgtttgcaacaggaattgtttgcacattctactgtaccctgggaggattaaaagcagtggtgtggacagatgcatttcagatggttgtcatgattgtgggcttcttaacggttctcattcaaggatcaactcatgctgggggattccacaatgtattagagcaatcaacaaatggatctcgactacatatatttgactttgatgtagatcctctcaggcgacacactttttggactatcacagtgggaggaacttttacttggctcggaatctatggggtcaatcaatcaactattcagcgatgcatctcttgcaaaacagaaaagcatgctaagcttgccttgtattttaacttgctgggtctctggatcattctggtgtgtgctgtcttctctggcttaatcatgtactctcactttaaagactgtgacccttggacttctggcatcatctcagcaccagaccagctgatgccgtactttgtcatggagatatttgccacaatgccaggactgccaggactttttgtggcttgtgccttcagtggaactctgagcaccgtggcttccagcatcaatgccttggcaacagtgacctttgaggattttgtcaagagctgttttcctcatctctccgacaagctgagcacctggatcagtaaaggcttatgtaggtctcttatttggcgtgatgtgtacctctatggctgtggctgcatctgtcatgggaggtgttgtgcaggcttccctcagcattcacggcatgtgtggaggaccaatgctgggcttattctccctgggaatcgtgttcccttttgtgaattggaagggtgcactaggaggtcttcttactggaatcaccttgtcattttgggtggccattggggccttcatttaccctgcaccagcctctaagacatggcctttgcctctgtcaacagaccaatgtatcaaatcaaatgtgacagcaacagggcctccagtactatccagcagacctggaatagctgatacctggtactcgatctcctacctttactacagtgcagtgggctgcttaggatgcattgttgctggagtaatcatcagcctcataacaggtcgccaaagaggtgaggatattcaaccactgttaattagaccagtttgtaatttattttgcttttggtctaagaagtacaaaacactatgctggtgtggagttcagcatgacagtgggacagagcaggaaaaccttgagaatggcagtgcccggaaacagggggctgaatctgtcttacagaacggactcagaagagaaagcctggtacatgttccaggctatgatcctaaggacaaaagctacaacaatatggcatttgagactacccatttctaaggcaatacctgtatgaatgcacacacacacgtgcaatacacacacacacacacaaactccacatacttcttgcctacttgttagtagatatgtatagttgccattgctagaagacagggatgtctggtgcctatttctacttatttataactacatgcaaaatgactgtctctcgggatattctttgaaagactccaactttcacagagaaaaaccaacctgctccaaatgcccttgactacttccttcttgaataaattagggctggatttcattaccattcaagaaa

SEQ ID NO: 29291 - DNA, 2271 bp, Homo sapiens
  source 1..2271: mol_type = unassigned DNA
ggggcagatcctggggagaatggaggagcacacagaggcaggctcggcaccagagatgggggcccagaaggccctgattgacaatcctgctgacatcctagtcattgctgcatatttcctgctggtcattggcgttggcttgtggtccatgtgcagaaccaacagaggcactgtgggcggctacttcctggcaggacgcagcatggtgtggtggccggttggggcctctctcttcgccagcaacatcggcagtggccactttgtgggcctggcagggactggcgctgcaagtggcttggctgttgctggattcgagtggaatgcgctcttcgtggtgctgctactgggctggctgtttgcacccgtgtacctgacagcgggggtcatcacgatgccacagtacctgcgcaagcgcttcggcggccgccgcatccgcctctacctgtctgtgctctcccttttcctgtacatcttcaccaagatctcagtggacatgttctccggagctgtattcatccagcaggctctgggctggaacatctatgcctccgtcatcgcgcttctgggcatcaccatgatttacacggtgacaggagggctggccgcgctgatgtacacggacacggtacagaccttcgtcattctggggggcgcctgcatcctcatgggttacgccttccacgaggtgggcgggtattcgggtctcttcgacaaatacctgggagcagcgacttcgctgacggtgtccgaggatccagccgtgggaaacatctccagcttctgctatcgaccccggcccgactcctaccacctgctccggcaccccgtgaccggggatctgccgtggcccgcgctgctcctcggactcacaatcgtctcgggctggtactggtgcagcgaccaggtcatcgtgcagcgctgcctggccgggaagagcctgacccacatcaaggcgggctgcatcctgtgtgggtacctgaagctgacgcccatgtttctcatggtcatgccaggcatgatcagccgcattctgtacccagacgaggtggcgtgcgtggtgcctgaggtgtgcaggcgcgtgtgcggcacggaggtgggctgctccaacatcgcctacccgcggctcgtcgtgaagctcatgcccaacggtctgcgcggactcatgctggcggtcatgctggccgcgctcatgtcctcgctggcctccatcttcaacagcagcagcacgctcttcaccatggacatctacacgcgcctgcggccacgcgccggcgaccgcgagctgctgctggtgggacggctctgggtggtgttcatcgtggtagtgtcggtggcctggcttcccgtggtgcaggcggcacagggcgggcagctcttcgattacatccaggcagtctctagctacctggcaccgcccgtgtccgccgtcttcgtgctggcgctcttcgtgccgcgcgttaatgagcagggcgccttctggggactcatcgggggcctgctgatgggcctggcacgcctgattcccgagttctccttcggctcgggcagctgtgtgcagccctcggcgtgcccagctttcctctgcggcgtgcactacctctacttcgccattgtgctgttcttctgctctggcctcctcaccctcacggtctccctgtgcaccgcgcccatccccagaaagcacctccaccgcctggtcttcagtctccggcatagcaaggaggaacgggaggacctggatgctgatgagcagcaaggctcctcactccctgtacagaatgggtgcccagagagtgccatggagatgaatgagccccaggccccggcaccaagcctcttccgccagtgcctgctctggttttgtggaatgagcagaggtggggtgggcagtcctccgccccttacccaggaggaggcagcggcagcagccaggcggctggaggacatcagcgaggacccgagctgggcccgtgtggtcaacctcaatgccctgctcatgatggcagtggccgtgttcctctggggcttctatgcctaagaccaactgcgttggacaccataagccacagcctcacaggaagtgggggtgaggagcctgcggtgctccccagaaaaggggaaggggcagtggggtgagaaggtcctggctccccttctcccggccttcctctgcctggggcccactgcatctgattggcagtcacttcccatgagggcctggcccacccgctgcagttgccctaaggaaaaataaagctgcctttcccctgt

SEQ ID NO: 29292 - DNA, 1852 bp, Homo sapiens
  source 1..1852: mol_type = unassigned DNA
ggggcagatcctggggagaatggaggagcacacagaggcaggctcggcaccagagatgggggcccagaaggccctgattgacaatcctgctgacatcctagtcattgctgcatatttcctgctggtcattggcgttggcttgtggtccatgtgcagaaccaacagaggcactgtgggcggctacttcctggcaggacgcagcatggtgtggtggccggttggggcctctctcttcgccagcaacatcggcagtggccactttgtgggcctggcagggactggcgctgcaagtggcttggctgttgctggattcgagtggaatgcgctcttcgtggtgctgctactgggctggctgtttgcacccgtgtacctgacagcgggggtcatcacgatgccacagtacctgcgcaagcgcttcggcggccgccgcatccgcctctacctgtctgtgctctcccttttcctgtacatcttcaccaagatctcagtggacatgttctccggagctgtattcatccagcaggctctgggctggaacatctatgcctccgtcatcgcgcttctgggcatcaccatgatttacacggtgacaggagggctggccgcgctgatgtacacggacacggtacagaccttcgtcattctggggggcgcctgcatcctcatgggttacgccttccacgaggtgggcgggtattcgggtctcttcgacaaatacctgggagcagcgacttcgctgacggtgtccgaggatccagccgtgggaaacatctccagcttctgctatcgaccccggcccgactcctaccacctgctccggcaccccgtgaccggggatctgccgtggcccgcgctgctcctcggactcacaatcgtctcgggctggtactggtgcagcgaccaggtcatcgtgcagcgctgcctggccgggaagagcctgacccacatcaaggcgggctgcatcctgtgtgggtacctgaagctgacgcccatgtttctcatggtcatgccaggcatgatcagccgcattctgtacccagacgaggtggcgtgcgtggtgcctgaggtgtgcaggcgcgtgtgcggcacggaggtgggctgctccaacatcgcctacccgcggctcgtcgtgaagctcatgcccaacgggcgccttctggggactcatcgggggcctgctgatgggcctggcacgcctgattcccgagttctccttcggctcgggcagctgtgtgcagccctcggcgtgcccagctttcctctgcggcgtgcactacctctacttcgccattgtgctgttcttctgctctggcctcctcaccctcacggtctccctgtgcaccgcgcccatccccagaaagcacctccaccgcctggtcttcagtctccggcatagcaaggaggaacgggaggacctggatgctgatgagcagcaaggctcctcactccctgtacagaatgggtgcccagagagtgccatggagatgaatgagccccaggccccggcaccaagcctcttccgccagtgcctgctctggttttgtggaatgagcagaggtggggtgggcagtcctccgccccttacccaggaggaggcagcggcagcagccaggcggctggaggacatcagcgaggacccgagctgggcccgtgtggtcaacctcaatgccctgctcatgatggcagtggccgtgttcctctggggcttctatgcctaagaccaactgcgttggacaccataagccacagcctcacaggaagtgggggtgaggagcctgcggtgctccccagaaaaggggaaggggcagtggggtgagaaggtcctggctccccttctcccggccttcctctg

SEQ ID NO: 29293 - DNA, 11574 bp, Homo sapiens
  source 1..11574: mol_type = unassigned DNA
cggaccgtgctttcgccgcctgggagccgtccggcgcagcagtttctaggtccccactgtccccgccgtcccgccccttcgcgtcccgggaaccggctggcttccgagccgcactcgccgatcctccaggcatgccccgctacgagctggctttaatcctgaaagccatgcagcggggttggtacagtaggcttcactagacttagctgcaactcagaatttctcctccagcacctgagtaaatgctgatggtcttgtggagagtggattaagagtacgagctaagttctcaatcccaattaagaagcggaaaatttaaactgtcttcttcaaagtttatcacaaccaccaccatcaagacagcaaaccaaaggacaaagactttgaccctgctgtgttgctctgtgtagtccagttcacgtatggtttacagacttggctggggttactaaaaataaataaaaagttggacacttctgtcattggagcgctattattcacaagttaccagaatgagagctgtactggacacagcagacattgccatagtggccctgtattttatcctggtcatgtgcattggtttttttgccatgtggaaatctaatagaagcaccgtgagtggatacttcctggcggggcgctctatgacctgggtaacaattggtgcctctctgtttgtgagcaatattgggagtgagcacttcattgggctggcaggatctggagctgcaagtggatttgcagtgggcgcatgggaattcaatgccttactgcttttacaacttctgggatgggttttcatcccaatttacatccggtcaggggtatataccatgcctgaatacttgtccaagcgatttggtggccataggattcaggtctattttgcagccttgtctctgattctctatattttcaccaagctctcggtggatctgtattcgggtgccctttttatccaggagtctttgggttggaatctttatgtgtctgtcatcctgctcattggcatgactgctttgctgactgtcaccggaggccttgttgcagtgatctacacagacactctgcaggctctgctcatgatcattggggcacttacacttatgattattagcataatggagattggcgggtttgaggaagttaagagaaggtacatgttggcctcacccgatgtcacttccatcttattgacatacaacctttccaacacaaattcttgtaatgtctcccctaagaaagaagccctgaaaatgctgcggaatccaacagatgaagatgttccttggcctggattcattcttgggcagaccccagcttcagtatggtactggtgtgctgaccaagtcatcgtgcagagggtccttgcagccaaaaacattgctcatgccaaaggctctactcttatggctggcttcttaaagctcctgccaatgtttatcatagttgtcccaggaatgatttccaggatactgtttactgatgatatagcttgcatcaacccagagcactgcatgctggtgtgtggaagcagagctggttgctccaatattgcttacccacgcctggtgatgaagctggttcctgtgggccttcggggtttaatgatggcagtgatgattgcagctctgatgagtgacttagactctatctttaacagtgccagtaccatattcaccctcgatgtgtacaaacttatccgcaagagcgcaagctcccgggagttaatgattgtggggaggatatttgtggcatttatggtggtgatcagcatagcatgggtgccaatcatcgtggagatgcaaggaggccagatgtacctttacattcaggaggtagcagattacctgacacccccagtggcagccttgttcctgctggcaattttctggaagcgctgcaatgaacaaggggctttctatggtggaatggctggctttgttcttggagcagtccgtttgatactggcctttgcctaccgtgccccagaatgtgaccaacctgataataggccgggcttcatcaaagacatccattatatgtatgtggccacaggattgttttgggtcacgggactcattactgtaattgtgagccttctcacaccacctcccacaaaggaacagattcgaaccaccaccttttggtctaagaagaacctggtggtgaaggagaactgctccccaaaagaggaaccataccaaatgcaagaaaagagcattctgagatgcagtgagaataatgagaccatcaaccacatcattcccaacgggaaatctgaagacagcattaagggccttcagcctgaagatgttaatctgttggtaacctgcagagaggagggcaacccagtggcatccttaggtcattcagaggcagaaacaccagttgacgcttactccaatgggcaagcagctctcatgggtgagaaagagagaaagaaagaaacggatgatggaggtcggtactggaagttcatagactggttttgtggctttaaaagtaagagcctcagcaagaggagtctcagagacctgatggaagaggaggctgtttgtttacagatgctagaagagactcggcaagttaaagtaatactaaatattggactttttgctgtgtgttcacttggaattttcatgtttgtttatttctccttatgaacttaaggatatggtgagacactaacttaagacaatactgactggtctttggggaaaaaagttatgtaactgtgcatctctcaggcattgtttacgctgtaggttttagccaaattttacttagcagaaaatcatctaattacaagactttattttcccagagatggattaaagtaaatcttcaacttaagtgaagccaaacctaacagactgaattgtgcaaatgtggttttaaattttgcataccaaagtaagaagagaccaattattctcacagagcacttagagcagaatatatgttaagttaccatgaattaaggtatactgtctgcactgccaagtcttggcagaccttaccctgaagtagaagatttgctcatttctaaagttttttttctgtctctgtaatccctcctaccattaagaaaaacttatttcttagacattgtacaatcagttatgtactgaaaatcgaatgtgcttgtgtgatacttgtttcaggacaagttcatttgccaggttcattttgttagcatgagcctacggattctgatttcccaaagaaagaatgttttcctgtaggtatttttgtaccaccagtatatggaatgttagggaaaaactttgttccagttcctttttttttttctttctactttcaagtttaagtgaaccatactgaaatgaccaacaagtctgcctgtaaagttacatgtcatgattgtgttgttaaatgattatgggggagaaaatgaagtaaatgttgctgatgatccccatatttattgatcatattaaggttgtttatatagtttggaaatgaccagccccctaagcagtgtttgattaacttatgctaatcagatgattactcatatattctgctaattttctagctttattcttgttatttggaaaaattattagccaaatgccttcctaggtggatccagttggaagatatgtccagaaacctgaagaaaaattgacgctgcctttgtgtgctggattgctctacttgattagatcatgatatatcaaggttgaatttttagagggaaaatttaattctgatatcttattgcatccttgataagtttttccctgattttttttttcctcaaaagactttccatctgtacacagcctctacatttttgttgtagtgacttagagcataaggatgtttcagtgcaaactggccgtcggtaacagaaaactcagtgcatactttgctgttgttaggttgtcaatatagtctttctgtaggatggatagcatgtttgagaggtgccaaacaagaacttttggggttagtagtgtgtcttgtggagggtattacaggactgtgtaattataggactctaacttgacatggcttggcacccacttgcagctagtgggtacagggtacaaaagatgttagagaaaagctctacagattacgtacttctgtgtcttcgtatgctcaacactgtcctttgtcctccatgaaagatgaaggaagcaaattatgtatgtactttctttgaccttctttaatctctgatactttttagattgcatgattttactaggcttgtatttagggaaattactttcataaatacttttgtagattttgaatcaaaactcagtctttttaatttttttgtagtctataaactagtttcattatgatggacttgattagtccaaagttaattttagaaattgtcaggtagcatagtgtcttcccatgatcaggaggctttctgaaggactgagtctgtaaatgaaaaaataatttatgtatgaatagcatgtatttctgaagagcttagagtgccttgtagaatttttttctcaattttattcttgaggtttataatttgggggccaaatagatagagctcatcattttcttgtttggaagttgaggctgcgacatgtccaaggttatgaagtctcttttgggaagaacagaaaccaggtctccaaatctggactcatggtttgttcagatgtgtctggacaaatggttgtcaatgttttgtcctgttttttcaaaggaactgttcttcctttgggacaaccttttggtgtttgggaaagtaataagatcttggatttttcaaattaacattaagttgtaagaactaaaattttctttgaaccacattactgtgtaattcactgataattgacatattggctgggcagcctatctcttccatatccagcgtaaatgaataggaggtgtttgtgattttttttttctccctttatttaacattgagtcctagtagtttggagaattagggtccctctaccttctttctgctcttgtcttagtaagatacataaggtacatcatcttgtgtctgtgtgtatatagcagtaggtcaagtttagagtactaaagtctgtaaataaggaatgactattagcatattcattagaattgtttattcttgccagtataaacatcattttatttagactaaagtccctgaagcttgtctttcttattgcttcccagtaatagataatgtgctcgagtaagtttgtgaattgctgattgcaacttaattcagggaccagtcttcaatctatatttcattagaatgattgttcctggaatgatcatacatggactgtcttaagctagcaaaatgttcatactttacactgactaaatgggtcctaaatgatgacattggtctttagacattaacatgtgtatatttttatattagctcaagctaaggttcagaattgaagcttgatattgactagaatagctaaaagtcaaaatgaggtgaggacactggtcttggaaggtagagaaaaataaatgtcttaccaggtgttaatggtatccccagttcttagacttttgtcttctcaggcaattttcatctcaagatctgatgagaagggcatattacattggtatgcaggatgattattgcatattttgtgggacctctaatttccctggtcatctttcagaatattctgttctgccacccccagagagtaaacacttgagccgatttcttcttccccagctattctttcctgggggtaattatgctttgtctttagattagagaagcatcaagcaatagcaatggtgctgtgtccttcggcctaaattcaatagatctcatctcctagggcttccttttcacttggctcaaaggatccattgtattttggcacaaagagcctggccagggtcatgtagccatagctcttagggatgatacctcaagaaattagctgggacccatcactctgtgaaacttcacattttaagaactgagttgagggggttgttatgcacttctgtaacttgaggctaagcaaggggttaactcttgtgagagccaatagagtgtgtctgtattcgcagtccatggctcattttctttatagtaggcatatggatcttcccctctgactttgaatatcatttggtgtggcctgtgggttattttcattctttaccaccaaataaagcggcttattagctactcagttacttgctactcaaaggttaggtcttccctgttcctgcttggcagtgttaaagcttacagggttaacttatgatgattctcctggctcattttcatcagaggcatgatgactggaaagggatcacatgggtcgttggtggtgacacctcactgtttcctaggtttggatagagagatgtatacaagacctttcctgttaaattacgtgactacagagacttgccaggacaaaattttcctaagaaatcagaaaaatgattaagtgagataagtacctgggtgacacagatattagcccgttggtaaaagacaacaaatattagcttaaaatctgcatatgtagaatcattttcattagatttagagcttgaagcaccttggctctcagctactttaaactcctccccatataaatcagggcaccaataaataagtttcagctttttaaaccctggtttgatgttaagcattataaagtacgaagtttgttaccacagtagagataatttagtagaaaaatgctttgaggcttcagtatttgtaagattttgcattagccagatgctaggttgttgaaggcatttcagtgttgataatagcctgagcagacttctttacaaatgggatctgtttctatatgtgtatatgcccacttaccattcagagagactggtctttctctttgtcttccttcacattgctgtgtcagttctacacctagtcttttcagcacttagcaaattcaaattttgatttttttgtcagcttagttcactttaaggcatattggcatggtgtgtgaaagtgatgttttgccccagtattgaggacttttagatccaaataatgactcattaaatataattatgttttaagtatactgaatttctgttagcttaaaatgttaattctcaggaatgattttctcacactttgtgttggctaataataaaagcactgttttattctcaaaactcctttttcaaaaattagggagagagcagtagtgatcatttatgtgagcccctttgaaatgatggtgtcagagtgcagagaaacaatggagttttgatgccaaaaaggtttttttgcagtaaaagtaaaaatttggaattagttggcatatagaggaacccttttgtactggaacgtatgaggctggattgtgaaaaggtaatctttcgattgctagacttggttaacttagggctgcaaatctttttcttctgtcaaggtcacttaatatggaatgtttttgtcagactgtcctttgttggaatactttagctgttcagctactttgactcctaggagagaatttagttaaggttcaaagtaattaactggctttgccagtggtgagtcccacaccattattcacttagtagtcatataaatgtttttatttaaacttctctctcttcaatgctgagaataaggctttaaattactgattcacctttaaaggaatgttgtgagaattgatgtaatttctgtttctgtttccatctaaacttctttataaaaagagggattagtttttttgttttggggtaagcacctaatttatccagtaaccaacaaccctaaccattggcatatatagtctttcactcagaaataaacaaaaactgtttggtatatctgtatcattgctaatcttgtgcactttactttttgggcagtaccatacatagtctgaggctattgacttaaaccaataactgtactttatgtaatgactcttaaatttggttacctgggttcacagcttgcttgaagagaaaggatgctagaataaagtaagcagctgaagagcgagcaaatcaagacaaaacacagtggtctcagatttttcgtagtgtgggaacagtggttttgctctataccactgaaaagcactataacataattgttgtccatgatactgaagcttttcccctcacttctaggttgtttacattcagagctctatcaataagaggaatacatattacagtgaattcgacaaccgcacaagttggcagtaggtatccccaacctaatttatcttggtaaattcaccctgtttcctagtgctgctggataaaagagtgtttactttttattgctcttagacagagtagtctagataagttttcaatttatcaacatagcctagacttctgtaagtggaatgttcattagtaactcatctttttgttgttataattggaaacagaaacgaggcttattgctattgcagaaatcccaaactggcaaaggccagtatatatggtattccataatataaccagcttttgaaatttatgtgtttggattagtgccttctggttaccagtattgactctgctagtttgcacctttccgttcttaacagaaaatttgtatttgttattcctcttaaattttgtcgtaactagtgaaggaagtaaaaaaaaaaaaaaaacatgcattacattgacatactttatgtgcagcctttatttaggttcagtgaaaccaggtagttctgtatttgtgttgtagcctaaatgttgtttcttttatatccattaaaaacttaaagttacttatgttctgtgatcttaattttgttgtgtttccattgtaggttgataggtatatcgagaacaggtacgtgacaacagtttatattccatgatagaaagctaaagtccatagaaagcacaaaatcgtgttcacacattagtgtacccacacatagaaagcacaagactaatagtattctctgtatcccacaagtgccagtcataaaggccaccaggtatttgtctcagagttgctatgagcactacagtattgataagcccaagacaatgcggtatctaaactggtcctaatggtaagggacccaaaggaataatctcaataagtttgtaccacattgatggagggagagaatataaatgtcaagaatgccaaaattatatttgggggttactagctaaaatggggtttgagggctttttactgcaacttgaaactggagaaatagggacagatgtctaggtttttggtgggtggaacaggtgacatatttctgttttaagctgtagtgtgattggggttttttgtaaaaaatcttaaatcttttaggaaatattacctcttaacagtgcccccccaaacatgcagaaagtcatactttaacagggcaaatactacttgtctttgattttttttgtgtacgtttgtatgtgagagatgaagttacctttatttttttcctatacttgactgtgcttcattttaataaaggataatttgatctgagtgttctgagcatcagactaattctgaagcatatttgctagaggagctactttgcttttcacaatggggtggagaggattctttcacttgtcccattaaccctcttctagtctagatgagatgaaatctgttaatgtgtgtgtagaagaaaacgtatgttcttctactcagcattgcccttttccacctcctcacttcacctccgagtagcttgtttatcaagaatgaatgaatgtctttgtcttaaattttgcccatgtgttaaaagatgtaattctcagaatgggagagaaatgactacctttgttcctactcttttatataattatccttttagggaaagacttggtcaactctaatatatctagaaggaagactatatctggtgtagactaatatgagatgttttagaagagttaacctgaacactttgagggagagattattcttgccagcaaaaagctagccaggaatgagcctaccacattatttgagaatatcaaacctcaggcctggggggatgaggggaagaagattaccagaagtgcaggaaagagaagtttgaggaacacccttggcttagcaacatgtgataatgcaaagctgttataacctgttaatcctacgtactatgtgttctgtacctttacatgtttttaaatttaagatagtttgtaagaactgtacaaaaaaatgcttctggagatttctttggcagaaatgcctttcatctataatttcatggagaactgctttaattagcctaggtgaaaagtagtcctagcagtgtaaatatgtataattagagttttctaatttcactgtgagatctctaacttttgagtggcaaacagatcaagtcttttgctcatagacttttctgtggggttattaaaatgcaaaagctttattttttttaataatgccatactccattagtgtcagatgatggtatggaatttgttcccttgctttcccccactgttactgcttcagtttatagattgccagcagagttcagaaatagagcagggatttacccgttctttgcttggacatcccattttcttttgtccagacccatgttggcaatcatgtatgaactgtgttatacttctcagtgctttcttttttctttttgataagatggatatcaaaaatagttgctgtgcaaaagttagtagtcttcttcaagaagaaaaccaattctttttctaataatatcctgtgaaattgcttcattcattcatttatttttaagccaaatgtcagcagagtgctgctgcttttatctagtaattttgatatgtaagtattaatgcatttttaaaagatgtctacattgaaacatgttcttcccagtgtcctgcttatgatgctttgttcagattttttgtaagagaccagttagtacactgggggtgtatattgtgtacatgtgtcattttagttaggcattgtaggccaaatgtgattataaatgaagttgatgaacattaattttgttattagtgagttttttgaattgtaaatggatttccagtttaccttctgttgtctacagcttttttaattttaaggtttgactaattgtatccatctcattgtacagtgttttagttgcaagcagaaagtagaatttggtataaagcaggttatttctatattgaaaggagtacagttgaaattgtagatttaagattgttaaaatcatgacaattctaacttgtctattctaacctattgtgtacaatctgattttttaaaattgtaaacatgtatgatcttggtttcatgtgtttttgaaagtgttattgtttaaaaaatgaaaaaagcatatctgctaaagagctgtcagttttcattactgactctgtaaaatacactgttctttgtgtactgtgtgttattttgccagctgctgcattagccttcaaaagtatttggaaacttaagatgaactacatttcttgcaaagtacattcctttctgtggtattttgtcctgtaactgaagtatagtaattattttatggaaatgttagcaattctgtaccaactttgaataaaatgaaaaattta

SEQ ID NO: 29294 - DNA, 1137 bp, Homo sapiens
  source 1..1137: mol_type = unassigned DNA
gtaggtcccggcaaccgcaggctcgcggcgggcgctgggcgcgggatccgactctagtcgtaatggaggcgggcggctttctggactcgctcatttacggagcatgcgtggtcttcacccttggcatgttctccgccggcctctcggacctcaggcacatgcgaatgacccggagtgtggacaacgtccagttcctgccctttctcaccacggaagtcaacaacctgggctggctgagttatggggctttgaagggagacgggatcctcatcgtcgtcaacacagtgggtgctgcgcttcagaccctgtatatcttggcatatctgcattactgccctcggaaggctaaggtgattcaaactaaatcaacccaatgtctctcctacccactcaccattgctacccttctcacctctgcctcctggtgcctctatgggtttcgactcagagatccctatatcatggtgtccaactttccaggaatcgtcaccagctttatccgcttctggcttttctggaagtacccccaggagcaagacaggaactactggctcctgcaaacctgaggctgctcatctgaccactgggcaccttagtgccaacctgaaccaaagagacctccttgtttcagctgggcctgctgtccagcttcccaggtgcagtgggttgtgggaacaagagatgactttgaggataaaaggaccaaagaaaaagctttacttagatgattgattggggcctaggagatgaaatcactttttattttttagagatttttttttttaattttggaggttggggtgcaatctttagaatatgccttaaaaggccgggcgcggtggctcacgcctgtaatcccagcactttgggaggccaaggtgggcggatcgcctgaggtcaggagttcaagaccaacctgactaacatggtgaaaccccatctctactaaaaatacaaaattagccaggcatgatggcacatgcctgtaatcccagatacttgggaggctgaggcaggagaattgcttgaacccaggaggtggaggttgcagtgagctgagatcgtgccattgtgatatgaatatgccttatatgctgatatgaatatgccttaaaataaagtgttccccacccctgc

SEQ ID NO: 29295 - DNA, 1166 bp, Homo sapiens
  source 1..1166: mol_type = unassigned DNA
cggcaaccgcaggctcgcggcgggcgctgggcgcgggatccgactctagtcgtaatggaggcgggcggctttctggactcgctcatttacggagcatgcgtggtcttcacccttggcatgttctccgccggcctctcggacctcaggcacatgcgaatgacccggagtgtggacaacgtccagttcctgccctttctcaccacggaagtcaacgtgttgtgctcctacagactgcaaccctgctaggggtccttctcctgggttatggctacttttggctcctggtacccaaccctgaggcccggcttcagcagttgggcctcttctgcagtgtcttcaccatcagcatgtacctctcaccactggctgacttggctaaggtgattcaaactaaatcaacccaatgtctctcctacccactcaccattgctacccttctcacctctgcctcctggtgcctctatgggtttcgactcagagatccctatatcatggtgtccaactttccaggaatcgtcaccagctttatccgcttctggcttttctggaagtacccccaggagcaagacaggaactactggctcctgcaaacctgaggctgctcatctgaccactgggcaccttagtgccaacctgaaccaaagagacctccttgtttcagctgggcctgctgtccagcttcccaggtgcagtgggttgtgggaacaagagatgactttgaggataaaaggaccaaagaaaaagctttacttagatgattgattggggcctaggagatgaaatcactttttattttttagagatttttttttttaattttggaggttggggtgcaatctttagaatatgccttaaaaggccgggcgcggtggctcacgcctgtaatcccagcactttgggaggccaaggtgggcggatcgcctgaggtcaggagttcaagaccaacctgactaacatggtgaaaccccatctctactaaaaatacaaaattagccaggcatgatggcacatgcctgtaatcccagatacttgggaggctgaggcaggagaattgcttgaacccaggaggtggaggttgcagtgagctgagatcgtgccattgtgatatgaatatgccttatatgctgatatgaatatgccttaaaataaagtgttccccacccctg

SEQ ID NO: 29296 - DNA, 1300 bp, Homo sapiens
  source 1..1300: mol_type = unassigned DNA
gtaggtcccggcaaccgcaggctcgcggcgggcgctgggcgcgggatccgactctagtcgtaatggaggcgggcggctttctggactcgctcatttacggagcatgcgtggtcttcacccttggcatgttctccgccggcctctcggacctcaggcacatgcgaatgacccggagtgtggacaacgtccagttcctgccctttctcaccacggaagtcaacaacctgggctggctgagttatggggctttgaagggagacgggatcctcatcgtcgtcaacacagtgggtgctgcgcttcagaccctgtatatcttggcatatctgcattactgccctcggaagcgtgttgtgctcctacagactgcaaccctgctaggggtccttctcctgggttatggctacttttggctcctggtacccaaccctgaggcccggcttcagcagttgggcctcttctgcagtgtcttcaccatcagcatgtacctctcaccactggctgacttggctaaggtgattcaaactaaatcaacccaatgtctctcctacccactcaccattgctacccttctcacctctgcctcctggtgcctctatgggtttcgactcagagatccctatatcatggtgtccaactttccaggaatcgtcaccagctttatccgcttctggcttttctggaagtacccccaggagcaagacaggaactactggctcctgcaaacctgaggctgctcatctgaccactgggcaccttagtgccaacctgaaccaaagagacctccttgtttcagctgggcctgctgtccagcttcccaggtgcagtgggttgtgggaacaagagatgactttgaggataaaaggaccaaagaaaaagctttacttagatgattgattggggcctaggagatgaaatcactttttattttttagagatttttttttttaattttggaggttggggtgcaatctttagaatatgccttaaaaggccgggcgcggtggctcacgcctgtaatcccagcactttgggaggccaaggtgggcggatcgcctgaggtcaggagttcaagaccaacctgactaacatggtgaaaccccatctctactaaaaatacaaaattagccaggcatgatggcacatgcctgtaatcccagatacttgggaggctgaggcaggagaattgcttgaacccaggaggtggaggttgcagtgagctgagatcgtgccattgtgatatgaatatgccttatatgctgatatgaatatgccttaaaataaagtgttccccacccctgcc

SEQ ID NO: 29297 - DNA, 886 bp, Homo sapiens
  source 1..886: mol_type = unassigned DNA
cgagagggagggcaaaagaggaaggcttggtgattcctggtaatgtgttattttgagaaaaagcttcggcagcacactccagaaaaaaacttcccaaaccctgggcaactgaggttctgatgtggagctctggatggaaagcgtgctgaagtcttgttaaactagcaagcttttgtttggaggtccaccgccgaaggcgcacaggcctgtgggaacacgagcgttgagactgggggcgtctagatgatccaaggggtaggcagagtgtgagcagcggcaggtatcggggacacacccgcggagccctaggaaggggactgaccgggacatggaagagctcggacctcaggcacatgcgaatgacccggagtgtggacaacgtccagttcctgccctttctcaccacggaagtcaacgtgttgtgctcctacagactgcaaccctgctaggggtccttctcctgggttatggctacttttggctcctggtacccaaccctgaggcccggcttcagcagttgggcctcttctgcagtgtcttcaccatcagcatgtacctctcaccactggctgacttggctaaggtgattcaaactaaatcaacccaatgtctctcctacccactcaccattgctacccttctcacctctgcctcctggtgcctctatgggtttcgactcagagatccctatatcatggtgtccaactttccaggaatcgtcaccagctttatccgcttctggcttttctggaagtacccccaggagcaagacaggaactactggctcctgcaaacctgaggctgctcatctgaccactgggcaccttagtgccaacctgaaccaaagagacctccttgtttcagctgggcctgctgtccagcttcc

SEQ ID NO: 29298 - DNA, 4521 bp, Homo sapiens
  source 1..4521: mol_type = unassigned DNA
taggaacaggggagagtgcacctgctaccagtcaagctcagccagactgcaagaggaggcgaggcggagccagccgagggagtgaaccatggacaagttgaaatgcccgagtttcttcaagtgcagggagaaggagaaagtgtcggcttcatcagagaatttccatgttggtgaaaatgatgagaatcaggaccgtggtaactggtccaaaaaatcggattatcttctatctatgattggatacgcagtgggattaggaaatgtgtggagatttccatatctgacctacagcaatggtggaggcgccttcttgataccttatgcaattatgttagcattggctggtttacctttgttctttctggagtgttcactgggacaatttgctagcttaggtccagtttcagtttggaggattcttccattgtttcaaggtgtgggaattacaatggtcctgatctccatttttgtgacaatctattacaatgtcataattgcctatagtctttactacatgtttgcttcttttcaaagtgaactaccatggaaaaattgttcttcgtggtcagataaaaactgtagcagatcaccaatagtaactcactgtaatgtgagtacagtgaataaaggaatacaagagatcatccaaatgaataaaagctgggtagacatcaacaattttacctgcatcaacggcagtgaaatttatcagccagggcagcttcccagtgaacaatattggaataaagtggcgctccaacggtcaagtggaatgaatgagactggagtaattgtttggtatttagcactttgtcttcttctggcttggctcatagttggagcagcactatttaaaggaatcaaatcgtctggcaaggtggtatattttacagctcttttcccctatgtggtcctactcatcctgttagtacgaggtgcaactctggagggtgcttcaaaaggcatttcatactatattggagcccagtcaaattttacaaaacttaaggaagctgaggtatggaaagatgctgccactcagatattttactccctttcagtggcttggggtggcttagttgctctatcatcttacaataagttcaaaaacaactgcttctctgatgccattgtggtttgtttgacaaactgtctcactagcgtgtttgctggatttgctattttttctatattgggacacatggcccatatatctggaaaggaagtttctcaagttgtaaaatcaggttttgatttggcattcattgcctatccagaggctctagcccaactcccaggtggtccattttggtccatattattttttttcatgcttttaactttgggtctcgattctcagtttgcttcgattgaaacgatcacaacaacaattcaagatttatttcccaaagtgatgaagaaaatgagggttcccataactttgggctgctgcttggttttgtttctccttggtctcgtctgtgtgactcaggctggaatttactgggttcatctgattgaccacttctgtgctggatggggcattttaattgcagctatactggagctagttggaatcatctggatttatggagggaacagattcattgaggatacagaaatgatgattggagcaaagaggtggatattctggctatggtggagagcttgctggtttgtaattacgcctatccttttgattgcaatatttatctggtcattggtgcaatttcatagacctaattatggcgcaattccataccctgactggggagttgctttaggctggtgtatgattgttttctgcattatttggattccaattatggctatcataaaaataattcaggctaaaggaaacatctttcaacgccttataagttgctgcagaccagcttctaactggggtccatacctggaacaacatcgtggggaaagatataaagacatggtagatcctaaaaaagaggctgaccatgaaatacctactgttagtggcagcagaaaaccggaatgagatctcattgaaaaaaatatatgattgtataatgtgattttttttagaatagggggaaccttatttatttgtgtgttaactgaataggaaaatgtacatactatgttcatgatagtgtgatttttttcacatttaagcaggaatgcaatataaaaatgtgaatctcttaattctcagccatgtgcttattatatttctttttagattgtctatctgtataacacacacacacacacctaagagtctctatttcacaattatatttttgtaaatagtatatgcatttttaatacattggaggctttattttgaactaatttcttagagaatagttatattttctattacacaagtttaaaaatattattaacttgtattttcttaatatacaatctatcttttccacaaatatgagtgggaaataaatcagcacatttgaaagaaagtgttaaaactgaaggcctcacttaattagaaacgtgataaatatatggacaaatggactatacatactataagaggactgtagtttaatactttttacccaaatatgtttaaaaacttcgtgcatttgttacagctcatgttttctatatgaacttagtcattaatgttctttataaaaagtgaaataagatggaaaaataaggatcctacagccagtaagtgataaatctagaaaattgagttttgagtacctcttttcccatatacaatcttccttccttaggtaatttggaagaaaactatgacccatttaatttctattgtgtttcacaaaattaagtgttgttcattatactctctgaaatataggtttaatttcaaatagaatatggacttaaatgttaatgagaaaatggctttaatcaattctagcattttattactgtaatacagggctgatagagtgattttgtcttatatgagtaagttactacttacaggtgataacttgcatactattggaagataaacttgtcaaacttgtcaagaatgagaaaagccaaattagaaaatcctatgtcctagtttccttaccaaggataattaaatatatcactaagagctttatatattgattatatattgttgacaactggtttaagcatcatagcctatgatgataaacactgcctatatatgtaaatagcttttcatcaattcttaaatttcttaacctaggcttcagggagcatatgaaaccaaaattatatggaacattttctgtgtgtacatgtacatgcatttttctagggagagagtccgtaggtttatcagaatatcaaggaaaactgtgacccaaagaagtttaagaatcacatacagtgctgctggctttttgtgcttggcaaatgagtgacaatagaagaaataatttttcttacacattttaaaacgttttctcttccttgtgattgaagatgaaaggagtaagaaattaaggcatttgtttaatttatactggtaacttatttaggggggaggggacatgaaggtaggtaaataggtaggcctctaattgaaccacctctctaagttatgtacgtatatataagctgaaattgtgtttgacattctgagggttttctttttcttttttctttttttttttttttggtggggggctgggggtcagagtcttgttctgttgcctgggctggagtgcagtggcatgatctcagctcactgcaacctctgccttctggattcaagtgattctcctgcctcagcctcttgagtagctgggactacaggtgcccgccaccacaccagctaatttttgtatttttagtagaggcgaagtttccccatgttggccaggctggtcttgaactcccgacctcaagtgatctgtctacctcggcctcctaaagtgctgagattacaggtgtgagccaccgtgcccggcccattctaagggttttctttgaagacaggtcaaatgctgttagtaagtttcaggagattgttaattcctcagttataccagattttataaaatatttgagaatagatggctaacaagaggttagaaatacttttccttaattttaatccacagtatgttacatgcattctaccactacattttggtgctatttaaggtgtgcaattttctataggtgacttttgcaattcagggaagatttgggcatattaaatgaaagaatatctaattgggggaggtgtgaagggaaagaaattcttttcaaaagctgaccacaaagagtagttaaaagtttttgtcactatcttcacaagtgtgtaaagcacagatttcaacagagtgcttggcatattgtagggtgctcaatggtggtttttattattattactcagattccacagtggcaagaaacatcattctacataatggaaaacatttacatcaaatcccacttactttaatgcgaacttggagataatttatggtattgtattgtaaaccattaatgaaaactttttcacagttgagtgaaattaaaatcactatatctcaa

SEQ ID NO: 29299 - DNA, 3160 bp, Homo sapiens
  source 1..3160: mol_type = unassigned DNA
aggttgtgtgctccttatgagaatctaactaacgcctgatgacctgaggtggaacggtttcatcttgaaactacccccaccccaaaatctgtggaaaaattgtcttccatgcgacaggtcactggtgctgaaaaggttggggaccgctgttctgcaggaaacgagagacagagggaatgggagtgcagtggtggagccacacccaaggagaggtggctgtggggctgggcctgggagactcctaccttaccccctgtccctgcccaggcgttggctatgctgtcatcctgatcgccctgtacgttggcttctactacaacgtcatcatcgcctggtcactctactacctcttctcctccttcaccctcaacctgccctggaccgactgtggccacacctggaacagccccaactgtaccgaccccaagctcctcaatggctccgtgcttggcaaccacaccaagtactccaagtacaagttcacgccggcagccgagttttatgagcgtggtgtcctgcaccttcacgagagcagcgggattcatgacatcggcctgccccagtggcagctcttgctctgtctgatggtcgtcgtcatcgtcttgtattttagcctctggaaaggggtgaagacatcaggaaaggtggtgtggatcacagccacgctgccttacttcgtgctgttcgtgctcctggtccatggcgtcacgctgcccggagcctccaatggcatcaatgcctacctgcacatcgacttctaccgcttgaaagaggccacggtatggattgatgccgcaactcagatatttttttccttgggggctggatttggagtattgattgcatttgccagttacaacaaatttgacaacaactgttacagggatgccctgctgaccagcagcatcaactgtatcaccagcttcgtctctgggttcgccatcttctccatccttggttacatggcccatgaacacaaggtcaacattgaggatgtggccacagaaggagctggcctagtgttcatcctgtatccagaggccatttctaccctgtctggatctacattctgggctgttgtgtttttcgtcatgctcctggcgctgggccttgacagctcaatgggaggcatggaggctgtcatcacgggcctggcagatgacttccaggtcctgaagcgacaccggaaactcttcacatttggcgtcaccttcagcactttccttctcgccctgttctgcataaccaagggtggaatttacgtcttgaccctcctggacacctttgctgcgggcacctccatcctttttgctgtcctcatggaagccatcggagtttcctggttttatggagtggacaggttcagcaacgacatccagcagatgatggggttcaggccgggtctatactggagactgtgctggaagttcgtcagtcctgccttcctcctgttcgtggttgtggtcagcatcatcaacttcaagccactcacctacgacgactacatcttcccgccctgggccaactgggtggggtggggcatcgccctgtcctccatggtcctggtgcccatctacgtcatctataagttcctcagcacgcagggctctctttgggagagactggcctatggcatcacgccagagaacgagcaccacctggtggctcagagggacatcagacagttccagttgcaacactggctggccatctgagcctgcctggaggagaaggaggaacccccatgccaatgtccaggtcacaggcatccgctgcgctcccacctcggacaccatcttgggattcctcccctggaagttgtcctttctgatcctctcttcttttcccatttacaaatgatttcgtgactgtagtttttgttcaccttctgtgcatctggcctgggggctgttagctcagaggagaggagcaaacaggaaaatgacttctgttctgtccccgctgttttgggggaagtctctcccactttgggatcctgctgaagctaggttcatgaggtcggaaatccccaccacatttgcctagactttgggcacaggagttcttagtccaccaaatcagagagaggatgggcttttgatcagatacccctcccaaaaaaaaaaaaaactaaaactaaagcaaaaatcaaacaaaatctggctgagtttagtggggtggttggggaaggtacatagaccctcctcttgcccaccctagacagccctctcatgtctgaacctcagcctgggagttagatttatttgtctctaaaatgaagtcagtggatagatgctttgagggattttgagtagaaacattcatagttaattttcactctggccaatctgagtttgatgtgtgtgttctggaacattcctccagcttttggtggtcagatggcccagagatatgggggacaggaggaagagggtaaatgaaccacagtgagcaggttctaggaggtacctgcatcagacaagctggtggaggccacgtggcaagccacatctactgaggcctcatgctgctcttgctctgtaagacacggagcccagaaacccatctgcacttcctgagacctgcctggggaaacgggggcagggaccaagtgaggcctcatgtgtgtcttcaccgtgctgtcctcacaaggccaggtgggtgcccaaagggagcctgacaggctgttgtgttaatttattgttcttgcacacctgcacagcctccctctggggatcccacctggagtggaccaggggtcttgagaaatggagagttggctgcaaaaactctcatgcactagatgtggcaccttggagggcagggtgagacaagcagcccagaaatactctctcaagtggaggggagaattttgagagtggatggaacagtttggtggtttcagagaatttctaggtttctacttggatctacttctgatacaaacttgcacttggtgccctctggtggtgtttagttttagttccgtaagagaaatgattcctagtttgctaaattggtggcatctttgggaggggtttctgtttatggttagagtctcttacacccttgttggagggattcttattctgactgtgggagctcctgttgcgggatcttgggaaaaaataaagaagccgctgcattcgcacgtcaagaa

SEQ ID NO: 29300 - DNA, 3165 bp, Homo sapiens
  source 1..3165: mol_type = unassigned DNA
agtgattagcctgtggagcaggaaagtccagcgatgggcagctggtcacggcagtgggtgaaagcaggggtggtcatctgacgaggggaggggaagcaggtggtgcccagcaaggtggaaggagaagtggacaggagaaacctcggggcattcccgagggcccaggaactgcaataaatgatcacagggaaacttagagttcagagagggggtgtgatttgcctgaggtcacacagcaagttagagacccagctccacgactcattgtcttggctttggccctcgtcatcctgcccacccagcggggcttcccaacccaccacacagccatggacgggaaggtggcagtgcaagagtgtgggcctcctgcagtctcctgggtccccgaggagggagagaagttggaccaggaagacgaggaccaggtgaaggatcggggccaatggaccaacaagatggagtttgtgctgtcagtggccggggagatcattgggctgggcaatgtctggaggtttccctatctctgctacaaaaacggaggtggagccttcttcatcccctacttcatcttcttctttgtctgcggcatcccggtgttcttcctggaggtggcgttgggccaatacaccagccaagggagtgtcacagcctggaggaagatctgccccctcttccagggcattggtctggcatctgtggtcatcgagtcatatttgaatgtctactacatcatcatccttgcctgggctctcttctacctgttcagctccttcacttctgagctgccctggacgacctgcaacaacttttggaacacagagcattgcacggactttctgaaccactcaggagccggcacagtgaccccatttgagaattttacctcacctgtcatggaattctgggagagacgagttctgggcatcacctcgggcatccatgacctgggctccctgcgctgggagctggccctgtgcctcctgctcgcctgggtcatctgctatttctgcatctggaagggggtcaagtccacaggcaaggtggtttatttcacagccacgtttccgtacctgatgcttgtcattttgctgatcagaggtgtcacccttcccggagcctaccagggcatcatctactacttgaagccagatttgttccgcctcaaggaccctcaggtgtggatggatgcgggcacccagatcttcttctcctttgccatctgccaggggtgcctgacagccctgggcagctacaacaagtatcacaacaactgctacaaggactgcatcgccctctgcttcctgaacagtgccaccagctttgtggctgggtttgttgtcttctccatcctgggcttcatgtcccaagagcaaggggtgcccatttctgaagtggccgagtcaggtcctgggctggccttcatcgccttccccaaggctgtgactatgatgcccttatcccagctgtggtcctgcctgttctttatcatgctcatattcctagggctggacagccagtttgtctgtgtggagtgcctggtgacagcctccatagacatgttccccaggcagctccggaagagcgggcggcgcgagctcctcatcctcaccatcgccgtcatgtgctacctgatagggcttttcctggtcaccgagggcgggatgtacatcttccagctgtttgactactatgcttccagtggcatatgcctgctgttcctgtcattgtttgaagtggtctgcataagctgggtgtatggggcggaccgtttctatgacaacattgaggacatgattggctaccggccatggcccctggtgaagatctcctggctcttcctgacccctggactttgcctggccactttcctcttctccttgagcaagtacacccccctcaagtacaacaacgtctatgtgtacccgccctggggatactccattggctggttcctggctctgtcctccatggtctgtgtcccactcttcgtcgtcatcaccctcctgaagactcggggtcctttcaggaagcgtctgcgtcagctcatcacccctgactccagtctgccacagcccaagcaacatccctgcttggatggcagtgctggccggaactttgggccctccccaacaagggaaggactgatagccggggagaaggagacccatttgtagggtgtggccagaggccaggcggctcctaagccgggaacctaggtcagggccaccctccattctcagcggacagcctctgcctctgtctcctgccacaatcctgctgggaacctctggagagccacaggcacccccagctggaggccagactcctctcttgtgctagctggagcagctccttcccctttgctgataacaccaccactgggacgtgccatgttgggacgccactccctgtgggaaggcaccatcgtttttataaaggggggtctttttggaggccgccatctgattgcaacacctcgagttatgaggattccactgtggggatgcctcttgttagagcgtactgcatttgtacacggggagaggagctataattggaacgcacactgccgtccaatgtggagagcctgatgggacaataccctgttggaagtgacaactgaacacactgtgttggatcggaggttccgttaggggatccttccttaggcttaacgacagaggcaagcctttgcatgccgtcagtctggagtttcctccgagtctctcatggcatctccagctcctgccctagttccgcactgttcttgcagtgtttcatcaactcctggagcattggaatggaaggggcttgggagatgattcctagacttcacaaacactcggcatgcctccctgcactgtccgttcctctgcccaaggccgatattgctaactgatcacagattctttcccacctcacaatccttccgaatgtgctccaggcagcaccatttgccatcctgcttctaacgcaaacccctgacttcatggatgaggaacctggagaccaaagagacaaagggactttttcaagttcacatggggacccccttcttgggggccagagatatgactaaaaccttatctccttgtgctcaggccagtgtcttcccattaaccccctgccttagttaacaagtgtgtatggattgccttccatgcg

SEQ ID NO: 29301 - DNA, 3285 bp, Homo sapiens
  source 1..3285: mol_type = unassigned DNA
gttcagaggccccaccttctcttttcctcccaatcagctgcccagagctgctggctcccctgtttactctgagctgatcgatcaccttagcacacagctggctaggagagaaccatgcagtcacttcggccacacctgcccgttgacccttgctacctcggcaggctttgatcccttctgacctggaggccagaggctaggctgaggtcactcagcagacatcaaggacctgggcagatgggccggctgggatggtggcgagctgtacagataaaaagggacatgaaaatgaaaagcccgagcctgagttttcatcacggttccactcctgagtggtcttgggtgaatcacttcatctgccaaggcctggatttcctcatctgcaaactcagaaaactaaggctttggccctcgtcatcctgcccacccagcggggcttcccaacccaccacacagccatggacgggaaggtggcagtgcaagagtgtgggcctcctgcagtctcctgggtccccgaggagggagagaagttggaccaggaagacgaggaccaggtgaaggatcggggccaatggaccaacaagatggagtttgtgctgtcagtggccggggagatcattgggctgggcaatgtctggaggtttccctatctctgctacaaaaacggaggtggagccttcttcatcccctacttcatcttcttctttgtctgcggcatcccggtgttcttcctggaggtggcgttgggccaatacaccagccaagggagtgtcacagcctggaggaagatctgccccctcttccagggcattggtctggcatctgtggtcatcgagtcatatttgaatgtctactacatcatcatccttgcctgggctctcttctacctgttcagctccttcacttctgagctgccctggacgacctgcaacaacttttggaacacagagcattgcacggactttctgaaccactcaggagccggcacagtgaccccatttgagaattttacctcacctgtcatggaattctgggagagacgagttctgggcatcacctcgggcatccatgacctgggctccctgcgctgggagctggccctgtgcctcctgctcgcctgggtcatctgctatttctgcatctggaagggggtcaagtccacaggcaaggtggtttatttcacagccacgtttccgtacctgatgcttgtcattttgctgatcagaggtgtcacccttcccggagcctaccagggcatcatctactacttgaagccagatttgttccgcctcaaggaccctcaggtgtggatggatgcgggcacccagatcttcttctcctttgccatctgccaggggtgcctgacagccctgggcagctacaacaagtatcacaacaactgctacaaggactgcatcgccctctgcttcctgaacagtgccaccagctttgtggctgggtttgttgtcttctccatcctgggcttcatgtcccaagagcaaggggtgcccatttctgaagtggccgagtcaggtcctgggctggccttcatcgccttccccaaggctgtgactatgatgcccttatcccagctgtggtcctgcctgttctttatcatgctcatattcctagggctggacagccagtttgtctgtgtggagtgcctggtgacagcctccatagacatgttccccaggcagctccggaagagcgggcggcgcgagctcctcatcctcaccatcgccgtcatgtgctacctgatagggcttttcctggtcaccgagggcgggatgtacatcttccagctgtttgactactatgcttccagtggcatatgcctgctgttcctgtcattgtttgaagtggtctgcataagctgggtgtatggggcggaccgtttctatgacaacattgaggacatgattggctaccggccatggcccctggtgaagatctcctggctcttcctgacccctggactttgcctggccactttcctcttctccttgagcaagtacacccccctcaagtacaacaacgtctatgtgtacccgccctggggatactccattggctggttcctggctctgtcctccatggtctgtgtcccactcttcgtcgtcatcaccctcctgaagactcggggtcctttcaggaagcgtctgcgtcagctcatcacccctgactccagtctgccacagcccaagcaacatccctgcttggatggcagtgctggccggaactttgggccctccccaacaagggaaggactgatagccggggagaaggagacccatttgtagggtgtggccagaggccaggcggctcctaagccgggaacctaggtcagggccaccctccattctcagcggacagcctctgcctctgtctcctgccacaatcctgctgggaacctctggagagccacaggcacccccagctggaggccagactcctctcttgtgctagctggagcagctccttcccctttgctgataacaccaccactgggacgtgccatgttgggacgccactccctgtgggaaggcaccatcgtttttataaaggggggtctttttggaggccgccatctgattgcaacacctcgagttatgaggattccactgtggggatgcctcttgttagagcgtactgcatttgtacacggggagaggagctataattggaacgcacactgccgtccaatgtggagagcctgatgggacaataccctgttggaagtgacaactgaacacactgtgttggatcggaggttccgttaggggatccttccttaggcttaacgacagaggcaagcctttgcatgccgtcagtctggagtttcctccgagtctctcatggcatctccagctcctgccctagttccgcactgttcttgcagtgtttcatcaactcctggagcattggaatggaaggggcttgggagatgattcctagacttcacaaacactcggcatgcctccctgcactgtccgttcctctgcccaaggccgatattgctaactgatcacagattctttcccacctcacaatccttccgaatgtgctccaggcagcaccatttgccatcctgcttctaacgcaaacccctgacttcatggatgaggaacctggagaccaaagagacaaagggactttttcaagttcacatggggacccccttcttgggggccagagatatgactaaaaccttatctccttgtgctcaggccagtgtcttcccattaaccccctgccttagttaacaagtgtgtatggattgcc

SEQ ID NO: 29302 - DNA, 3332 bp, Homo sapiens
  source 1..3332: mol_type = unassigned DNA
gggtgtgaaggactacagagagagccaggttttggtgccatgcacacagggaaacttagagttcagagagggggtgtgatttgcctgaggtcacacagcaagttagagacccagctccacgactcattgtcttgctgcccagagctgctggctcccctgtttactctgagctgatcgatcaccttagcacacagctggctaggagagaaccatgcagtcacttcggccacacctgcccgttgacccttgctacctcggcaggctttgatcccttctgacctggaggccagaggctaggctgaggtcactcagcagacatcaaggacctgggcagatgggccggctgggatggtggcgagctgtacagataaaaagggacatgaaaatgaaaagcccgagcctgagttttcatcacggttccactcctgagtggtcttgggtgaatcacttcatctgccaaggcctggatttcctcatctgcaaactcagaaaactaaggctttggccctcgtcatcctgcccacccagcggggcttcccaacccaccacacagccatggacgggaaggtggcagtgcaagagtgtgggcctcctgcagtctcctgggtccccgaggagggagagaagttggaccaggaagacgaggaccaggtgaaggatcggggccaatggaccaacaagatggagtttgtgctgtcagtggccggggagatcattgggctgggcaatgtctggaggtttccctatctctgctacaaaaacggaggtggagccttcttcatcccctacttcatcttcttctttgtctgcggcatcccggtgttcttcctggaggtggcgttgggccaatacaccagccaagggagtgtcacagcctggaggaagatctgccccctcttccagggcattggtctggcatctgtggtcatcgagtcatatttgaatgtctactacatcatcatccttgcctgggctctcttctacctgttcagctccttcacttctgagctgccctggacgacctgcaacaacttttggaacacagagcattgcacggactttctgaaccactcaggagccggcacagtgaccccatttgagaattttacctcacctgtcatggaattctgggagagacgagttctgggcatcacctcgggcatccatgacctgggctccctgcgctgggagctggccctgtgcctcctgctcgcctgggtcatctgctatttctgcatctggaagggggtcaagtccacaggcaaggtggtttatttcacagccacgtttccgtacctgatgcttgtcattttgctgatcagaggtgtcacccttcccggagcctaccagggcatcatctactacttgaagccagatttgttccgcctcaaggaccctcaggtgtggatggatgcgggcacccagatcttcttctcctttgccatctgccaggggtgcctgacagccctgggcagctacaacaagtatcacaacaactgctacaaggactgcatcgccctctgcttcctgaacagtgccaccagctttgtggctgggtttgttgtcttctccatcctgggcttcatgtcccaagagcaaggggtgcccatttctgaagtggccgagtcaggtcctgggctggccttcatcgccttccccaaggctgtgactatgatgcccttatcccagctgtggtcctgcctgttctttatcatgctcatattcctagggctggacagccagtttgtctgtgtggagtgcctggtgacagcctccatagacatgttccccaggcagctccggaagagcgggcggcgcgagctcctcatcctcaccatcgccgtcatgtgctacctgatagggcttttcctggtcaccgagggcgggatgtacatcttccagctgtttgactactatgcttccagtggcatatgcctgctgttcctgtcattgtttgaagtggtctgcataagctgggtgtatggggcggaccgtttctatgacaacattgaggacatgattggctaccggccatggcccctggtgaagatctcctggctcttcctgacccctggactttgcctggccactttcctcttctccttgagcaagtacacccccctcaagtacaacaacgtctatgtgtacccgccctggggatactccattggctggttcctggctctgtcctccatggtctgtgtcccactcttcgtcgtcatcaccctcctgaagactcggggtcctttcaggaagcgtctgcgtcagctcatcacccctgactccagtctgccacagcccaagcaacatccctgcttggatggcagtgctggccggaactttgggccctccccaacaagggaaggactgatagccggggagaaggagacccatttgtagggtgtggccagaggccaggcggctcctaagccgggaacctaggtcagggccaccctccattctcagcggacagcctctgcctctgtctcctgccacaatcctgctgggaacctctggagagccacaggcacccccagctggaggccagactcctctcttgtgctagctggagcagctccttcccctttgctgataacaccaccactgggacgtgccatgttgggacgccactccctgtgggaaggcaccatcgtttttataaaggggggtctttttggaggccgccatctgattgcaacacctcgagttatgaggattccactgtggggatgcctcttgttagagcgtactgcatttgtacacggggagaggagctataattggaacgcacactgccgtccaatgtggagagcctgatgggacaataccctgttggaagtgacaactgaacacactgtgttggatcggaggttccgttaggggatccttccttaggcttaacgacagaggcaagcctttgcatgccgtcagtctggagtttcctccgagtctctcatggcatctccagctcctgccctagttccgcactgttcttgcagtgtttcatcaactcctggagcattggaatggaaggggcttgggagatgattcctagacttcacaaacactcggcatgcctccctgcactgtccgttcctctgcccaaggccgatattgctaactgatcacagattctttcccacctcacaatccttccgaatgtgctccaggcagcaccatttgccatcctgcttctaacgcaaacccctgacttcatggatgaggaacctggagaccaaagagacaaagggactttttcaagttcacatggggacccccttcttgggggccagagatatgactaaaaccttatctccttgtgctcaggccag

SEQ ID NO: 29303 - DNA, 3571 bp, Homo sapiens
  source 1..3571: mol_type = unassigned DNA
atacccgtctcctcatccctgggaaggagatggttctggagggggataggggaaaagggggaagggggaagggcaaggaggaggaggaggggagatgaggtcagggtgtgagtctctgagccccttcccctgcccaagggagcagcagctcagcccagctctggaggggccatcatgggactgtgcccacggggagggcaccggtctggagacagtgggttcacagtgggagtgggatgggggtgggagcgctggggacagaggacttgacttcctgaggttggatgttgtaatctcggttcacaaacttttggcctcagtccctcctgctgctcctggtatttctctgtcctttcactccccaacacacacagcccccgccccaacacatacacacacggcttctttctgtctgggagtccctggacaagtcacatgggattctgcgctgggaggaacagggtaaggcgtgaacgtggagggcagtttccctttcaggtcccggctctcttggctttcccataagcagctgccttgggactctcctggagacctgatgcccacagccaagctgaccacaggagccggtgctggggactgagggaaacttagagttcagagagggggtgtgatttgcctgaggtcacacagcaagttagagacccagctccacgactcattgtcttggctttggccctcgtcatcctgcccacccagcggggcttcccaacccaccacacagccatggacgggaaggtggcagtgcaagagtgtgggcctcctgcagtctcctgggtccccgaggagggagagaagttggaccaggaagacgaggaccaggtgaaggatcggggccaatggaccaacaagatggagtttgtgctgtcagtggccggggagatcattgggctgggcaatgtctggaggtttccctatctctgctacaaaaacggaggtggagccttcttcatcccctacttcatcttcttctttgtctgcggcatcccggtgttcttcctggaggtggcgttgggccaatacaccagccaagggagtgtcacagcctggaggaagatctgccccctcttccagggcattggtctggcatctgtggtcatcgagtcatatttgaatgtctactacatcatcatccttgcctgggctctcttctacctgttcagctccttcacttctgagctgccctggacgacctgcaacaacttttggaacacagagcattgcacggactttctgaaccactcaggagccggcacagtgaccccatttgagaattttacctcacctgtcatggaattctgggagagacgagttctgggcatcacctcgggcatccatgacctgggctccctgcgctgggagctggccctgtgcctcctgctcgcctgggtcatctgctatttctgcatctggaagggggtcaagtccacaggcaaggtggtttatttcacagccacgtttccgtacctgatgcttgtcattttgctgatcagaggtgtcacccttcccggagcctaccagggcatcatctactacttgaagccagatttgttccgcctcaaggaccctcaggtgtggatggatgcgggcacccagatcttcttctcctttgccatctgccaggggtgcctgacagccctgggcagctacaacaagtatcacaacaactgctacaaggactgcatcgccctctgcttcctgaacagtgccaccagctttgtggctgggtttgttgtcttctccatcctgggcttcatgtcccaagagcaaggggtgcccatttctgaagtggccgagtcaggtcctgggctggccttcatcgccttccccaaggctgtgactatgatgcccttatcccagctgtggtcctgcctgttctttatcatgctcatattcctagggctggacagccagtttgtctgtgtggagtgcctggtgacagcctccatagacatgttccccaggcagctccggaagagcgggcggcgcgagctcctcatcctcaccatcgccgtcatgtgctacctgatagggcttttcctggtcaccgagggcgggatgtacatcttccagctgtttgactactatgcttccagtggcatatgcctgctgttcctgtcattgtttgaagtggtctgcataagctgggtgtatggggcggaccgtttctatgacaacattgaggacatgattggctaccggccatggcccctggtgaagatctcctggctcttcctgacccctggactttgcctggccactttcctcttctccttgagcaagtacacccccctcaagtacaacaacgtctatgtgtacccgccctggggatactccattggctggttcctggctctgtcctccatggtctgtgtcccactcttcgtcgtcatcaccctcctgaagactcggggtcctttcaggaagcgtctgcgtcagctcatcacccctgactccagtctgccacagcccaagcaacatccctgcttggatggcagtgctggccggaactttgggccctccccaacaagggaaggactgatagccggggagaaggagacccatttgtagggtgtggccagaggccaggcggctcctaagccgggaacctaggtcagggccaccctccattctcagcggacagcctctgcctctgtctcctgccacaatcctgctgggaacctctggagagccacaggcacccccagctggaggccagactcctctcttgtgctagctggagcagctccttcccctttgctgataacaccaccactgggacgtgccatgttgggacgccactccctgtgggaaggcaccatcgtttttataaaggggggtctttttggaggccgccatctgattgcaacacctcgagttatgaggattccactgtggggatgcctcttgttagagcgtactgcatttgtacacggggagaggagctataattggaacgcacactgccgtccaatgtggagagcctgatgggacaataccctgttggaagtgacaactgaacacactgtgttggatcggaggttccgttaggggatccttccttaggcttaacgacagaggcaagcctttgcatgccgtcagtctggagtttcctccgagtctctcatggcatctccagctcctgccctagttccgcactgttcttgcagtgtttcatcaactcctggagcattggaatggaaggggcttgggagatgattcctagacttcacaaacactcggcatgcctccctgcactgtccgttcctctgcccaaggccgatattgctaactgatcacagattctttcccacctcacaatccttccgaatgtgctccaggcagcaccatttgccatcctgcttctaacgcaaacccctgacttcatggatgaggaacctggagaccaaagagacaaagggactttttcaagttcacatggggacccccttcttgggggccagagatatgactaaaaccttatctccttgtgctcaggccagtgtcttcccattaaccccctgccttagttaacaagtgtgtatggattgcc

SEQ ID NO: 29304 - DNA, 2101 bp, Homo sapiens
  source 1..2101: mol_type = unassigned DNA
tctttctgtctgggagtccctggacaagtcacatgggattctgcgctgggaggaacagggtaaggcgtgaacgtggagggcagtttccctttcaggtcccggctctcttggctttcccataagcagctgccttgggactctcctggagacctgatgcccacagccaagctgaccacaggagccggtgctggggactgaggctttggccctcgtcatcctgcccacccagcggggcttcccaacccaccacacagccatggacgggaaggtggcagtgcaagagtgtgggcctcctgcagtctcctgggtccccgaggagggagagaagttggaccaggaagacgaggaccaggtgaaggatcggggccaatggaccaacaagatggagtttgtgctgtcagtggccggggagatcattgggctgggcaatgtctggaggtttccctatctctgctacaaaaacggaggtggagccttcttcatcccctacttcatcttcttctttgtctgcggcatcccggtgttcttcctggaggtggcgttgggccaatacaccagccaagggagtgtcacagcctggaggaagatctgccccctcttccagggcattggtctggcatctgtggtcatcgagtcatatttgaatgtctactacatcatcatccttgcctgggctctcttctacctgttcagctccttcacttctgagctgccctggacgacctgcaacaacttttggaacacagagcattgcacggactttctgaaccactcaggagccggcacagtgaccccatttgagaattttacctcacctgtcatggaattctgggagagacgagttctgggcatcacctcgggcatccatgacctgggctccctgcgctgggagctggccctgtgcctcctgctcgcctgggtcatctgctatttctgcatctggaagggggtcaagtccacaggcaaggtggtttatttcacagccacgtttccgtacctgatgcttgtcattttgctgatcagaggtgtcacccttcccggagcctaccagggcatcatctactacttgaagccagatttgttccgcctcaaggaccctcaggtgtggatggatgcgggcacccagatcttcttctcctttgccatctgccaggggtgcctgacagccctgggcagctacaacaagtatcacaacaactgctacaaggactgcatcgccctctgcttcctgaacagtgccaccagctttgtggctgggtttgttgtcttctccatcctgggcttcatgtcccaagagcaaggggtgcccatttctgaagtggccgagtcaggtcctgggctggccttcatcgccttccccaaggctgtgactatgatgcccttatcccagctgtggtcctgcctgttctttatcatgctcatattcctagggctggacagccagtttgtctgtgtggagtgcctggtgacagcctccatagacatgttccccaggcagctccggaagagcgggcggcgcgagctcctcatcctcaccatcgccgtcatgtgctacctgatagggcttttcctggtcaccgagggcgggatgtacatcttccagctgtttgactactatgcttccagtggcatatgcctgctgttcctgtcattgtttgaagtggtctgcataagctgggtgtatggggcggaccgtttctatgacaacattgaggacatgattggctaccggccatggcccctggtgaagatctcctggctcttcctgacccctggactttgcctggccactttcctcttctccttgagcaagtacacccccctcaagtacaacaacgtctatgtgtacccgccctggggatactccattggctggttcctggctctgtcctccatggtctgtgtcccactcttcgtcgtcatcaccctcctgaagactcggggtcctttcaggaagcgtctgcgtcagctcatcacccctgactccagtctgccacagcccaagcaacatccctgcttggatggcagtgctggccggaactttgggccctccccaacaagggaaggactgatagccggggagaaggagacccatttgtag

SEQ ID NO: 29305 - DNA, 577 bp, Homo sapiens
  source 1..577: mol_type = unassigned DNA
atccctgtttctctagagccttggaggagcgtggggcacttggtagacctggtcgctttgattccctcaatacccctcagaggctttggccctcgtcatcctgcccacccagcggggcttcccaacccaccacacagccatggacgggaaggtggcagtgcaagagtgtgggcctcctgcagtctcctgggtccccgaggagggagagaagttggaccaggaagacgaggaccaggtgaaggatcggggccaatggaccaacaagatggagtttgtgctgtcagtggccggggagatcattgggctgggcaatgtctggaggtttccctatctctgctacaaaaacggaggtggagccttcttcatcccctacttcatcttcttctttgtctgcggcatcccggtgttcttcctggaggtggcgttgggccaatacaccagccaagggagtgtcacagcctggaggaagatctgccccctcttccagggcattggtctggcatctgtggtcatcgagtcatatttgaatgtctactacatcatcatccttgcctgggctctcttctacctgttcagc

SEQ ID NO: 29306 - DNA, 3763 bp, Homo sapiens
  source 1..3763: mol_type = unassigned DNA
gcctccgcgggccccggccggggcggggggcgcgggccacaggcccctgctccggccgccgcttgcagaccgcgggcgccgatgtcgcccgcgccccgctaggctgagcctcgggtcgggcgaggagccgccgcagccgccgccgcccgagccgcgggcaggagcctcgggagccgccgccgccgccgccgccgcccggccgggccccgccgccgcccgcgcgcccccgggcccccgacacacatgagattcttcaggctcactttcaagtgcttcgtggactgcttctgactgcgccgcccgcgccccgcaccccgccgcccgcccgccgccccgtcccccggcccggccgccccccggcccccggccggcccgcgccctcggggccctccccggtgccgccggtgccccccgcctgaccgccgccccccgtgaggcgccgcgaccccggcccggccgtgcggcccgccgaggccatggcgaagaagagcgccgagaacggcatctatagcgtgtccggcgacgagaagaagggccccctcatcgcgcccgggcccgacggggccccggccaagggcgacggccccgtgggcctggggacacccggcggccgcctggccgtgccgccgcgcgagacctggacgcgccagatggacttcatcatgtcgtgcgtgggcttcgccgtgggcttgggcaacgtgtggcgcttcccctacctgtgctacaagaacggcggaggtgtgttccttattccctacgtcctgatcgccctggttggaggaatccccattttcttcttagagatctcgctgggccagttcatgaaggccggcagcatcaatgtctggaacatctgtcccctgttcaaaggcctgggctacgcctccatggtgatcgtcttctactgcaacacctactacatcatggtgctggcctggggcttctattacctggtcaagtcctttaccaccacgctgccctgggccacatgtggccacacctggaacactcccgactgcgtggagatcttccgccatgaagactgtgccaatgccagcctggccaacctcacctgtgaccagcttgctgaccgccggtcccctgtcatcgagttctgggagaacaaagtcttgaggctgtctgggggactggaggtgccaggggccctcaactgggaggtgaccctttgtctgctggcctgctgggtgctggtctacttctgtgtctggaagggggtcaaatccacgggaaagatcgtgtacttcactgctacattcccctacgtggtcctggtcgtgctgctggtgcgtggagtgctgctgcctggcgccctggatggcatcatttactatctcaagcctgactggtcaaagctggggtcccctcaggtgtggatagatgcggggacccagattttcttttcttacgccattggcctgggggccctcacagccctgggcagctacaaccgcttcaacaacaactgctacaaggacgccatcatcctggctctcatcaacagtgggaccagcttctttgctggcttcgtggtcttctccatcctgggcttcatggctgcagagcagggcgtgcacatctccaaggtggcagagtcagggccgggcctggccttcatcgcctacccgcgggctgtcacgctgatgccagtggccccactctgggctgccctgttcttcttcatgctgttgctgcttggtctcgacagccagtttgtaggtgtggagggcttcatcaccggcctcctcgacctcctcccggcctcctactacttccgtttccaaagggagatctctgtggccctctgttgtgccctctgctttgtcatcgatctctccatggtgactgatggcgggatgtacgtcttccagctgtttgactactactcggccagcggcaccaccctgctctggcaggccttttgggagtgcgtggtggtggcctgggtgtacggagctgaccgcttcatggacgacattgcctgtatgatcgggtaccgaccttgcccctggatgaaatggtgctggtccttcttcaccccgctggtctgcatgggcatcttcatcttcaacgttgtgtactacgagccgctggtctacaacaacacctacgtgtacccgtggtggggtgaggccatgggctgggccttcgccctgtcctccatgctgtgcgtgccgctgcacctcctgggctgcctcctcagggccaagggcaccatggctgagcgctggcagcacctgacccagcccatctggggcctccaccacttggagtaccgagctcaggacgcagatgtcaggggcctgaccaccctgaccccagtgtccgagagcagcaaggtcgtcgtggtggagagtgtcatgtgacaactcagctcacatcaccagctcacctctggtagccatagcagcccctgcttcagccccaccgcacccctccagggggcctgcctttccctgacacttttggggtctgcctgggggaggaggggagaaagcaccatgagtgctcactaaaacaactttttccatttttaataaaacgccaaaaatatcacaacccaccaaaaatagatgcctctccccctccagccctagccgagctggtcctaggccccgcctagtgccccacccccacccacagtgctgcactcctcctgcccctgccacgcccaccccctgcccacctctccaggctctgctctgcagcacacccgtgggtgacccctcaccccagaagcagcagtggcagcttgggaaatgtgaggaagggaaggagggagagacgggagggaggagagagaggagaagggaggcaggggaggggcagcagaaccaaggcaaatatttcagctgggctatacccctctccccatccctgttatagaagcttagagagccagccagcaatggaaccttctggttcctgcgccaatcgccaccagtatcaattgtgtgagcttgggtgcgagtgcacgcgtgcgtgagtacggagagtatatatagatctctatctcttagcaaaggtgaatgccagatgtaaatggcgcctctgggcaaaggaggcttgtattttgcacattttataaaaacttgagagaatgagatttctgcttgtatatttctaaaaagaggaaggagcccaaaccatcctctccttaccactcccatccctgtgagccctaccttacccctctgcccctagccaaggagtgtgaatttatagatctaactttcataggcaaaacaaaagcttcgagctgttgcgtgtgtgagtctgttgtgtggatgtgcgtgtgtggtccccagccccagactggattggaaaagtgcatggtgggggcctcggggctgtccccacgctgtccctttgccacaagtctgtggggcaagaggctgcaatattccgtcctgggtgtctgggctgctaacctggcctgctcaggcttcccaccctgtgcggggcacacccccaggaagggaccctggacacggctcccacgtccaggcttaaggtggatgcacttcccgcacctccagtcttctgtgtagcagctttaacccacgtttgtctgtcacgtccagtcccgagacggctgagtgaccccaagaaaggcttccccgacacccagacagaggctgcagggctggggctgggtgagggtggcgggcctgcggggacattctactgtgctaaaaagccactgcagacatagcaataaaaacatgtcattttccaaagcagg

SEQ ID NO: 29307 - DNA, 2390 bp, Homo sapiens
  source 1..2390: mol_type = unassigned DNA
ctgaaagccaagcaatgctccccaccctgcaaatccagggcccagcagcctttgctcctggggatagaggccctggcaggcactgtcccttccctgtgcccatcacccccactggtgccctcctgccagtctctgactcttgtgacagtctggtggacctggtctggccatctgttacctatcttgccttggggacccagagcagagtctggccacatcccttgggggctcctggtcaggctggggagtcacctgaacaaagaagacagtgtctagagctgtgggacatggccagctccctgggggacaaggtccccagagcagcatgtgggaagagggggcagacagtgtggcagctgcatctcgcctgcctctgcctggcccagttccactctccacctgctcaacccccacctctctccagaagaggagggggacccgacccggatccaatatcccgctccctgcctgggcctcccacacctgcactgcccacacactcatacagctctcactccccacgtgctccacgcctcctgtccccactgaggagagctcccagaggctcgcctgctccccaccgacacgcgtccctgcagacaaacgaggcgcccagggagcttccccactgcacttggccagggctgccggggcgcagccttgcccctagcttcctctggcgggagccatggctcggaggacaatggggacctctgaacatacctgcccgcaagggggaccggaggcgctgggagtgggggtgtgagggaggtggtgccacagcctccgctgagcagcctggcccccagatcgtgtacttcactgctacattcccctacgtggtcctggtcgtgctgctggtgcgtggagtgctgctgcctggcgccctggatggcatcatttactatctcaagcctgactggtcaaagctggggtcccctcaggtgtggatagatgcggggacccagattttcttttcttacgccattggcctgggggccctcacagccctgggcagctacaaccgcttcaacaacaactgctacaaggacgccatcatcctggctctcatcaacagtgggaccagcttctttgctggcttcgtggtcttctccatcctgggcttcatggctgcagagcagggcgtgcacatctccaaggtggcagagtcagggccgggcctggccttcatcgcctacccgcgggctgtcacgctgatgccagtggccccactctgggctgccctgttcttcttcatgctgttgctgcttggtctcgacagccaggtttgcatggggctctgggacagggagccaggaggggggcggagggagggctgcaggcaaggaaaggggtggaggcggtgcggggctcggcctgagctgccctggccacagtttgtaggtgtggagggcttcatcaccggcctcctcgacctcctcccggcctcctactacttccgtttccaaagggagatctctgtggccctctgttgtgccctctgctttgtcatcgatctctccatggtgactgatgtgagtggggtggggggtctgcctgtgacctctggtggccgtctgccatcctccctgactgggctctgtccccagggcgggatgtacgtcttccagctgtttgactactactcggccagcggcaccaccctgctctggcaggccttttgggagtgcgtggtggtggcctgggtgtacggtaggtcatggctgagggctgggctgggggatggtggcggggaaggcaggtctccagcttggcccgcctcacctcgcggagctgaccgcttcatggacgacattgcctgtatgatcgggtaccgaccttgcccctggatgaaatggtgctggtccttcttcaccccgctggtctgcatgggcatcttcatcttcaacgttgtgtactacgagccgctggtctacaacaacacctacgtgtacccgtggtggggtgaggccatgggctgggccttcgccctgtcctccatgctgtgcgtgccgctgcacctcctgggctgcctcctcagggccaagggcaccatggctgagcgctggcagcacctgacccagcccatctggggcctccaccacttggagtaccgagctcaggacgcagatgtcaggggcctgaccaccctgaccccagtgtccgagagcagcaaggtcgtcgtggtggagagtgtcatgtgacaactcagctcacatcaccagctcacctctggtagccatagcagcccctgcttcagccccaccgcacccctccagggggcctgcctttccctgacacttttggggtctgcctgggggaggaggggagaaagcaccatgagtgctcactaaaacaactttttccatttttaataaaacgccaaaaat

SEQ ID NO: 29308 - DNA, 468 bp, Homo sapiens
  source 1..468: mol_type = unassigned DNA
ctgctacattcccctacgtggtcctggtcgtgctgctggtgcgtggagtgctgctgcctggcgccctggatggcatcatttactatctcaagcctgactggtcaaagctggggtcccctcagccctgggcagctacaaccgcttcaacaacaactgctacaatgggaccagcttctttgctggcttcgtggtcttctccatcctgggcttcatggctgcagagcagggcgtgcacatctccaaggtggcagagtcagggagatctctgtggccctctgttgtgccctctgctttgtcatcgatctctccatggtgactgatggcgggatgtacgtcttccagctgtttgactactactcggccagcggcaccaccctgctctggcaggccttttgggagtgcgtggtggtggcctgggtgtacggagctgaccgcttcatggacgacattgcctgtatgatcgggtac

SEQ ID NO: 29309 - DNA, 334 bp, Homo sapiens
  source 1..334: mol_type = unassigned DNA
cttccgccatgaagactgtgccaatgccagcctggccaacctcacctgtgaccagcttgctgaccgccggtcccctgtcatcgagttctgggagaacaaagtcttgaggctgtctgggggactggaggtgccaggggccctcaactgggaggtgaccctttgtctgctggcctgctgggtgctggtctacttctgtgtctggaagggggtcaaatccacgggaaaggtaccactagaggcatgcagcggggagggtggctcagccctgggagccggatgtctgtgccaggcacacctgtggcaacgggaggtgaccagacagagtctagcccta

SEQ ID NO: 29310 - DNA, 1892 bp, Homo sapiens
  source 1..1892: mol_type = unassigned DNA
gtgtgtcctgtgactacaaaacagcactggggttgctggaagccgaagtgacccggtgatgggtgggaaacagaggtccagagcaaaggcctttgcccaaggtcaggagaaggatgctgggacctggagtcaggtgtgttccttattccctacgtcctgatcgccctggttggaggaatccccattttcttcttagagatctcgctgggccagttcatgaaggccggcagcatcaatgtctggaacatctgtcccctgttcaaaggcctgggctacgcctccatggtgatcgtcttctactgcaacacctactacatcatggtgctggcctggggcttctattacctggtcaagtcctttaccaccacgctgccctgggccacatgtggccacacctggaacactcccgactgcgtggagatcttccgccatgaagactgtgccaatgccagcctggccaacctcacctgtgaccagcttgctgaccgccggtcccctgtcatcgagttctgggagaacaaagtcttgaggctgtctgggggactggaggtgccaggggccctcaactgggaggtgaccctttgtctgctggcctgctgggtgctggtctacttctgtgtctggaagggggtcaaatccacgggaaagatcgtgtacttcactgctacattcccctacgtggtcctggtcgtgctgctggtgcgtggagtgctgctgcctggcgccctggatggcatcatttactatctcaagcctgactggtcaaagctggggtcccctcaggtgtggatagatgcggggacccagattttcttttcttacgccattggcctgggggccctcacagccctgggcagctacaaccgcttcaacaacaactgctacaaggacgccatcatcctggctctcatcaacagtgggaccagcttctttgctggcttcgtggtcttctccatcctgggcttcatggctgcagagcagggcgtgcacatctccaaggtggcagagtcagggccgggcctggccttcatcgcctacccgcgggctgtcacgctgatgccagtggccccactctgggctgccctgttcttcttcatgctgttgctgcttggtctcgacagccagtttgtaggtgtggagggcttcatcaccggcctcctcgacctcctcccggcctcctactacttccgtttccaaagggagatctctgtggccctctgttgtgccctctgctttgtcatcgatctctccatggtgactgatggcgggatgtacgtcttccagctgtttgactactactcggccagcggcaccaccctgctctggcaggccttttgggagtgcgtggtggtggcctgggtgtacggagctgaccgcttcatggacgacattgcctgtatgatcgggtaccgaccttgcccctggatgaaatggtgctggtccttcttcaccccgctggtctgcatgggcatcttcatcttcaacgttgtgtactacgagccgctggtctacaacaacacctacgtgtacccgtggtggggtgaggccatgggctgggccttcgccctgtcctccatgctgtgcgtgccgctgcacctcctgggctgcctcctcagggccaagggcaccatggctgagcgctggcagcacctgacccagcccatctggggcctccaccacttggagtaccgagctcaggacgcagatgtcaggggcctgaccaccctgaccccagtgtccgagagcagcaaggtcgtcgtggtggagagtgtcatgtgacaactcagctcacatcaccagctcacctctggtagccatagcagcccctgcttcagccccaccgcacccctccagggggcctgcctttccctgacacttttggggtctgcctg

SEQ ID NO: 29311 - DNA, 523 bp, Homo sapiens
  source 1..523: mol_type = unassigned DNA
ggatagatgcggggacccagattttcttttcttacgccattggcctgggggccctcacagccctgggcagctacaaccgcttcaacaacaactgctacaatgggaccagcttctttgctggcttcgtggtcttctccatcctgggcttcatggctgcagagcagggcgtgcacatctccaaggtggcagagtcagggccgggcctggccttcatcgcctacccgcgggctgtcacgctgatgccagtggccccactctgggctgccctgttcttcttcatgctgttgctgcttggtctcgacagccagtttgtaggtgtggagggcttcatcaccggcctcctcgacctcctcccggcctcctactacttccgtttccaaagggagatctctgtggccctctgttgtgccctctgctttgtcatcgatctctccatggtgactgatggcgggatgtacgtcttccagctgtttgactactactcggccagcggcaccaccctgctctggcaggccttttggga

SEQ ID NO: 29312 - DNA, 266 bp, Homo sapiens
  source 1..266: mol_type = unassigned DNA
ggacgccatcatcctggctctcatcaacagtgggaccagcttctttgctggcttcgtggtcttctccatcctgggcttcatggctgcagagcagggcgtgcacatctccaaggtggcagagtcagggccgggcctggccttcatcgcctacccgcgggctgtcacgctgatgccagtggccccactctgggctgccctgttcttcttcatgctgttgctgcttggtctcgacagccaggtgtggagggcttcatcaccggcctcct

SEQ ID NO: 29313 - DNA, 3932 bp, Homo sapiens
  source 1..3932: mol_type = unassigned DNA
agcgctgcggagcgggaggggaggcttcgcggaacgctctcggcgccaggactcgcgtgcaaagcccaggcccgggcggccagaccaagagggaagaagcacagaattcctcaactcccagtgtgcccatgagtaagagcaaatgctccgtgggactcatgtcttccgtggtggccccggctaaggagcccaatgccgtgggcccgaaggaggtggagctcatccttgtcaaggagcagaacggagtgcagctcaccagctccaccctcaccaacccgcggcagagccccgtggaggcccaggatcgggagacctggggcaagaagatcgactttctcctgtccgtcattggctttgctgtggacctggccaacgtctggcggttcccctacctgtgctacaaaaatggtggcggtgccttcctggtcccctacctgctcttcatggtcattgctgggatgccacttttctacatggagctggccctcggccagttcaacagggaaggggccgctggtgtctggaagatctgccccatactgaaaggtgtgggcttcacggtcatcctcatctcactgtatgtcggcttcttctacaacgtcatcatcgcctgggcgctgcactatctcttctcctccttcaccacggagctcccctggatccactgcaacaactcctggaacagccccaactgctcggatgcccatcctggtgactccagtggagacagctcgggcctcaacgacacttttgggaccacacctgctgccgagtactttgaacgtggcgtgctgcacctccaccagagccatggcatcgacgacctggggcctccgcggtggcagctcacagcctgcctggtgctggtcatcgtgctgctctacttcagcctctggaagggcgtgaagacctcagggaaggtggtatggatcacagccaccatgccatacgtggtcctcactgccctgctcctgcgtggggtcaccctccctggagccatagacggcatcagagcatacctgagcgttgacttctaccggctctgcgaggcgtctgtttggattgacgcggccacccaggtgtgcttctccctgggcgtggggttcggggtgctgatcgccttctccagctacaacaagttcaccaacaactgctacagggacgcgattgtcaccacctccatcaactccctgacgagcttctcctccggcttcgtcgtcttctccttcctggggtacatggcacagaagcacagtgtgcccatcggggacgtggccaaggacgggccagggctgatcttcatcatctacccggaagccatcgccacgctccctctgtcctcagcctgggccgtggtcttcttcatcatgctgctcaccctgggtatcgacagcgccatgggtggtatggagtcagtgatcaccgggctcatcgatgagttccagctgctgcacagacaccgtgagctcttcacgctcttcatcgtcctggcgaccttcctcctgtccctgttctgcgtcaccaacggtggcatctacgtcttcacgctcctggaccattttgcagccggcacgtccatcctctttggagtgctcatcgaagccatcggagtggcctggttctatggtgttgggcagttcagcgacgacatccagcagatgaccgggcagcggcccagcctgtactggcggctgtgctggaagctggtcagcccctgctttctcctgttcgtggtcgtggtcagcattgtgaccttcagacccccccactacggagcctacatcttccccgactgggccaacgcgctgggctgggtcatcgccacatcctccatggccatggtgcccatctatgcggcctacaagttctgcagcctgcctgggtcctttcgagagaaactggcctacgccattgcacccgagaaggaccgtgagctggtggacagaggggaggtgcgccagttcacgctccgccactggctcaaggtgtagagggagcagagacgaagaccccaggaagtcatcctgcaatgggagagacacgaacaaaccaaggaaatctaagtttcgagagaaaggagggcaacttctactcttcaacctctactgaaaacacaaacaacaaagcagaagactcctctcttctgactgtttacacctttccgtgccgggagcgcacctcgccgtgtcttgtgttgctgtaataacgacgtagatctgtgcagcgaggtccaccccgttgttgtccctgcagggcagaaaaacgtctaacttcatgctgtctgtgtgaggctccctccctccctgctccctgctcccggctctgaggctgccccaggggcactgtgttctcaggcggggatcacgatccttgtagacgcacctgctgagaatccccgtgctcacagtagcttcctagaccatttactttgcccatattaaaaagccaagtgtcctgcttggtttagctgtgcagaaggtgaaatggaggaaaccacaaattcatgcaaagtcctttcccgatgcgtggctcccagcagaggccgtaaattgagcgttcagttgacacattgcacacacagtctgttcagaggcattggaggatgggggtcctggtatgtctcaccaggaaattctgtttatgttcttgcagcagagagaaataaaactccttgaaaccagctcaggctactgccactcaggcagcctgtgggtccttgcggtgtagggaacggcctgagaggagcgtgtcctatccccggacgcatgcagggcccccacaggagcgtgtcctatccccggacgcatgcagggcccccacaggagcatgtcctatccctggacgcatgcagggcccccacaggagcgtgtactaccccagaacgcatgcagggcccccacaggagcgtgtactaccccaggacgcatgcagggcccccactggagcgtgtactaccccaggacgcatgcagggcccccacaggagcgtgtcctatccccggaccggacgcatgcagggcccccacaggagcgtgtactaccccaggacgcatgcagggcccccacaggagcgtgtactaccccaggatgcatgcagggcccccacaggagcgtgtactaccccaggacgcatgcagggcccccatgcaggcagcctgcagaccacactctgcctggccttgagccgtgacctccaggaagggaccccactggaattttatttctctcaggtgcgtgccacatcaataacaacagtttttatgtttgcgaatggctttttaaaatcatatttacctgtgaatcaaaacaaattcaagaatgcagtatccgcgagcctgcttgctgatattgcagtttttgtttacaagaataattagcaatactgagtgaaggatgttggccaaaagctgctttccatggcacactgccctctgccactgacaggaaagtggatgccatagtttgaattcatgcctcaagtcggtgggcctgcctacgtgctgcccgagggcaggggccgtgcagggccagtcatggctgtcccctgcaagtggacgtgggctccagggactggagtgtaatgctcggtgggagccgtcagcctgtgaactgccaggcagctgcagttagcacagaggatggcttccccattgccttctggggagggacacagaggacggcttccccatcgccttctggccgctgcagtcagcacagagagcggcttccccattgccttctggggagggacacagaggacagcttccccatcgccttctggctgctgcagtcagcacagagagcggcttccccatcgccttctggggaggggctccgtgtagcaacccaggtgttgtccgtgtctgttgaccaatctctattcagcatcgtgtgggtccctaagcacaataaaagacatccacaatggaaaaa

SEQ ID NO: 29314 - DNA, 2770 bp, Homo sapiens
  source 1..2770: mol_type = unassigned DNA
agaccaagagggaagaagcacagaattcctcaactcccagtgtgcccatgagtaagagcaaatgctccgtgggactcatgtcttccgtggtggccccggctaaggagcccaatgccgtgggcccgaaggaggtggagctcatccttgtcaaggagcagaacggagtgcagctcaccagctccaccctcaccaacccgcggcagagccccgtggaggcccaggatcgggagacctggggcaagaagatcgactttctcctgtccgtcattggctttgctgtggacctggccaacgtctggcggttcccctacctgtgctacaaaaatggtggcggtgccttcctggtcccctacctgctcttcatggtcattgctgggatgccacttttctacatggagctggccctcggccagttcaacagggaaggggccgctggtgtctggaagatctgccccatactgaaaggtgtgggcttcacggtcatcctcatctcactgtatgtcggcttcttctacaacgtcatcatcgcctgggcgctgcactatctcttctcctccttcaccacggagctcccctggatccactgcaacaactcctggaacagccccaactgctcggatgcccatcctggtgactccagtggagacagctcgggcctcaacgacacttttgggaccacacctgctgccgagtactttgaacgtggcgtgctgcacctccaccagagccatggcatcgacgacctggggcctccgcggtggcagctcacagcctgcctggtgctggtcatcgtgctgctctacttcagcctctggaagggcgtgaagacctcagggaaggtggtatggatcacagccaccatgccatacgtggtcctcactgccctgctcctgcgtggggtcaccctccctggagccatagacggcatcagagcatacctgagcgttgacttctaccggctctgcgaggcgtctgtttggattgacgcggccacccaggtgtgcttctccctgggcgtggggttcggggtgctgatcgccttctccagctacaacaagttcaccaacaactgctacagggacgcgattgtcaccacctccatcaactccctgacgagcttctcctccggcttcgtcgtcttctccttcctggggtacatggcacagaagcacagtgtgcccatcggggacgtggccaaggacgggccagggctgatcttcatcatctacccggaagccatcgccacgctccctctgtcctcagcctgggccgtggtcttcttcatcatgctgctcaccctgggtatcgacagcgccatgggtggtatggagtcagtgatcaccgggctcatcgatgagttccagctgctgcacagacaccgtgagctcttcacgctcttcatcgtcctggcgaccttcctcctgtccctgttctgcgtcaccaacggtggcatctacgtcttcacgctcctggaccattttgcagccggcacgtccatcctctttggagtgctcatcgaagccatcggagtggcctggttctatggtgttgggcagttcagcgacgacatccagcagatgaccgggcagcggcccagcctgtactggcggctgtgctggaagctggtcagcccctgctttctcctgttcgtggtcgtggtcagcattgtgaccttcagacccccccactacggagcctacatcttccccgactgggccaacgcgctgggctgggtcatcgccacatcctccatggccatggtgcccatctatgcggcctacaagttctgcagcctgcctgggtcctttcgagagaaactggcctacgccattgcacccgagaaggaccgtgagctggtggacagaggggaggtgcgccagttcacgctccgccactggctcaaggtgtagagggagcagagacgaagaccccaggaagtcatcctgcaatgggagagacacgaacaaaccaaggaaatctaagtttcgagagaaaggagggcaacttctactcttcaacctctactgaaaacacaaacaacaaagcagaagactcctctcttctgactgtttacacctttccgtgccgggagcgcacctcgccgtgtcttgtgttgctgtaataacgacgtagatctgtgcagcgaggtccaccccgttgttgtccctgcagggcagaaaaacgtctaacttcatgctgtctgtgtgaggctccctccctccctgctccctgctcccggctctgaggctgccccaggggcactgtgttctcaggcggggatcacgatccttgtagacgcacctgctgagaatccccgtgctcacagtagcttcctagaccatttactttgcccatattaaaaagccaagtgtcctgcttggtttagctgtgcagaaggtgaaatggaggaaaccacaaattcatgcaaagtcctttcccgatgcgtggctcccagcagaggccgtaaattgagcgttcagttgacacattgcacacacagtctgttcagaggcattggaggatgggggtcctggtatgtctcaccaggaaattctgtttatgttcttgcagcagagagaaataaaactccttgaaaccagctcaggctactgccactcaggcagcctgtgggtccttgcggtgtagggaacggcctgagaggagcgtgtcctatccccggacgcatgcagggcccccacaggagcgtgtcctatccccggacgcatgcagggcccccacaggagcgtgtactaccccaggacgcatgcag

SEQ ID NO: 29315 - DNA, 4502 bp, Homo sapiens
  source 1..4502: mol_type = unassigned DNA
tcccttccccgcgaccctccgcccgccctcggaagaccgagacagcggagaggttgcgggtgagctgcgctgagcccaggagccgaggagtcgggagcgcagtagcgctgagcccgagcccgagcggccccgcgtcccgagcgcatcggagcggccgagccgcccggatgcagcgcctgtcccgggcagcgcagccccggccgcaggatctcacccagggtggcagaaggaggccttctggagctgacccacccccgacgaccatcagggtgaggcaactccaaggtcctactctctttctgtgcctgttacccaccccgtcctcctagggtgcccttgagccgcaaaactgctgtccacgtggaccgggggtgacatcgcacgtccatctgccaggacccctgcgtccaaattccgagacatggcgaccaacggcagcaaggtggccgacgggcagatctccaccgaggtcagcgaggcccctgtggccaatgacaagcccaaaaccttggtggtcaaggtgcagaagaaggcggcagacctccccgaccgggacacgtggaagggccgcttcgacttcctcatgtcctgtgtgggctatgccatcggcctgggcaacgtctggaggttcccctatctctgcgggaaaaatggtgggggagccttcctgatcccctatttcctgacactcatctttgcgggggtcccactcttcctgctggagtgctccctgggccagtacacctccatcggggggctaggggtatggaagctggctcctatgttcaagggcgtgggccttgcggctgctgtgctatcattctggctgaacatctactacatcgtcatcatctcctgggccatttactacctgtacaactccttcaccacgacactgccgtggaaacagtgcgacaacccctggaacacagaccgctgcttctccaactacagcatggtcaacactaccaacatgaccagcgctgtggtggagttctgggagcgcaacatgcatcagatgacggacgggctggataagccaggtcagatccgctggccactggccatcacgctggccatcgcctggatccttgtgtatttctgtatctggaagggtgttggctggactggaaaggtggtctacttttcagccacatacccctacatcatgctgatcatcctgttcttccgtggagtgacgctgcccggggccaaggagggcatcctcttctacatcacacccaacttccgcaagctgtctgactccgaggtgtggctggatgcggcaacccagatcttcttctcatacgggctgggcctggggtccctgatcgctctcgggagctacaactctttccacaacaatgtctacagggactccatcatcgtctgctgcatcaattcgtgcaccagcatgttcgcaggattcgtcatcttctccatcgtgggcttcatggcccatgtcaccaagaggtccattgctgatgtggcggcctcaggccccgggctggcgttcctggcatacccagaggcggtgacccagctgcctatctccccactctgggccatcctcttcttctccatgctgttgatgctgggcattgacagccagttctgcactgtggagggcttcatcacagccctggtggatgagtaccccaggctcctccgcaaccgcagagagctcttcattgctgctgtctgcatcatctcctacctgatcggtctctctaacatcactcaggggggtatttatgtcttcaaactctttgactactactctgccagtggcatgagcctgctgttcctcgtgttctttgaatgtgtctctatttcctggttttacggtgtcaaccgattctatgacaatatccaagagatggttggatccaggccctgcatctggtggaaactctgctggtctttcttcacaccaatcattgtggcgggcgtgttcattttcagtgctgtgcagatgacgccactcaccatgggaaactatgttttccccaagtggggccagggtgtgggctggctgatggctctgtcttccatggtcctcatccccgggtacatggcctacatgttcctcaccttaaagggctccctgaagcagcgcatccaagtcatggtccagcccagcgaagacatcgttcgcccagagaatggtcctgagcagccccaggcgggcagctccaccagcaaggaggcctacatctagggtgggggccactcaccgacccgacactctcaccccccgacctggctgagtgcgaccaccacttgatgtctgaggataccttccatctcaacctacctcgagtggcgagtccagacaccatcaccacgcagagaggggaggtgggaggacagttagacccctgggtgggccctgccgtgggcaaggatacccggtggcttctggcacctggcgggctggtgacctttttaatccaggccccatcagcatcccacgatcggccttggtaaccgccgcggtagatcatttttatcccgccagggagtgtgatgcaggaagaccacatgcgctcctggcttttaaacctgttcctgactgttctcttactgccgaaacccttgactgttatctcggactttgcaggagttcctttccctccgaacgctgctccatgcacaggaaaagggcattttgtacaatggggacttcccgggaacgcttgctcttaagtaccagaagccggcggagctctggctttcgtgtttttggttttctccttcccaaggcagctggattgaaaaaacaaaacaaaacaaaaaaacccaggggcgtcagtcgatattcccagggccgcttctcctgcagtctgtggagcgtccttgtccccgccgccggaatgaatgagcattctgcagcccgatgtccctgtcccctcctcgccgggccattctgattggacctggcccagtgcaatctgtccagacaagccctgcttgctggaaaactgccacaagcacaattgatctctttttatcgccattccaggggcctcaggtcctactggggaaacttcctataccggagctccagtttctcttaagctgcccaatttcacagagtacaaaatagttgtaggggaaatcaaggtgaaggatctgtccgacagtcaagacggatccacagtaatctttcggtctccttaaactaccaccctcgctgccacccaccccaagctgctgccgcctcaccttccttgaaatttctcagcgggagtctcctcactgccactaaaatccacccagcccactaactgaggagctagtgttaatccagagaaccccccgcaatgtgcttccgagattcagactgcttcattgggaagtatgatttgttcctttctggaattgggctccgtggtggcggcggcacttcaagcaaagacagtttcttgcaagctccagtagctccgcgtgtctcatttgccaggaagatgggttcccacgtagcaaatcgtacattgtgccctgtagctccttagctagttagctcacaagccgtgttttatgactaatccttaataactatggtaaataactgtgactgtggggtttttaatctcttgtcattctcatccaaaagtgaccagcataccagttcttgcaataagatattaccctcagaatattaagcacattattgtagagaaaaaaaaatatgtgtacacatatgaacgcacaacatgcacattcatcctcacatgtggcacgtaaggtctcatttgatattgtgtaggaaatctgaagccttttcctgaggtcatctgtaaaatagtctcattgccaaggcatccccagtgccagctggtgaatccatgatcaaaatgcatacgtattgttaaatgataaggtttagaatgacaggaacccatcactgtgtctcatggtcccacttccccatctgtgtgtgaattcctttagactaagggcaggaagacttccagctttctctttgttcttcaatgtgaaactgagaccaagtctctctaagacaaatgcagtgtatttaatgtttgtaagcaattctaagtgagatgtttggcaagaaatcccctaactgatttccatccaaacctaccttatagagcacaatattaagtgttgtacaattactgtgagaactgtgaatatgtgtaacttttttttagtatttgcccggggggaaaaagatattgtattatcatatatgcttttttgcaataaggatttattctcagaacaccaagtaaatctatctctatataaaaaatatatgtaatatatacatattcaaagtatatacagagcctgttttaaaaaatacagtattatttagtaaaattatctgttctatggaccaaatgtaaaatatttataaatgaagatgcattttaaatgtctataaatggtgtcataactagagcacgggcgttatgtaagtttctaagaatttagaggataaataataaaggttctatgatatacaa

SEQ ID NO: 29316 - DNA, 472 bp, Homo sapiens
  source 1..472: mol_type = unassigned DNA
ttccccgcgaccctccgcccgccctcggaagaccgagacagcggagaggttgcgggtgagctgcgctgagcccaggagccgaggagtcgggagcgcagtagcgctgagcccgagcccgagcggccccgcgtcccgagcgcatcggagcggccgagccgcccggatgcagcgcctgtcccgggcagcgcagccccggccgcaggatctcacccagggtggcagaaggaggccttctggagctgacccacccccgacgaccatcagggtgcccttgagccgcaaaactgctgtccacgtggaccgggggtgacatcgcacgtccatctgccaggacccctgcgtccaaattccgagacatggcgaccaacggcagcaaggtggccgacgggcagatctccaccgaggtcagcgaggcccctgtggccaatgacaagcccaaaaccttggtggtcaaggtgcagaagaaggcggc

SEQ ID NO: 29317 - DNA, 1756 bp, Homo sapiens
  source 1..1756: mol_type = unassigned DNA
ctagggtgcccttgagccgcaaaactgctgtccacgtggaccgggggtgacatcgcacgtccatctgccaggacccctgcgtccaaattccgagacatggcgaccaacggcagcaaggtggccgacgggcagatctccaccgaggcgtgggccttgcggctgctgtgctatcattctggctgaacatctactacatcgtcatcatctcctgggccatttactacctgtacaactccttcaccacgacactgccgtggaaacagtgcgacaacccctggaacacagaccgctgcttctccaactacagcatggtcaacactaccaacatgaccagcgctgtggtggagttctgggagcgcaacatgcatcagatgacggacgggctggataagccaggtcagatccgctggccactggccatcacgctggccatcgcctggatccttgtgtatttctgtatctggaagggtgttggctggactggaaaggtggtctacttttcagccacatacccctacatcatgctgatcatcctgttcttccgtggagtgacgctgcccggggccaaggagggcatcctcttctacatcacacccaacttccgcaagctgtctgactccgaggtgtggctggatgcggcaacccagatcttcttctcatacgggctgggcctggggtccctgatcgctctcgggagctacaactctttccacaacaatgtctacagggactccatcatcgtctgctgcatcaattcgtgcaccagcatgttcgcaggattcgtcatcttctccatcgtgggcttcatggcccatgtcaccaagaggtccattgctgatgtggcggcctcaggccccgggctggcgttcctggcatacccagaggcggtgacccagctgcctatctccccactctgggccatcctcttcttctccatgctgttgatgctgggcattgacagccagttctgcactgtggagggcttcatcacagccctggtggatgagtaccccaggctcctccgcaaccgcagagagctcttcattgctgctgtctgcatcatctcctacctgatcggtctctctaacatcactcaggggggtatttatgtcttcaaactctttgactactactctgccagtggcatgagcctgctgttcctcgtgttctttgaatgtgtctctatttcctggttttacggtgtcaaccgattctatgacaatatccaagagatggttggatccaggccctgcatctggtggaaactctgctggtctttcttcacaccaatcattgtggcgggcgtgttcattttcagtgctgtgcagatgacgccactcaccatgggaaactatgttttccccaagtggggccagggtgtgggctggctgatggctctgtcttccatggtcctcatccccgggtacatggcctacatgttcctcaccttaaagggctccctgaagcagcgcatccaagtcatggtccagcccagcgaagacatcgttcgcccagagaatggtcctgagcagccccaggcgggcagctccaccagcaaggaggcctacatctagggtgggggccactcaccgacccgacactctcaccccccgacctggctgagtgcgaccaccacttgatgtctgaggataccttccatctcaacctacctcgagtggcgagtccagacaccatcaccacgcagagaggggaggtgggaggacagttagacccctgggtgggccctgccgtgggc

SEQ ID NO: 29318 - DNA, 4296 bp, Homo sapiens
  source 1..4296: mol_type = unassigned DNA
gaaaagccagctcgcccggggcggcggcgcagagccgggccggcgcacgaggcagccagcgcggccatgacggcggagaaggcgctgcccctgggcaatgggaaggctgctgaggaggcgcgggagtccgaggcgccgggtggcggctgcagcagcgggggcgcggcgcccgcgcgccacccgcgcgtcaagcgcgacaaggcggtccacgagcgcggccactggaacaacaaggtggagttcgtgctgagcgtggccggggagatcattgggctgggcaacgtgtggcgcttcccctacctgtgctacaagaacggaggaggggcattcctgattccctacgtggtgttttttatttgctgtggaattcctgtttttttcctggagacagctctggggcagttcacaagtgaaggtggcattacgtgttggaggaaagtttgccctttatttgaaggcattggctatgcaacacaggtgattgaggcccatctgaatgtgtactacatcatcatcctggcatgggccattttttacctgagcaactgcttcactactgagctaccctgggctacctgtgggcatgagtggaacacagagaattgtgtggagttccagaaactgaatgtgagcaactacagccatgtgtctctgcagaatgccacctcccctgtcatggagttttgggagcaccgggtcctggccatctctgacgggatcgagcacatcgggaaccttcgctgggagctggccttgtgtctcttggcagcctggaccatctgttacttctgtatctggaaggggaccaagtctacaggaaaggttgtatacgtgactgcgacattcccctacatcatgctgctgatcctcctgatacgaggggtcacgttgcccggggcctcagagggcatcaagttctacttgtaccctgacctctcccggctctccgacccccaggtctgggtagatgctggaacgcagatctttttctcctatgccatttgcctgggctgtctgaccgctctgggaagttataacaattataacaacaactgctacagggactgcatcatgctctgttgcctgaacagcggcaccagcttcgtggctgggtttgccatcttctcagtcctgggttttatggcgtacgagcagggggtacccattgctgaggtggcagagtcaggccccggcctggcctttattgcgtaccccaaggcggtcaccatgatgcctctctccccgctgtgggccaccttgttcttcatgatgctcatcttcctgggcctggacagccagtttgtgtgtgtggaaagcctggtgaccgccgtggtggacatgtaccccaaggttttccggaggggttaccggcgggagctgctcatcctagccttgtctgttatctcctattttctgggcctcgtgatgttaacagagggtggcatgtacatcttccagctctttgactcctatgccgccagtgggatgtgccttctcttcgtggccatctttgagtgcatctgcatcggctgggtgtatggaagcaaccggttctatgataacattgaagacatgattggctaccggccaccgtcgctcattaagtggtgctggatgatcatgacccctgggatctgcgcggggatcttcatcttcttcttgatcaagtacaagccactcaagtacaacaacatctacacctacccagcctggggctatggcattggctggctcatggccctgtcctccatgctctgcatcccgctctggatctgcatcacagtgtggaagacggaggggacactgcccgagaaactccagaagttgacgacccccagcacagatctgaaaatgcggggcaagcttggggtgagcccacggatggtgacagttaatgactgtgatgccaaactcaagagtgacgggaccatcgcagccatcacagagaaggagacgcacttctgagcggccaccagccatctggggctcttcttcctttcttccccccgtgtatgtaaatgaattcctgaaccccatacttcacctaatggtaggggcttgcttgttttgcacaggattaattaacaagttaattttaaggtggccactgtacactgctctaaagtcatatcccctccccgcccccagtcatcatggaagtaaccactacaaagagataacactgtacggggactgccagatcttctgtcctagggcagttttaatcaatgttttctagggattaggaagaagtgtataatattgtaaaactttttttactggggttgtgggccaggtggggtggggagtgatggctgtcctcctctgtcggccttttaatgaccgttctgtgtcccatgtatgtctctgaccatccacagccgcccctcctccataccccagggataatttttccttcaaaccttccctttccaagggacactgggtttgcagacagcaaggctatgtggcagagaagaaaaagtccagcagactcaggactcctgggctgcaggcccccctctgccctgatcccatgaagtgaccttgggcactccctttccctccctgggcctcagtttccccatctcccaaatgggaggaggagccggattgggttatttcttagggattctctttgtgtgccttgctggcttccagacctgccgtggaccttggcttcctctgaagacttgcaggcaataatctccgccctcccagttgtacctcctccccacctgcttatttaaaatcaagtttattgtagaaatggtgtggtgttgatgtgtgttttccctaaaactctaatttcatctcatctgtgggcagccctgctctctggacaccagtgggtcctcagcccccatggcaggggctcctctgtctggcctgcctttttttcctggtcagctgctcttagcgccggctctgcctctccacccttggcagggctggctggagttgctgtggggactgattttctgggtggggaagcagccatctattcttgcagccatctcagccagggtctatgtcttaggaccttcctccggccttccatgagaagcagccacagggggcctggtttcctcctaaggcccttctctgtcccaggccacctcttctccctcctcctgtcccctaacctccacctaccaccatcctccctctcagttctctcccatccttgcccctggttcaggagccattctacctgcctcagtggccaggcgcaaggctacaggtgcagtcacctgttcccggccaccttccctcccatctttggcagacagaagtctcagctctcactagagggaagacctgggcatcctgctggctcctctctccgtggggcctggagtctggtgctgttccccagccagcctggctgcagacctctctggctgataccgctcttcttctttaattggacttcatatcaagcctctgccttggtttctgagctatatgagggtggggaaggcacactcttttttcctttttccttaggttcccaatattatttggtggaaacgtgggctttctccaaaccaaggcctgagtttcctgtaagggtcctctgtttttgattcacccaaaagtctgcaaacccccagcatctctgctctggccagccctgatctgaagcctgtgtctactaagagggatgcccagtgccccactgggcaggacgggaagcctagcctgggccccctctgtgcacacagttcaggcctgcccagcttcttatgggcaagccaccatcccactctcgtctccctgagctgtctggttctgcggacccaggaagggccaggctggggccctgcttgtgtttatcctcggctgctgtcttcccagcaggccccaggcaaggaggcttcccattgctgctgctaccggttctccacagatccctgtggtccgccatcgccgacacacacacacgtcgtaatgtggctaacgcttgactcacttaacactactcatggggcagggcggagggtggattgttgctttttgttttttgtaatttcctactagtatttgggtaactttgggggtggggagggcaatgtgggggcaggggaacatgtcattgtgatgacttttttgatattcattagaaacaatacatcctttctgagatatttacagtattattaaaaaatgaaaaaggttgtactgttttgcataatgaacatttttattgggcattcaaagggtgcaagattgtctgcttactcatttttaaaaattaaagaaatgaacaatcagtgtggctattcctagcaa

SEQ ID NO: 29319 - DNA, 2794 bp, Homo sapiens
  source 1..2794: mol_type = unassigned DNA
aaaagccagctcgcccggggcggcggcgcagagccgggccggcgcacgaggcagccagcgcggccatgacggcggagaaggcgctgcccctgggcaatgggaaggctgctgaggaggcgcgggagtccgaggcgccgggtggcggctgcagcagcgggggcgcggcgcccgcgcgccacccgcgcgtcaagcgcgacaaggcggtccacgagcgcggccactggaacaacaaggtggagttcgtgctgagcgtggccggggagatcattgggctgggcaacgtgtggcgcttcccctacctgtgctacaagaacggaggaggggcattcctgattccctacgtggtgttttttatttgctgtggaattcctgtttttttcctggagacagctctggggcagttcacaagtgaaggtggcattacgtgttggaggaaagtttgccctttatttgaaggcattggctatgcaacacaggtgattgaggcccatctgaatgtgtactacatcatcatcctggcatgggccattttttacctgagcaactgcttcactactgagctaccctgggctacctgtgggcatgagtggaacacagagaattgtgtggagttccagaaactgaatgtgagcaactacagccatgtgtctctgcagaatgccacctcccctgtcatggagttttgggagtaagtggagaagaacttgtctcccttggcctgtgggggctctgtcctggttctgctcagttggtcttgcccctattcctggaaaaagcctgatccttcttgcagcctggcacttcctggcttctgtgagcattcgacagcttcggaagcaagagtgcagatcttcagaggtttcccaaaggggcagctgagagaaatgttttcttgttctttgataacatgtcagcatgcatagtgggttattagggcaggaagtacttggtgaaaggatagacagtttaaaaattcattttgagcaaaagaggagatgcagcctgtttgcaataagctaagtcaagagtgtatttagcctggaaagcataagtctctagaggggataggttagctttctttcagtagctgaagtgtcatatggaaaagaaggagatcaaatttaatggatagagattataaagaggcaggtttcaaatgtgcgtagggaagaacttggtctcatagcatagcattatctggaagcacttcagaaggttgtgagcacccatccctggaagttgaccagtatagggttgccaatcattgttgggggtgtgtctgaatccactgaaattataagtagtacttgtgtggttgggcattttcccagaaattggcatagttttatcagagttccaaaggatctgtgacccttacagggctgctatgtgtggttgtgtacattgcacactgaacaacccaaggggccataatttacattatgaaatatacattccagaattgtgtggtgcacgacctgtataaccatacacagtggccctgacttgcaagtttgttttaaaggtagaaggatcccttgccccaggtattggaaagaagtttcctgtatgggtcaaaggctggactaaatgctttctgaagcttttcaatctaaaaagtcctggcttcattgaagaagcctcccttactctgatggtgattaatagtagtatatgtgtgtgtggtggggcagtggtttatgagtgatttttatttttttcccagataccattcgtctcctgccttctctagaggtcattatgctgaatttagatttaccactctcatataaatcttcatacttttcatatatatatgccccaaatagcacctaggtctttcttgcatatttttcaaatttgtgatactggcatccattatttacattttttataacaactttatttctttgctcaatattggttcttagatgtatccatattggtacatgtagctttggttctttcatttttctatcagagtatttcattgtatgaatggcctgtgttgtatttatccaggtcctcttggtcctcttgatgggcatttaggctgttgcccatttctcactattattaagcacactgagtgaatgtctagtctgtgcttccttgagtggaattgctgggttgtagcatacatgcgttgtcagttttatcatataacgtaaaattactttagaaagaaattaatctaggccaggcatggtggctcacacctgtaattccagcactttgggaagccgaggtgggcggatcacctgaggtcaggagtttgagaccagcctggccaacatggtgaaaccctgtctttactaaaaatacaaaaattagctgggtagtggttcatgcctgcaatctcatctactcaggaggttgaagcaggagaatcacttgaacctggaaggcgaaagttgcagtgagccgagatcggcgccactgcactccagcctgggtgacagagcgagactgtctcaaaaaaaaaaaaaaaaattaatttacactccaaacaagagtttgtgagaatttctgcagcttcacattttggacagcacttggtctgttcagtttttgttttgccagtgtaatgggcattaaatgataacttactattttaaattcacatttctctaattacttgtgaggttaagcaccttttcatgttttgttttgtctgttttttgctatttgatttctgtacctgtgaacttcaggtttacattcgtttctatttggatagtttgtcttttcttacagatagaaattgttaatacattctagatattatcttttc

SEQ ID NO: 29320 - DNA, 7084 bp, Homo sapiens
  source 1..7084: mol_type = unassigned DNA
cacgccaaacacgcagccccctcccgctggagtgacaactggccagcatactctaggctgttgtccctttaaaacttgaatccaagggggtaatgatttatcaaacttgtattatcaagaaaatgtcaaaccaagggcaccttgctttgcactgacgcaaacccggcctttcccaaggagatatagaaagcgcctctcctgcctgagccaaacccagtcttgtcaatagcgggtttcaccctccaccagttcagtctgttgcctgtgtcagacatggattgcagtgctcccaaggaaatgaataaactgccagccaacagcccggaggcggcggcggcgcagggccacccggatggcccatgcgctcccaggacgagcccggagcaggagcttcccgcggctgccgccccgccgccgccacgtgtgcccaggtccgcttccaccggcgcccaaactttccagtcagcggacgcgcgagcctgcgaggctgagcggccaggagtggggtcttgcaaactcagtagcccgcgggcgcaggcggcctctgcagctctgcgggacttgagagaggcgcaaggcgcgcaggcctcgccccctcccgggagctccgggcccggcaacgcgctgcactgtaagatcccttttctgcgaggcccggagggggatgcgaacgtgagtgtgggcaagggcaccctggagcggaacaatacccctgttgtgggctgggtgaacatgagccagagcaccgtggtgctggccacggatggaatcacgtccgtgctcccgggcagcgtggccaccgttgccacccaggaggacgagcaaggggatgagaataaggcccgagggaactggtccagcaaactggacttcatcctgtccatggtggggtacgcagtggggctgggcaatgtctggaggtttccctacctggccttccagaacgggggaggtgctttcctcatcccttacctgatgatgctggctctggctggattacccatcttcttcttggaggtgtcgctgggccagtttgccagccagggaccagtgtctgtgtggaaggccatcccagctctacaaggctgtggcatcgcgatgctgatcatctctgtcctaatagccatatactacaatgtgattatttgctatacacttttctacctgtttgcctcctttgtgtctgtactaccctggggctcctgcaacaacccttggaatacgccagaatgcaaagataaaaccaaacttttattagattcctgtgttatcagtgaccatcccaaaatacagatcaagaactcgactttctgcatgaccgcttatcccaacgtgacaatggttaatttcaccagccaggccaataagacatttgtcagtggaagtgaagagtacttcaagtactttgtgctgaagatttctgcagggattgaatatcctggcgagatcaggtggccactagctctctgcctcttcctggcttgggtcattgtgtatgcatcattggctaaaggaatcaagacttcaggaaaagtggtgtacttcacggccacgttcccgtatgtcgtactcgtgatcctcctcatccgaggagtcaccctgcctggagctggagctgggatctggtacttcatcacacccaagtgggagaaactcacggatgccacggtgtggaaagatgctgccactcagattttcttctctttatctgctgcatggggaggcctgatcactctctcttcttacaacaaattccacaacaactgctacagggacactctaattgtcacctgcaccaacagtgccacaagcatctttgccggcttcgtcatcttctccgttatcggcttcatggccaatgaacgcaaagtcaacattgagaatgtggcagaccaagggccaggcattgcatttgtggtttacccggaagccttaaccaggctgcctctctctccgttctgggccatcatctttttcctgatgctcctcactcttggacttgacactatgtttgccaccatcgagaccatagtgacctccatctcagacgagtttcccaagtacctacgcacacacaagccagtgtttactctgggctgctgcatttgtttcttcatcatgggttttccaatgatcactcagggtggaatttacatgtttcagcttgtggacacctatgctgcctcctatgcccttgtcatcattgccatttttgagctcgtggggatctcttatgtgtatggcttgcaaagattctgtgaagatatagagatgatgattggattccagcctaacatcttctggaaagtctgctgggcatttgtaaccccaaccattttaacctttatcctttgcttcagcttttaccagtgggagcccatgacctatggctcttaccgctatcctaactggtccatggtgctcggatggctaatgctcgcctgttccgtcatctggatcccaattatgtttgtgataaaaatgcatctggcccctggaagatttattgagaggctgaagttggtgtgctcgccacagccggactggggcccattcttagctcaacaccgcggggagcgttacaagaacatgatcgaccccttgggaacctcttccttgggactcaaactgccagtgaaggatttggaactgggcactcagtgctagtccagtggtgtgggatggtccagacttgatcctgtttttcctctctgcctcctcctaatgttttccatagctctcctcccatttttcttcatctttcttcctacatcttggttcacatccacgcatgagagtgattatgtagaaaagtaggcatagtgtcgcatgctgcagtaaagagctacatagaccacctgaagcgctgtttgcctgtgcccatggtgactgtttctggtcaggttggtcccctgaccacacgttttaccctgcagaggaggatcagttaggtgagcactggtaggtatgcgtggttttgtcaatagagaggtatccactgtgtgatggcatggggggtgccagtaaggcatgtatagagtggccgaattacaagactttatttggacttgaacagaactgagcaatgtggtgatcttgttcagacacacaaagttcaagacaggtttttttttttttcagagagttagcagtggtcagaaaatgttttggatgtaagacaagaccattcaatttggacaccactgaggtggttaagtttatatttccagtcaccactggggatctgtttccttcgtttggatcagcaatctccagttaccactaactcagatgctacagtctacacattgtgactttgattgaactgtcagttttcttccctcaactgtctttttttgttttaaataaccacatttgtgagttcttttggtcatttcctccacctctgcccaagaagccatcatataagttgtgcctcattttgtacgttcatagtagagctccatgctcatttctacatgatatttagcaccatggttcaatgtcacgatcctgtgtttcttctctaaatgtctttctataagctgtagacaccttgtcttttgacctctgggaaaacaagacttaccctggttctgtctatatattatatatataggacacatgctcttaaaagacagataacttcttaatttttactctttttcattcacagtaaatgccaactgtggtcatagagaaatcaaagaaatggagagtttaatagaaagcaaccacaatattcactgcactggtagtacattttaggacatggtatttatagaactttctgataaatacagcttaggtaagtagcgagtgagccaattaagactatagcttttaagactacatttagccaattcaattttaagagttccctattcacagtactcattttaacggcactctaatgagagctgatcatatgtctgcagaaattggcaaagtgtaaactttattatcttcttgtatcctgaacatgcatatatgaaatttttaaaatgtgacatgtgttcatgtagtgtgtacttgtagtggtgttttctgtccttataaatatcttttgaattctgtagagatggtgagtttagtatagtgtagtctggggattttattttcccttacagtaataatatctaaacctaaaattgtttcctttaggggagatcatttcaatcattttcttcatttatcttcatagtacagggtctcaggcaaagtttttcagttcaaatcttgtatattgttgtgacattttcatcctgtttaacagcaatgaaacccaacaacaggctttaatgtacatttttttttaaaagatttcatttgttaaaaaaagtctcaactcattttactgagctctcccttttctagggcaagtatcatcgccatttgccaacatcaatatgaacttccagtttttaagagtagcttgtgaaaggttttagaaaaggaaacaaagatgggttttgaactttagattttcatgtcttttgtctgcagtgtatatttgttctcccctctccttctcctcctttccccccttgtctcccaaagctcaaacttgcttgagtctatcatagagactaaaccttgagcttcccctaaacttagctttaggaagctgagctgtggcctcacctgtctgccatgaacacagatttctctaagaaagccatattgatgagaagcccccaattactgcagcagacgtcgcacaatggtaccaaaaatgagcctctccagctgatacctggtagagtgagaggagccaggaggaataacttaggcctggaaattatctgcaggctttgcaatttgaaggttgagaaagagagcttaaatcaattagcattctctcatgggactggtatgtttgtgtcaggatgaatggtttttggctctcctgttgcctcttggctaaaactctgattgagccaatggttgcagtctgatgctggacgccaacccaatttctgctaattattgcttttgtgattaaaagaaggtgggggtggggggctcccacagatgctgccaggtttgttttgtacaaactgaaagttaacttaattgtgagaacggagacctcatcactagctgcatgttttggatttgggggcatttacatttgtgttaattatgatttgtccaggtaagatgcagtagctgctccctgagcagctgtttcccccccaccccacttcactataatttccaagatttatttccctttgtttaaagggacacgcttaggtgaaaggttccaaatttacctggaaatggttaccttgtaaatttagcttgtctaatggattgtttccatgatattaaaatgtacagtcaattggaagaaaaaaaatgaaaaaaataaaatgaataacattgttagaaactggcacctgaaaacttcccttcaaagtgggggaaaaaaccgagtagctgaggaaagactttcattggttcactgtgtagaatggtggagcattttccacttgtgagattatttcataacaccaacaaatgccagaaactcattcagaaaaaaagccatatgtgaaaaacagtaatcctgtcatatccttagaggagaaaaaatgtatatttcttaacaagtggtgttgtgacttcttatgcaaatgtcttgcatattagtaacttttattatctttaggactgtgcttatcaggtacaaatgtgtctagttctgttttattgtttctttttcctttatatttatgtattgcatgaggtctgtggtcaatgcaaaatcatgatgacctcaatgtctttgaaatttgcaatgtgtttttaatatgtaagaaatgtaatcaacttgtatttcagtaagcagcactttaaaaagagtttaacatgatgacctttaaatggataggacttgggttgtttttatggtaatgttgcattggagttgagttttcctttaattaagttcttgtttcctcatctatgtgtctctcagtgcttcctgtccacctttgctctcagcatggtttcccatgcctaaaagtaagattttcttttctctttgttcccttggctgtaggtcattgtcctcttcccagaggctagcacaataactgttgctcaatgtaagatgagatggcaagatcatactactgttgttgcacctggatttgagttgggacatgcttctttgaggcagatgattcaagagaggacgtgctgtgtggcaggtgttttgcaggaccaaaaggccaaggccaacagaggagcatttccttctctttcacactgggtatcaagcagaaaacttccaggctgggagcaaaggtgtgggtgattctgccttgatactcatttccccacaaagtggccctaggatttgtgaaagtgaagcttcctatctttcccagattttgctttaattgcccagaaaggccaagtagttttgaaatgtggtctttgctcaggtcacctctgagcagcctgcagccaaagagaaagtgttttcagattaggtattcatcacctctgaaaagcaagcagtggtttgacttgcctgccacggattaaatacatcttcaggtaaccatttgccttacaggtgtattttactgttaggatgattcttagtaattgactaaaaactgttttgtctctcatttgtttgtggtttttgcactttattatggacctgtaaaggaataggttaattcttacattgtgtacttggctaatgtcctaaatgcaggcatcttttgtgggtactgttgcccatgaataaacatatgttccctaatcaggtccttatatttttccattaactatacatgaagaaaatatattatgttacaaatgatgcatcatatatatatatatatatatatatatatcttatagattacatattatatactgcacattattcatttaagaagtcattcttgaggccctacctcaaattttctatttatgtataaaaatgcaatttattgtattatatatttgcctattatgtactgatataaattagaatttaccctaataatgtatgagttcacaaaaccctaaataaatgtcagtgtttaaaacatga

SEQ ID NO: 29321 - DNA, 2168 bp, Homo sapiens
  source 1..2168: mol_type = unassigned DNA
cccacacaccccactccagctccggagcacccgtgctgggctgcatggggactggccggaggggcagggccaggggagcgggtaggcagagcttcgggaggagatgaggtgaaagtaattgacgctgcccagcccggcagtgggagaggcaggggatgcgtcagtgtcgcgctggagctggcagaggtgtgaatgagcggcggagacacgcgggctgcgatcgctcgccccaggatggccgcggctcatggacctgtggccccctcttccccagaacagaatggtgctgtgcccagcgaggccaccaagagggaccagaacctcaaacggggcaactggggcaaccagatcgagtttgtactgacgagcgtgggctatgccgtgggcctgggcaatgtctggcgcttcccatacctctgctatcgcaacgggggaggcgccttcatgttcccctacttcatcatgctcatcttctgcgggatccccctcttcttcatggagctctccttcggccagtttgcaagccaggggtgcctgggggtctggaggatcagccccatgttcaaaggagtgggctatggtatgatggtggtgtccacctacatcggcatctactacaatgtggtcatctgcatcgccttctactacttcttctcgtccatgacgcacgtgctgccctgggcctactgcaataacccctggaacacgcatgactgcgccggtgtactggacgcctccaacctcaccaatggctctcggccagccgccttgcccagcaacctctcccacctgctcaaccacagcctccagaggaccagccccagcgaggagtactggaggctgtacgtgctgaagctgtcagatgacattgggaactttggggaggtgcggctgcccctccttggctgcctcggtgtctcctggttggtcgtcttcctctgcctcatccgaggggtcaagtcttcagggaaagtggtgtacttcacggccacgttcccctacgtggtgctgaccattctgtttgtccgcggagtgaccctggagggagcctttgacggcatcatgtactacctaaccccgcagtgggacaagatcctggaggccaaggtgtggggtgatgctgcctcccagatcttctactcactgggctgcgcgtggggaggcctcatcaccatggcttcctacaacaagttccacaataactgttaccgggacagtgtcatcatcagcatcaccaactgtgccaccagcgtctatgctggcttcgtcatcttctccatcctcggcttcatggccaatcacctgggcgtggatgtgtcccgtgtggcagaccacggccctggcctggccttcgtggcttaccccgaggccctcacactacttcccatctccccgctgtggtctctgctcttcttcttcatgcttatcctgctggggctgggcactcagttctgcctcctggagacgctggtcacagccattgtggatgaggtggggaatgagtggatcctgcagaaaaagacctatgtgaccttgggcgtggctgtggctggcttcctgctgggcatccccctcaccagccaggcaggcatctattggctgctgctgatggacaactatgcggccagcttctccttggtggtcatctcctgcatcatgtgtgtggccatcatgtacatctacgggcaccggaactacttccaggacatccagatgatgctgggattcccaccacccctcttctttcagatctgctggcgcttcgtctctcccgccatcatcttctttattctagttttcactgtgatccagtaccagccgatcacctacaaccactaccagtacccaggctgggccgtggccattggcttcctcatggctctgtcctccgtcctctgcatccccctctacgccatgttccggctctgccgcacagacggggacaccctcctccagcgtttgaaaaatgccacaaagccaagcagagactggggccctgccctcctggagcaccggacagggcgctacgcccccaccatagccccctctcctgaggacggcttcgaggtccagccactgcacccggacaaggcgcagatccccattgtgggcagtaatggctccagccgcctccaggactcccggatatgagcacagctgccagggga

SEQ ID NO: 29322 - DNA, 2330 bp, Homo sapiens
  source 1..2330: mol_type = unassigned DNA
cccacacaccccactccagctccggagcacccgtgctgggctgcatggggactggccggaggggcagggccaggggagcgggtaggcagagcttcgggaggagatgaggtgaaagtaattgacgctgcccagcccggcagtgggagaggcaggggatgcgtcagtgtcgcgctggagctggcagaggtgtgaatgagcggcggagacacgcgggctgcgatcgctcgccccaggatggccgcggctcatggacctgtggccccctcttccccagaacaggtgacgcttctccctgttcagagatccttcttcctgccacccttttctggagccactccctctacttccctagcagagtctgtcctcaaagtctggcatggggcctacaactctggtctccttccccaactcatggcccagcactccctagccatggcccagaatggtgctgtgcccagcgaggccaccaagagggaccagaacctcaaacggggcaactggggcaaccagatcgagtttgtactgacgagcgtgggctatgccgtgggcctgggcaatgtctggcgcttcccatacctctgctatcgcaacgggggaggcgccttcatgttcccctacttcatcatgctcatcttctgcgggatccccctcttcttcatggagctctccttcggccagtttgcaagccaggggtgcctgggggtctggaggatcagccccatgttcaaaggagtgggctatggtatgatggtggtgtccacctacatcggcatctactacaatgtggtcatctgcatcgccttctactacttcttctcgtccatgacgcacgtgctgccctgggcctactgcaataacccctggaacacgcatgactgcgccggtgtactggacgcctccaacctcaccaatggctctcggccagccgccttgcccagcaacctctcccacctgctcaaccacagcctccagaggaccagccccagcgaggagtactggaggctgtacgtgctgaagctgtcagatgacattgggaactttggggaggtgcggctgcccctccttggctgcctcggtgtctcctggttggtcgtcttcctctgcctcatccgaggggtcaagtcttcagggaaagtggtgtacttcacggccacgttcccctacgtggtgctgaccattctgtttgtccgcggagtgaccctggagggagcctttgacggcatcatgtactacctaaccccgcagtgggacaagatcctggaggccaaggtgtggggtgatgctgcctcccagatcttctactcactgggctgcgcgtggggaggcctcatcaccatggcttcctacaacaagttccacaataactgttaccgggacagtgtcatcatcagcatcaccaactgtgccaccagcgtctatgctggcttcgtcatcttctccatcctcggcttcatggccaatcacctgggcgtggatgtgtcccgtgtggcagaccacggccctggcctggccttcgtggcttaccccgaggccctcacactacttcccatctccccgctgtggtctctgctcttcttcttcatgcttatcctgctggggctgggcactcagttctgcctcctggagacgctggtcacagccattgtggatgaggtggggaatgagtggatcctgcagaaaaagacctatgtgaccttgggcgtggctgtggctggcttcctgctgggcatccccctcaccagccaggcaggcatctattggctgctgctgatggacaactatgcggccagcttctccttggtggtcatctcctgcatcatgtgtgtggccatcatgtacatctacgggcaccggaactacttccaggacatccagatgatgctgggattcccaccacccctcttctttcagatctgctggcgcttcgtctctcccgccatcatcttctttattctagttttcactgtgatccagtaccagccgatcacctacaaccactaccagtacccaggctgggccgtggccattggcttcctcatggctctgtcctccgtcctctgcatccccctctacgccatgttccggctctgccgcacagacggggacaccctcctccagcgtttgaaaaatgccacaaagccaagcagagactggggccctgccctcctggagcaccggacagggcgctacgcccccaccatagccccctctcctgaggacggcttcgaggtccagccactgcacccggacaaggcgcagatccccattgtgggcagtaatggctccagccgcctccaggactcccggatatgagcacagctgccagggga

SEQ ID NO: 29323 - DNA, 2162 bp, Homo sapiens
  source 1..2162: mol_type = unassigned DNA
ttttccagggtccagggcaagtgcccgcatgggctgggagccggtgtgtcctcatccctggacgccggggacgggtggagatgtcagcggatggcagcgagggtgaggagactcgaaagctacacttctcccctgtaggacatcctgacttgaccttcaaaagaatggtgctgtgcccagcgaggccaccaagagggaccagaacctcaaacggggcaactggggcaaccagatcgagtttgtactgacgagcgtgggctatgccgtgggcctgggcaatgtctggcgcttcccatacctctgctatcgcaacgggggaggcgccttcatgttcccctacttcatcatgctcatcttctgcgggatccccctcttcttcatggagctctccttcggccagtttgcaagccaggggtgcctgggggtctggaggatcagccccatgttcaaaggagtgggctatggtatgatggtggtgtccacctacatcggcatctactacaatgtggtcatctgcatcgccttctactacttcttctcgtccatgacgcacgtgctgccctgggcctactgcaataacccctggaacacgcatgactgcgccggtgtactggacgcctccaacctcaccaatggctctcggccagccgccttgcccagcaacctctcccacctgctcaaccacagcctccagaggaccagccccagcgaggagtactggaggctgtacgtgctgaagctgtcagatgacattgggaactttggggaggtgcggctgcccctccttggctgcctcggtgtctcctggttggtcgtcttcctctgcctcatccgaggggtcaagtcttcagggaaagtggtgtacttcacggccacgttcccctacgtggtgctgaccattctgtttgtccgcggagtgaccctggagggagcctttgacggcatcatgtactacctaaccccgcagtgggacaagatcctggaggccaaggtgtggggtgatgctgcctcccagatcttctactcactgggctgcgcgtggggaggcctcatcaccatggcttcctacaacaagttccacaataactgttaccgggacagtgtcatcatcagcatcaccaactgtgccaccagcgtctatgctggcttcgtcatcttctccatcctcggcttcatggccaatcacctgggcgtggatgtgtcccgtgtggcagaccacggccctggcctggccttcgtggcttaccccgaggccctcacactacttcccatctccccgctgtggtctctgctcttcttcttcatgcttatcctgctggggctgggcactcagttctgcctcctggagacgctggtcacagccattgtggatgaggtggggaatgagtggatcctgcagaaaaagacctatgtgaccttgggcgtggctgtggctggcttcctgctgggcatccccctcaccagccaggcaggcatctattggctgctgctgatggacaactatgcggccagcttctccttggtggtcatctcctgcatcatgtgtgtggccatcatgtacatctacgggcaccggaactacttccaggacatccagatgatgctgggattcccaccacccctcttctttcagatctgctggcgcttcgtctctcccgccatcatcttcctccaggctcaggtccaccgccgcctcccccagaatcctcttcacttcgcgtcgctcccggagcggaacgtgctcctccaccagctcccacagcgagggggagtgccggagcatgacccaccgacgccgccgtccccggctcggacctacgggccgcaggtcagagtgcgggaggtaccgcgggcccgccggcaacgctcaccaaaccccgcccctctatgggccccgccctctcccaagccccacccgtgctctgccgctggtcccctcggctgggattgcccgttccggaactgccagtccttggcgctctcttctgcccggcttttggccgactcggatgccgggggcccagaaaccaggcagtgggaaccagggccctagccccacctcttccgcgtggccatcacccgggaaaccacgccgcgactctagggccccgccccctcccgtgtttggtccggcgggcggcgcgtgccggctgggagttcag

SEQ ID NO: 29324 - DNA, 3130 bp, Homo sapiens
  source 1..3130: mol_type = unassigned DNA
gatgcaactttccctttaagaaagccacctgggcgcaccgcggtgcggacccagcacgcctgggccgggggctgcagcatgctcttgagatctgtggcctgaaaggcgctggaagcagagcctgtgagtgtggtccccgtcaccagagccccaacccaccgccgccatggtaggaaaaggtgccaaagggatgctgaatggtgctgtgcccagcgaggccaccaagagggaccagaacctcaaacggggcaactggggcaaccagatcgagtttgtactgacgagcgtgggctatgccgtgggcctgggcaatgtctggcgcttcccatacctctgctatcgcaacgggggaggcgccttcatgttcccctacttcatcatgctcatcttctgcgggatccccctcttcttcatggagctctccttcggccagtttgcaagccaggggtgcctgggggtctggaggatcagccccatgttcaaaggagtgggctatggtatgatggtggtgtccacctacatcggcatctactacaatgtggtcatctgcatcgccttctactacttcttctcgtccatgacgcacgtgctgccctgggcctactgcaataacccctggaacacgcatgactgcgccggtgtactggacgcctccaacctcaccaatggctctcggccagccgccttgcccagcaacctctcccacctgctcaaccacagcctccagaggaccagccccagcgaggagtactggaggctgtacgtgctgaagctgtcagatgacattgggaactttggggaggtgcggctgcccctccttggctgcctcggtgtctcctggttggtcgtcttcctctgcctcatccgaggggtcaagtcttcagggaaagtggtgtacttcacggccacgttcccctacgtggtgctgaccattctgtttgtccgcggagtgaccctggagggagcctttgacggcatcatgtactacctaaccccgcagtgggacaagatcctggaggccaaggtgtggggtgatgctgcctcccagatcttctactcactgggctgcgcgtggggaggcctcatcaccatggcttcctacaacaagttccacaataactgttaccgggacagtgtcatcatcagcatcaccaactgtgccaccagcgtctatgctggcttcgtcatcttctccatcctcggcttcatggccaatcacctgggcgtggatgtgtcccgtgtggcagaccacggccctggcctggccttcgtggcttaccccgaggccctcacactacttcccatctccccgctgtggtctctgctcttcttcttcatgcttatcctgctggggctgggcactcagttctgcctcctggagacgctggtcacagccattgtggatgaggtggggaatgagtggatcctgcagaaaaagacctatgtgaccttgggcgtggctgtggctggcttcctgctgggcatccccctcaccagccaggcaggcatctattggctgctgctgatggacaactatgcggccagcttctccttggtggtcatctcctgcatcatgtgtgtggccatcatgtacatctacgggcaccggaactacttccaggacatccagatgatgctgggattcccaccacccctcttctttcagatctgctggcgcttcgtctctcccgccatcatcttctttattctagttttcactgtgatccagtaccagccgatcacctacaaccactaccagtacccaggctgggccgtggccattggcttcctcatggctctgtcctccgtcctctgcatccccctctacgccatgttccggctctgccgcacagacggggacaccctcctccagcgtttgaaaaatgccacaaagccaagcagagactggggccctgccctcctggagcaccggacagggcgctacgcccccaccatagccccctctcctgaggacggcttcgaggtccagccactgcacccggacaaggcgcagatccccattgtgggcagtaatggctccagccgcctccaggactcccggatatgagcacagctgccaggggagtggccccacccccaccccgtgctcccaccgcagagactggtgaggcagaggccaggtgtctctgcctgccccctgccacgccctggccaggacggctgctgtcaccttggtcaccactgctagtgcagtcattcatgctcatgtccccagtgtttacatgtcctttggatgccaagatagcagctggggggaggggtgggagtggagggttgctgggaggtccaaagcactttggaggggtctcgggccaggtccccagcagcctggatggctttacgtggcctccgatacccttataccctgccctgagctgaggttctgggtgggcctccagccccatgactagtgctcctgccctcagagccgaccccagcctctgccaggcacatttggctattcctccctaggggcaggatgaagggctgggggactgcccagtgttacttgtcaggctgtgctgcccagccctgtttatctgtgtaattatttttgtaaacattgtattctctgtggtcgccacctcctcgcccccagcctcgggttcagtctgtcttccaggcctgcttgcacctcactgggctgctccggggtctctgcccctcattccaggcctggctgtcaggcccagccagcaggggcccgtgacccagcagcctgcccaaagcatttgtttctgggggatggggtgggggctgctccacaggaggtttgagcccagcaccctggggaaggggaccctgcacgacacccccttgccctccctccatgaggctaaaggcccagtcttcccaaatgtgctgccctcgttcatgtgccaaatggccccagcccacatgcccctcccctctctggagtgggagccccttctgaagtgtctgaatccctgaagtgttcatttgtccgtcctctgtgcagtgacagccccggccaagccacctctaatcctctgtagcaataacggtgcgccgcccatccctgcccattgtgcaccactaggattttaaagtccatagattttaatgaaatttctattcctgtctctga

SEQ ID NO: 29325 - DNA, 1881 bp, Homo sapiens
  source 1..1881: mol_type = unassigned DNA
gatgcaactttccctttaagaaagccacctgggcgcaccgcggtgcggacccagcacgcctgggccgggggctgcagcatgctcttgagatctgtggcctgaaaggcgctggaagcagagcctgtgagtgtggtccccgtcaccagagccccaacccaccgccgccatggtaggaaaaggtgccaaagggatgctggagtgggctatggtatgatggtggtgtccacctacatcggcatctactacaatgtggtcatctgcatcgccttctactacttcttctcgtccatgacgcacgtgctgccctgggcctactgcaataacccctggaacacgcatgactgcgccggtgtactggacgcctccaacctcaccaatggctctcggccagccgccttgcccagcaacctctcccacctgctcaaccacagcctccagaggaccagccccagcgaggagtactggaggctgtacgtgctgaagctgtcagatgacattgggaactttggggaggtgcggctgcccctccttggctgcctcggtgtctcctggttggtcgtcttcctctgcctcatccgaggggtcaagtcttcagggaaagtggtgtacttcacggccacgttcccctacgtggtgctgaccattctgtttgtccgcggagtgaccctggagggagcctttgacggcatcatgtactacctaaccccgcagtgggacaagatcctggaggccaaggtgtggggtgatgctgcctcccagatcttctactcactgggctgcgcgtggggaggcctcatcaccatggcttcctacaacaagttccacaataactgttaccgggacagtgtcatcatcagcatcaccaactgtgccaccagcgtctatgctggcttcgtcatcttctccatcctcggcttcatggccaatcacctgggcgtggatgtgtcccgtgtggcagaccacggccctggcctggccttcgtggcttaccccgaggccctcacactacttcccatctccccgctgtggtctctgctcttcttcttcatgcttatcctgctggggctgggcactcagttctgcctcctggagacgctggtcacagccattgtggatgaggtggggaatgagtggatcctgcagaaaaagacctatgtgaccttgggcgtggctgtggctggcttcctgctgggcatccccctcaccagccaggcaggcatctattggctgctgctgatggacaactatgcggccagcttctccttggtggtcatctcctgcatcatgtgtgtggccatcatgtacatctacgggcaccggaactacttccaggacatccagatgatgctgggattcccaccacccctcttctttcagatctgctggcgcttcgtctctcccgccatcatcttctttattctagttttcactgtgatccagtaccagccgatcacctacaaccactaccagtacccaggctgggccgtggccattggcttcctcatggctctgtcctccgtcctctgcatccccctctacgccatgttccggctctgccgcacagacggggacaccctcctccagcgtttgaaaaatgccacaaagccaagcagagactggggccctgccctcctggagcaccggacagggcgctacgcccccaccatagccccctctcctgaggacggcttcgaggtccagccactgcacccggacaaggcgcagatccccattgtgggcagtaatggctccagccgcctccaggactcccggatatgagcacagctgccaggggagtggccccacccccaccccgtgctcccaccgcagagactggtgaggcagaggccaggtgtctctgcctgccccctgccacgccct

SEQ ID NO: 29326 - DNA, 524 bp, Homo sapiens
  source 1..524: mol_type = unassigned DNA
aacaaaccccacacaccccactccagctccggagcacccgtgctgggctgcatggggactggccggaggggcagggccaggggagcgggtaggcagagcttcgggaggagatgaggtgtgaatgagcggcggagacacgcgggctgcgatcgctcgccccaggatggccgcggctcatggacctgtggccccctcttccccagaacagaatggtgctgtgcccagcgaggccaccaagagggaccagaacctcaaacggggcaactggggcaaccagatcgagtttgtactgacgagcgtgggctatgccgtgggcctgggcaatgtctggcgcttcccatacctctgctatcgcaacgggggaggcgccttcatgttcccctacttcatcatgctcatcttctgcgggatccccctcttcttcatggagctctccttcggccagtttgcaagccaggggtgcctgggggtctggaggatcagccccatgttcaaaggagtgggctatggtatgatggtggtgt

SEQ ID NO: 29327 - DNA, 1577 bp, Homo sapiens
  source 1..1577: mol_type = unassigned DNA
acaacaggctgtggaagagctgcgagcggcgcggcggggcgggcgaactcggcgcggcacagagcctcgggaggctgatgcaactttccctttaagaaagccacctgggcgcaccgcggtgcggacccagcacgcctgggccgggggctgcagcatgctcttgagatctgtggcctgaaaggcgctggaagcagagcctgtgagtgtggtccccgtcaccagagccccaacccaccgccgccatggtaggaaaaggtgccaaagggatgctggcgccttcatgttcccctacttcatcatgctcatcttctgcgggatccccctcttcttcatggagctctccttcggccagtttgcaagccaggggtgcctgggggtctggaggatcagccccatgttcaaaggagtgggctatggtatgatggtggtgtccacctacatcggcatctactacaatgtggtcatctgcatcgccttctactacttcttctcgtccatgacgcacgtgctgccctgggcctactgcaataacccctggaacacgcatgactgcgccggtgtactggacgcctccaacctcaccaatggctctcggccagccgccttgcccagcaacctctcccacctgctcaaccacagcctccagaggaccagccccagcgaggagtactggaggctgtacgtgctgaagctgtcagatgacattgggaactttggggaggtgcggctgcccctccttggctgcctcggtgtctcctggttggtcgtcttcctctgcctcatccgaggggtcaagtcttcagggaaagtggtgtacttcacggccacgttcccctacgtggtgctgaccattctgtttgtccgcggagtgaccctggagggagcctttgacggcatcatgtactacctaaccccgcagtgggacaagatcctggaggccaaggtgtggggtgatgctgcctcccagatcttctactcactgggctgcgcgtggggaggcctcatcaccatggcttcctacaacaagttccacaataactgttaccgggacagtgtcatcatcagcatcaccaactgtgccaccagcgtctatgctggcttcgtcatcttctccatcctcggcttcatggccaatcacctgggcgtggatgtgtcccgtgtggcagaccacggccctggcctggccttcgtggcttaccccgaggccctcacactacttcccatctccccgctgtggtctctgctcttcttcttcatgcttatcctgctggggctgggcactcagttctgcctcctggagacgctggtcacagccattgtggatgaggtggggaatgagtggatcctgcagaaaaagacctatgtgaccttgggcgtggctgtggctggcttcctgctgggcatccccctcaccagccaggcatctattggctgctgctgatggacaactatgcggccagcttctccttggtggtcatctcctgcatcatgtgtgtggccatcatgtacatctacgggcaccggaactacttccaggacatccagatgatgctgggattcccaccacccctcttctt

SEQ ID NO: 29328 - DNA, 3739 bp, Homo sapiens
  source 1..3739: mol_type = unassigned DNA
agaaagccgagggtttccgtcgcgaacccccctccccactcgctcagggctctccaatccgcagctctgcgtgcgggggcgcgcgcatccccccgccgtccgtccgtcagctgtctgtctgggtgtctatgcgggcgcagcagtgcacccttccccagcctcgggcgctgcgcagggacagacaaggcattcgcagcgccctgcccgcgctccacgcccgcagccgccagacggcagcgcctgcgtccgtgcccgccccagccggtgcgcgggagccgcgggggcaaaggcgcagtggccagcggaccatctctcgtgccctcgctctctgcgctccggggcagctgagccccggccacccgctctccaagatgaagaagctccagggagctcacctccgcaagcctgtcaccccagacctgctgatgacccccagtgaccagggcgatgtcgacctggatgtggactttgctgcacaccgggggaactggacaggcaagctggacttcctgctgtcctgcattggctactgtgtaggcctggggaatgtctggcgcttcccctatcgagcgtacaccaatggaggaggcgccttcctcgtgccctacttcctcatgctggccatctgtggcatccccctcttcttcctggagctctccctgggccagttctccagcctagggcccctggctgtctggaaaatcagccctctcttcaaaggcgccggcgcagccatgctgctcatcgtgggcttggtggccatctactacaacatgatcatcgcctacgtgctcttctacctcttcgcctccctcaccagcgacctaccctgggagcactgtggcaactggtggaacacagaactctgcctggagcacagagtctccaaggacggcaacggggccctgcccctcaacctcacctgcaccgtcagccccagcgaggagtactggagccgctacgtcctccacatccaaggcagccagggcatcggcagccctggggagatccgctggaacctctgcctctgcctgctgctggcctgggtcatcgtgttcctctgtatcctcaagggtgtgaagtcttcgggcaaggtggtgtatttcacggccacgttcccctacctcatcctgctcatgctgctggtccgcggagtcaccctcccaggggcctggaagggcatccagttctatctcaccccccagttccaccacttgttgtcttccaaggtgtggattgaagctgctcttcagatcttctattccctgggtgtgggcttcggggggctcctcacctttgcctcctacaacacgtttcaccagaacatctatagagacactttcatcgtcactctgggcaacgccatcaccagcatcctggctggctttgccatcttctccgtgctgggctacatgtctcaggagctgggcgtgcctgtggaccaagtagccaaagcaggccctggcctggcctttgtcgtctacccacaggccatgaccatgctgcctctgtcacccttctggtcctttctcttcttcttcatgcttctgactctcggcctagatagccagtttgcttttctggagaccattgtgacagctgtgacagatgagttcccatactacctgcggcccaagaaggcggtgttctcagggctcatctgcgtggccatgtacctgatggggctgatcctcaccactgatgggggcatgtactggctggtccttctggatgactacagcgccagcttcgggctgatggtggtggttatcaccacgtgccttgccgtgacacgggtgtatggcattcagaggttctgccgagacatccacatgatgctgggcttcaagccgggcctctacttcagggcctgctggctgttcctgtccccagccacgctcttggccctcatggtgtatagcatcgtcaagtaccagccctcggagtatggcagttaccgcttcccgccctgggctgagctgctgggcatcctgatgggcctgctgtcctgcctcatgatcccagctggcatgctggtggctgtgcttcgagaagagggctcactctgggagcggctccaacaggccagccggccggccatggactggggaccatcgctggaggagaaccggacgggcatgtatgtggccacgctggctgggagccagtcaccaaagccactgatggtgcacatgcgcaagtacgggggcatcaccagcttcgagaacacggccatcgaggtggaccgtgagattgcagaggaggaggagtcgatgatgtgaggcaggaggcaggcgggcagaaggccctgcccgggacctcacagtcccttcttagaagcctgcaaaggtcagctgtgccctctgggattctgagaggctatgggggggcctgccatagggatgccagtcccccagtgggggtcccttctgcagcctctgcctctcctgaaacctctgacaaccccctacacacacacacaggcatactcagacccactcaaagctgagaatgatccaactcagccctactttgcggatggacatattaaggccaggaggggagggacttgccccaggtcgcatggcagaggggacttgaacccacgcctcctgaccagccagctccctttcccatggggcagccggcaccaccttctcatctctattcagggcctacacccctccctttttggggggagcctgtccccacacaccttagcacaaccagaatcttgagttgggcagggaaggtcagggctacagaggctcttgaggctccgaggccctggggatcaaaggtcaatgagttaggtggggagaaagatccctgggggctcctgtatgcaggactcctgaaggaggtgggagctgagggccctggaggatggggaaggtttgcagagagaggaagaagagggcagggtggggaggagctctgggccagaggatgctgagctgcctgggcagagaccaagagggttggagacactagttttaccaggttacaggagggttcaagacagaaggaaaactaacagagggggagccagggatgatggggtgggcaggggatttgcatgatgaggagtatcattccagatctgtgcagagcggatcggacgggacagggtggagcggggaggcctgtgcaaagtgggaaagagctgccggtggcctgagccagggtgctggggctgcgggtggggaaaggaggccccagcacttcagacaaagaccaccccttcacccactggaccccaagccgcaaaagctggggaggtaggaagggtcactgtgagggcccagggcccctctcttcccatctcccttgtcctggtggccttcagtgtctcttccagttccaggagctgctgggaagctggccttcattgttggtgacagggcaaccatgggactaggaggtggcccatacacatggctggctggtcctgaggccacccaccttgttccaggacatgggcccgggcccggtgtgggggtagacgcagagggcagagggtagcccttggtactgtgggtccctcaaagaggagagtggggtgcagaaatgcctcagcatggctcatgcacacagcattctcccgtggggcagggttccctcatgcaacaggcctccctgtggccagcctctctgcctgtctctcgctgcgtccccccaaccccttgtgttctattggttcattgttaataaatatcaaatgaggtcacgctcctta

SEQ ID NO: 29329 - DNA, 2858 bp, Homo sapiens
  source 1..2858: mol_type = unassigned DNA
agcctcggcgtgcccccaggaccggtaaagttcctctcgccagccgcatccatgcttctggcgcggatgaacccgcaggtgcagcccgagaacaacggggcggacacgggtccagagcagccccttcgggcgcgcaaaactgcggagctgctggtggtgaaggagcgcaacggcgtccagtgcctgctggcgccccgcgacggcgacgcgcagccccgggagacctggggcaagaagatcgacttcctgctgtccgtagtcggcttcgcagtggacctggccaacgtgtggcgcttcccctacctctgctacaagaacggcggcggtgccttcttgatcccgtacacactgttccttatcatcgcggggatgcccctgttctacatggagctggctctgggacagtacaaccgggagggggctgccaccgtttggaaaatctgcccattcttcaaaggcgttggctatgctgtcatcctgatcgccctgtacgttggcttctactacaacgtcatcatcgcctggtcactctactacctcttctcctccttcaccctcaacctgccctggaccgactgtggccacacctggaacagccccaactgtaccgaccccaagctcctcaatggctccgtgcttggcaaccacaccaagtactccaagtacaagttcacgccggcagccgagttttatgagcgtggtgtcctgcaccttcacgagagcagcgggattcatgacatcggcctgccccagtggcagctcttgctctgtctgatggtcgtcgtcatcgtcttgtattttagcctctggaaaggggtgaagacatcaggaaaggtggtgtggatcacagccacgctgccttacttcgtgctgttcgtgctcctggtccatggcgtcacgctgcccggagcctccaatggcatcaatgcctacctgcacatcgacttctaccgcttgaaagaggccacggtatggattgatgccgcaactcagatatttttttccttgggggctggatttggagtattgattgcatttgccagttacaacaaatttgacaacaactgttacagggatgccctgctgaccagcagcatcaactgtatcaccagcttcgtctctgggttcgccatcttctccatccttggttacatggcccatgaacacaaggtcaacattgaggatgtggccacagaaggagctggcctagtgttcatcctgtatccagaggccatttctaccctgtctggatctacattctgggctgttgtgtttttcgtcatgctcctggcgctgggccttgacagctcaatgggaggcatggaggctgtcatcacgggcctggcagatgacttccaggtcctgaagcgacaccggaaactcttcacatttggcgtcaccttcagcactttccttctcgccctgttctgcataaccaagggtggaatttacgtcttgaccctcctggacacctttgctgcgggcacctccatcctttttgctgtcctcatggaagccatcggagtttcctggttttatggagtggacaggttcagcaacgacatccagcagatgatggggttcaggccgggtctatactggagactgtgctggaagttcgtcagtcctgccttcctcctgttcgtggttgtggtcagcatcatcaacttcaagccactcacctacgacgactacatcttcccgccctgggccaactgggtggggtggggcatcgccctgtcctccatggtcctggtgcccatctacgtcatctataagttcctcagcacgcagggctctctttgggagagactggcctatggcatcacgccagagaacgagcaccacctggtggctcagagggacatcagacagttccagatgaaaacgagacaagggagaaggagagctaccaactcttgccagatatcctgctgaacagaaatccctgaagctgccttaattctcaaaaggagttaccgctcagctgggagccagttcctgctatatgatctgttttctagcctcgctaatgtgagactgaagcattcttaccaaagaaatcatttcctagtaaagaagcccattgaactcactttatttgtttatttccttcgaaagccaccgaagagagaaaaacagagaaggtgtgtagtgtggcggaaaaagcacagcatatagttttacagacttgggtctgcagctgactagctgggtggcctggggatagtggcttcatcttttggggcttcaagattctttgtctttaaaatcaggggttatatcagatcatcaaagttcccattccattaaagaaaaccctgcatgtatccataatgatgctctcctgttaaatttacaatgaaggaaacacatcacttaactgtaagaatttcccaaaatgaactgatgaccagtgatctctctatcagagaaatgtcagatttctagcctccagaactttgatttttctggacattcaatagttcctctttctcagatatttttcaactgatgccagaaacacttggtatttgtttttaatccaacccttttgttttgaggctttggagggtaacacattttcataccctgtgagtcccaggatccacagctctgctgtggtcttagaagccactgaaacattggtgaatgtgaagtcacttttggggtgcctgccctcatccctctgtctctctgcttccgtgtaaataaagactgtttcaattgtgtcctctctgtgtcatggactgttccaatgtcatgcagatttctgtgtctgatatggattttaaaagttgttctctttgtggaatataagtgtacagaataataaataatgtttcctgggctgtgta

SEQ ID NO: 29330 - DNA, 3551 bp, Homo sapiens
  source 1..3551: mol_type = unassigned DNA
gtcagaagtctccaactcttgagttccggcgtgccccaacctctgtttccaaatttttccagcggacgcgcgcccttttctgggaaccctgcgtccgctcagcgcgcgctcatcccagtgtctaaggcgctcccgggtggtcttgggagttgcaagtagggaggaacggccgggtaaccacctcttttccctttatccaagcagagcctcggcgtgcccccaggaccggtaaagttcctctcgccagccgcatccatgcttctggcgcggatgaacccgcaggtgcagcccgagaacaacggggcggacacgggtccagagcagccccttcgggcgcgcaaaactgcggagctgctggtggtgaaggagcgcaacggcgtccagtgcctgctggcgccccgcgacggcgacgcgcagccccgggagacctggggcaagaagatcgacttcctgctgtccgtagtcggcttcgcagtggacctggccaacgtgtggcgcttcccctacctctgctacaagaacggcggcggtgccttcttgatcccgtacacactgttccttatcatcgcggggatgcccctgttctacatggagctggctctgggacagtacaaccgggagggggctgccaccgtttggaaaatctgcccattcttcaaaggcgttggctatgctgtcatcctgatcgccctgtacgttggcttctactacaacgtcatcatcgcctggtcactctactacctcttctcctccttcaccctcaacctgccctggaccgactgtggccacacctggaacagccccaactgtaccgaccccaagctcctcaatggctccgtgcttggcaaccacaccaagtactccaagtacaagttcacgccggcagccgagttttatgagcgtggtgtcctgcaccttcacgagagcagcgggattcatgacatcggcctgccccagtggcagctcttgctctgtctgatggtcgtcgtcatcgtcttgtattttagcctctggaaaggggtgaagacatcaggaaaggtggtgtggatcacagccacgctgccttacttcgtgctgttcgtgctcctggtccatggcgtcacgctgcccggagcctccaatggcatcaatgcctacctgcacatcgacttctaccgcttgaaagaggccacggtatggattgatgccgcaactcagatatttttttccttgggggctggatttggagtattgattgcatttgccagttacaacaaatttgacaacaactgttacagggatgccctgctgaccagcagcatcaactgtatcaccagcttcgtctctgggttcgccatcttctccatccttggttacatggcccatgaacacaaggtcaacattgaggatgtggccacagaaggagctggcctagtgttcatcctgtatccagaggccatttctaccctgtctggatctacattctgggctgttgtgtttttcgtcatgctcctggcgctgggccttgacagctcaatgggaggcatggaggctgtcatcacgggcctggcagatgacttccaggtcctgaagcgacaccggaaactcttcacatttggcgtcaccttcagcactttccttctcgccctgttctgcataaccaagggtggaatttacgtcttgaccctcctggacacctttgctgcgggcacctccatcctttttgctgtcctcatggaagccatcggagtttcctggttttatggagtggacaggttcagcaacgacatccagcagatgatggggttcaggccgggtctatactggagactgtgctggaagttcgtcagtcctgccttcctcctgttcgtggttgtggtcagcatcatcaacttcaagccactcacctacgacgactacatcttcccgccctgggccaactgggtggggtggggcatcgccctgtcctccatggtcctggtgcccatctacgtcatctataagttcctcagcacgcagggctctctttgggagagactggcctatggcatcacgccagagaacgagcaccacctggtggctcagagggacatcagacagttccagttgcaacactggctggccatctgagcctgcctggaggagaaggaggaacccccatgccaatgtccaggtcacaggcatccgctgcgctcccacctcggacaccatcttgggattcctcccctggaagttgtcctttctgatcctctcttcttttcccatttacaaatgatttcgtgactgtagtttttgttcaccttctgtgcatctggcctgggggctgttagctcagaggagaggagcaaacaggaaaatgacttctgttctgtccccgctgttttgggggaagtctctcccactttgggatcctgctgaagctaggttcatgaggtcggaaatccccaccacatttgcctagactttgggcacaggagttcttagtccaccaaatcagagagaggatgggcttttgatcagatacccctcccaaaaaaaaaaaaaactaaaactaaagcaaaaatcaaacaaaatctggctgagtttagtggggtggttggggaaggtacatagaccctcctcttgcccaccctagacagccctctcatgtctgaacctcagcctgggagttagatttatttgtctctaaaatgaagtcagtggatagatgctttgagggattttgagtagaaacattcatagttaattttcactctggccaatctgagtttgatgtgtgtgttctggaacattcctccagcttttggtggtcagatggcccagagatatgggggacaggaggaagagggtaaatgaaccacagtgagcaggttctaggaggtacctgcatcagacaagctggtggaggccacgtggcaagccacatctactgaggcctcatgctgctcttgctctgtaagacacggagcccagaaacccatctgcacttcctgagacctgcctggggaaacgggggcagggaccaagtgaggcctcatgtgtgtcttcaccgtgctgtcctcacaaggccaggtgggtgcccaaagggagcctgacaggctgttgtgttaatttattgttcttgcacacctgcacagcctccctctggggatcccacctggagtggaccaggggtcttgagaaatggagagttggctgcaaaaactctcatgcactagatgtggcaccttggagggcagggtgagacaagcagcccagaaatactctctcaagtggaggggagaattttgagagtggatggaacagtttggtggtttcagagaatttctaggtttctacttggatctacttctgatacaaacttgcacttggtgccctctggtggtgtttagttttagttccgtaagagaaatgattcctagtttgctaaattggtggcatctttgggaggggtttctgtttatggttagagtctcttacacccttgttggagggattcttattctgactgtgggagctcctgttgcgggatcttgggaaaaaataaagaagccgctgcattcgcacgtcaa

SEQ ID NO: 29331 - DNA, 3887 bp, Homo sapiens
  source 1..3887: mol_type = unassigned DNA
agagctggtgctgcaccggtcgctgcttccccagtccttttttggcctcctttctgacgcgacgcagaccccagttctggagagtctgtcactcgctccccgtggtgggagatcagaggcctggtgtccttgggagcggcgagcggtgctcggcgcaggatagaaagggagtgcgcgcccgagtcccccagatccctgggaacccgcgccaccctcccgcccctgcccatccccggccgcgctgtcagtctccattagcgctaacaggctccagacggagcgggccgggcgctgggttaatgcaatcggcgcgttacctggggcgcaggctacattaccagcccggcccccgccaggcacggccagaaccagtcagcccgcgccctgccggccgccccgcgcctccagctcttccccggccccgcccgaacgccacacggcggagcccagccccagcccgcgccctagagcctgccaaggcgccgccggtcgggggccggcagggcgcaaggcaccagggatcccctcgccgccggacacagcctcggcgtgcccccaggaccggtaaagttcctctcgccagccgcatccatgcttctggcgcggatgaacccgcaggtgcagcccgagaacaacggggcggacacgggtccagagcagccccttcgggcgcgcaaaactgcggagctgctggtggtgaaggagcgcaacggcgtccagtgcctgctggcgccccgcgacggcgacgcgcagccccgggagacctggggcaagaagatcgacttcctgctgtccgtagtcggcttcgcagtggacctggccaacgtgtggcgcttcccctacctctgctacaagaacggcggcggtgccttcttgatcccgtacacactgttccttatcatcgcggggatgcccctgttctacatggagctggctctgggacagtacaaccgggagggggctgccaccgtttggaaaatctgcccattcttcaaaggcgttggctatgctgtcatcctgatcgccctgtacgttggcttctactacaacgtcatcatcgcctggtcactctactacctcttctcctccttcaccctcaacctgccctggaccgactgtggccacacctggaacagccccaactgtaccgaccccaagctcctcaatggctccgtgcttggcaaccacaccaagtactccaagtacaagttcacgccggcagccgagttttatgagcgtggtgtcctgcaccttcacgagagcagcgggattcatgacatcggcctgccccagtggcagctcttgctctgtctgatggtcgtcgtcatcgtcttgtattttagcctctggaaaggggtgaagacatcaggaaaggtggtgtggatcacagccacgctgccttacttcgtgctgttcgtgctcctggtccatggcgtcacgctgcccggagcctccaatggcatcaatgcctacctgcacatcgacttctaccgcttgaaagaggccacggtatggattgatgccgcaactcagatatttttttccttgggggctggatttggagtattgattgcatttgccagttacaacaaatttgacaacaactgttacagggatgccctgctgaccagcagcatcaactgtatcaccagcttcgtctctgggttcgccatcttctccatccttggttacatggcccatgaacacaaggtcaacattgaggatgtggccacagaaggagctggcctagtgttcatcctgtatccagaggccatttctaccctgtctggatctacattctgggctgttgtgtttttcgtcatgctcctggcgctgggccttgacagctcaatgggaggcatggaggctgtcatcacgggcctggcagatgacttccaggtcctgaagcgacaccggaaactcttcacatttggcgtcaccttcagcactttccttctcgccctgttctgcataaccaagggtggaatttacgtcttgaccctcctggacacctttgctgcgggcacctccatcctttttgctgtcctcatggaagccatcggagtttcctggttttatggagtggacaggttcagcaacgacatccagcagatgatggggttcaggccgggtctatactggagactgtgctggaagttcgtcagtcctgccttcctcctgttcgtggttgtggtcagcatcatcaacttcaagccactcacctacgacgactacatcttcccgccctgggccaactgggtggggtggggcatcgccctgtcctccatggtcctggtgcccatctacgtcatctataagttcctcagcacgcagggctctctttgggagagactggcctatggcatcacgccagagaacgagcaccacctggtggctcagagggacatcagacagttccagttgcaacactggctggccatctgagcctgcctggaggagaaggaggaacccccatgccaatgtccaggtcacaggcatccgctgcgctcccacctcggacaccatcttgggattcctcccctggaagttgtcctttctgatcctctcttcttttcccatttacaaatgatttcgtgactgtagtttttgttcaccttctgtgcatctggcctgggggctgttagctcagaggagaggagcaaacaggaaaatgacttctgttctgtccccgctgttttgggggaagtctctcccactttgggatcctgctgaagctaggttcatgaggtcggaaatccccaccacatttgcctagactttgggcacaggagttcttagtccaccaaatcagagagaggatgggcttttgatcagatacccctcccaaaaaaaaaaaaaactaaaactaaagcaaaaatcaaacaaaatctggctgagtttagtggggtggttggggaaggtacatagaccctcctcttgcccaccctagacagccctctcatgtctgaacctcagcctgggagttagatttatttgtctctaaaatgaagtcagtggatagatgctttgagggattttgagtagaaacattcatagttaattttcactctggccaatctgagtttgatgtgtgtgttctggaacattcctccagcttttggtggtcagatggcccagagatatgggggacaggaggaagagggtaaatgaaccacagtgagcaggttctaggaggtacctgcatcagacaagctggtggaggccacgtggcaagccacatctactgaggcctcatgctgctcttgctctgtaagacacggagcccagaaacccatctgcacttcctgagacctgcctggggaaacgggggcagggaccaagtgaggcctcatgtgtgtcttcaccgtgctgtcctcacaaggccaggtgggtgcccaaagggagcctgacaggctgttgtgttaatttattgttcttgcacacctgcacagcctccctctggggatcccacctggagtggaccaggggtcttgagaaatggagagttggctgcaaaaactctcatgcactagatgtggcaccttggagggcagggtgagacaagcagcccagaaatactctctcaagtggaggggagaattttgagagtggatggaacagtttggtggtttcagagaatttctaggtttctacttggatctacttctgatacaaacttgcacttggtgccctctggtggtgtttagttttagttccgtaagagaaatgattcctagtttgctaaattggtggcatctttgggaggggtttctgtttatggttagagtctcttacacccttgttggagggattcttattctgactgtgggagctcctgttgcgggatcttgggaaaaaataaagaagccgctgcattcgcacgtcaa

SEQ ID NO: 29332 - DNA, 3752 bp, Homo sapiens
  source 1..3752: mol_type = unassigned DNA
agagctggtgctgcaccggtcgctgcttccccagtccttttttggcctcctttctgacgcgacgcagaccccagttctggagagtctgtcactcgctccccgtggtgggagatcagaggcctggtgtccttgggagcggcgagcggtgctcggcgcaggatagaaagggagtgcgcgcccgagtcccccagatccctgggaacccgcgccaccctcccgcccctgcccatccccggccgcgctgtcagtctccattagcgctaacaggctccagacggagcgggccgggcgctgggttaatgcaatcggcgcgttacctggggcgcaggctacattaccagcccggcccccgccaggcacggccagaaccagtcagcccgcgccctgccggccgccccgcgcctccagctcttccccggccccgcccgaacgccacacggcggagcccagccccagcccgcgccctagagcctgccaaggcgccgccggtcgggggccggcagggcgcaaggcaccagggatcccctcgccgccggacacagcctcggcgtgcccccaggaccggtaaagttcctctcgccagccgcatccatgcttctggcgcggatgaacccgcaggtgcagcccgagaacaacggggcggacacgggtccagagcagccccttcgggcgcgcaaaactgcggagctgctggtggtgaaggagcgcaacggcgtccagtgcctgctggcgccccgcgacggcgacgcgcagccccgggagacctggggcaagaagatcgacttcctgctgtccgtagtcggcttcgcagtggacctggccaacgtgtggcgcttcccctacctctgctacaagaacggcggcggtgccttcttgatcccgtacacactgttccttatcatcgcggggatgcccctgttctacatggagctggctctgggacagtacaaccgggagggggctgccaccgtttggaaaatctgcccattcttcaaaggcgttggctatgctgtcatcctgatcgccctgtacgttggcttctactacaacgtcatcatcgcctggtcactctactacctcttctcctccttcaccctcaacctgccctggaccgactgtggccacacctggaacagccccaactgtaccgaccccaagctcctcaatggctccgtgcttggcaaccacaccaagtactccaagtacaagttcacgccggcagccgagttttatgagcgtggtgtcctgcaccttcacgagagcagcgggattcatgacatcggcctgccccagtggcagctcttgctctgtctgatggtcgtcgtcatcgtcttgtattttagcctctggaaaggggtgaagacatcaggaaaggtatggattgatgccgcaactcagatatttttttccttgggggctggatttggagtattgattgcatttgccagttacaacaaatttgacaacaactgttacagggatgccctgctgaccagcagcatcaactgtatcaccagcttcgtctctgggttcgccatcttctccatccttggttacatggcccatgaacacaaggtcaacattgaggatgtggccacagaaggagctggcctagtgttcatcctgtatccagaggccatttctaccctgtctggatctacattctgggctgttgtgtttttcgtcatgctcctggcgctgggccttgacagctcaatgggaggcatggaggctgtcatcacgggcctggcagatgacttccaggtcctgaagcgacaccggaaactcttcacatttggcgtcaccttcagcactttccttctcgccctgttctgcataaccaagggtggaatttacgtcttgaccctcctggacacctttgctgcgggcacctccatcctttttgctgtcctcatggaagccatcggagtttcctggttttatggagtggacaggttcagcaacgacatccagcagatgatggggttcaggccgggtctatactggagactgtgctggaagttcgtcagtcctgccttcctcctgttcgtggttgtggtcagcatcatcaacttcaagccactcacctacgacgactacatcttcccgccctgggccaactgggtggggtggggcatcgccctgtcctccatggtcctggtgcccatctacgtcatctataagttcctcagcacgcagggctctctttgggagagactggcctatggcatcacgccagagaacgagcaccacctggtggctcagagggacatcagacagttccagttgcaacactggctggccatctgagcctgcctggaggagaaggaggaacccccatgccaatgtccaggtcacaggcatccgctgcgctcccacctcggacaccatcttgggattcctcccctggaagttgtcctttctgatcctctcttcttttcccatttacaaatgatttcgtgactgtagtttttgttcaccttctgtgcatctggcctgggggctgttagctcagaggagaggagcaaacaggaaaatgacttctgttctgtccccgctgttttgggggaagtctctcccactttgggatcctgctgaagctaggttcatgaggtcggaaatccccaccacatttgcctagactttgggcacaggagttcttagtccaccaaatcagagagaggatgggcttttgatcagatacccctcccaaaaaaaaaaaaaactaaaactaaagcaaaaatcaaacaaaatctggctgagtttagtggggtggttggggaaggtacatagaccctcctcttgcccaccctagacagccctctcatgtctgaacctcagcctgggagttagatttatttgtctctaaaatgaagtcagtggatagatgctttgagggattttgagtagaaacattcatagttaattttcactctggccaatctgagtttgatgtgtgtgttctggaacattcctccagcttttggtggtcagatggcccagagatatgggggacaggaggaagagggtaaatgaaccacagtgagcaggttctaggaggtacctgcatcagacaagctggtggaggccacgtggcaagccacatctactgaggcctcatgctgctcttgctctgtaagacacggagcccagaaacccatctgcacttcctgagacctgcctggggaaacgggggcagggaccaagtgaggcctcatgtgtgtcttcaccgtgctgtcctcacaaggccaggtgggtgcccaaagggagcctgacaggctgttgtgttaatttattgttcttgcacacctgcacagcctccctctggggatcccacctggagtggaccaggggtcttgagaaatggagagttggctgcaaaaactctcatgcactagatgtggcaccttggagggcagggtgagacaagcagcccagaaatactctctcaagtggaggggagaattttgagagtggatggaacagtttggtggtttcagagaatttctaggtttctacttggatctacttctgatacaaacttgcacttggtgccctctggtggtgtttagttttagttccgtaagagaaatgattcctagtttgctaaattggtggcatctttgggaggggtttctgtttatggttagagtctcttacacccttgttggagggattcttattctgactgtgggagctcctgttgcgggatcttgggaaaaaataaagaagccgctgcattcgcacgtcaa

SEQ ID NO: 29333 - DNA, 4516 bp, Homo sapiens
  source 1..4516: mol_type = unassigned DNA
ggtccctcccctcctggctctggggtcgggcgcgcaccccgccccgtagcgcggcccctccctggcgagcgcaaccccatccagcgggagcgcggagccgcggccgcggggaagcattaagtttattcgcctcaaagtgacgcaaaaattcttcaagagctctttggcggcggctatctagagatcagaccatgtgagggcccgcgggtacaaatacggccgcgccggcgcccctccgcacagccagcgccgccgggtgcctcgagggcgcgaggccagcccgcctgcccagcccgggaccagcctccccgcgcagcctggcaggtctcctggaggcaaggcgaccttgcttgccctctcttgcagaataacaaggggcttagccacaggagttgctggcaagtggaaagaagaacaaatgagtcaatcccgacgtgtcaatcccgacgatagagagctcggaggtgatccacaaatccaagcacccagagatcaattgggatccttggcagatggacatcagtgtcatttactaaccagcaggatggagacgacgcccttgaattctcagaagcagctatcagcgtgtgaagatggagaagattgtcaggaaaacggagttctacagaaggttgttcccaccccaggggacaaagtggagtccgggcaaatatccaatgggtactcagcagttccaagtcctggtgcgggagatgacacacggcactctatcccagcgaccaccaccaccctagtggctgagcttcatcaaggggaacgggagacctggggcaagaaggtggatttccttctctcagtgattggctatgctgtggacctgggcaatgtctggcgcttcccctacatatgttaccagaatggagggggggcattcctcctcccctacaccatcatggccatttttgggggaatcccgctcttttacatggagctcgcactgggacagtaccaccgaaatggatgcatttcaatatggaggaaaatctgcccgattttcaaagggattggttatgccatctgcatcattgccttttacattgcttcctactacaacaccatcatggcctgggcgctatactacctcatctcctccttcacggaccagctgccctggaccagctgcaagaactcctggaacactggcaactgcaccaattacttctccgaggacaacatcacctggaccctccattccacgtcccctgctgaagaattttacacgcgccacgtcctgcagatccaccggtctaaggggctccaggacctggggggcatcagctggcagctggccctctgcatcatgctgatcttcactgttatctacttcagcatctggaaaggcgtcaagacctctggcaaggtggtgtgggtgacagccaccttcccttatatcatcctttctgtcctgctggtgaggggtgccaccctccctggagcctggaggggtgttctcttctacttgaaacccaattggcagaaactcctggagacaggggtgtggatagatgcagccgctcagatcttcttctctcttggtccgggctttggggtcctgctggcttttgctagctacaacaagttcaacaacaactgctaccaagatgccctggtgaccagcgtggtgaactgcatgacgagcttcgtttcgggatttgtcatcttcacagtgctcggttacatggctgagatgaggaatgaagatgtgtctgaggtggccaaagacgcaggtcccagcctcctcttcatcacgtatgcagaagcgatagccaacatgccagcgtccactttctttgccatcatcttctttctgatgttaatcacgctgggcttggacagcacgtttgcaggcttggagggggtgatcacggctgtgctggatgagttcccacacgtctgggccaagcgccgggagcggttcgtgctcgccgtggtcatcacctgcttctttggatccctggtcaccctgacttttggaggggcctacgtggtgaagctgctggaggagtatgccacggggcccgcagtgctcactgtcgcgctgatcgaagcagtcgctgtgtcttggttctatggcatcactcagttctgcagggacgtgaaggaaatgctcggcttcagcccggggtggttctggaggatctgctgggtggccatcagccctctgtttctcctgttcatcatttgcagttttctgatgagcccgccacaactacgacttttccaatataattatccttactggagtatcatcttgggttactgcataggaacctcatctttcatttgcatccccacatatatagcttatcggttgatcatcactccagggacatttaaagagcgtattattaaaagtattaccccagaaacaccaacagaaattccttgtggggacatccgcttgaatgctgtgtaacacactcaccgagaggaaaaaggcttctccacaacctcctcctccagttctgatgaggcacgcctgccttctcccctccaagtgaatgagtttccagctaagcctgatgatggaagggccttctccacagggacacagtctggtgcccagactcaaggcctccagccacttatttccatggattcccctggacatattcccatggtagactgtgacacagctgagctggcctattttggacgtgtgaggatgtggatggaggtgatgaaaaccaccctatcatcagttaggattaggtttagaatcaagtctgtgaaagtctcctgtatcatttcttggtatgatcattggtatctgatatctgtttgcttctaaaggtttcactgttcatgaatacgtaaactgcgtaggagagaacagggatgctatctcgctagccatatattttctgagtagcatatataattttattgctggaatctactagaaccttctaatccatgtgctgctgtggcatcaggaaaggaagatgtaagaagctaaaatgaaaaatagtgtgtccatgcaagcttgtgagtctgtgtatattgttgtttcagtgtattcttatctctagtccaatattttgggcccattacaaatatatgaattccccaaatttttcttacattaacaaattctaccaactcaattgtgtatggaggttattatttgaagggtacaatcactacaacatgctctgccacccactccttttccagtgacactacttgagccacacactttcctttacaggccagcctctggcgtttgctgcacctcattgccaccttcctgtctctctgtgctaaacattcaggacagtgttccacaggcagatctggcctatttcattagtcaccatggcttggctgtgaagtacgttgaaggtggatcttgtcacatgccccttcagtgttcacctggccctctggtttaagttctgtctgccttacgtgactgagtttgactgtccaggttgctttgctcggtgaagagaggagggtaaatcggattctcgtttagcactgggttatacagatctggcaccctaacctaaaccaaggcatcttcactccaagagcagttggagagtctgggttagccttacgtggacctcgccgctcgctggcggtcacgattgtgagccctccagataatttttaaggttgagtctaagtaaggctgcttgggaaatggtcagctaagtaaatcacctttcatttcacataaggcccttaatatagataagtaaatttggcctttggtgtctcgtgactctcagaggcgtaggtagaggagcaaattaatatttgcagcatgggaattccttatcagaattttgaggggaataaatcctcatcagagacaaaaggacttaatcatctggccacctatcacttcagttctctgtataaatgaaatttaattctaacaaccttataaaaagaaggtccagacagcagaggaaacatcctgtccaattctaggttttcctcccttggcctcctttccccagcattgtctaccctggcccacttcctgcattctccccatgccctgctatttctgattctttgcttctcctagcgagatactttccttatatgatagctgctgagaagtttcccagaactgctagaggaaaagaagtggggaatttaggaaatatccctcactgacctaactccattatcttcactctttccttcttcctgccacctcatgcccattctctttactgtctagcatgctgaaagaaggaagtgatctaaatgccagcgtgttcagtggtaaatattagttggtgcaaaagaaaaaccatgattacttttgcactaacctaatagctttgcaaattttaagaacttgctttatgaagatattcggatatggattctccccaccccacatacttagacattgttcaaatatactacttttaaaaaaacaccttttcaaacagaattagcgttttgccaagtctggtattaatggaattgtacaggagctttgaaagttttcaaactttattaaact

SEQ ID NO: 29334 - DNA, 6335 bp, Homo sapiens
  source 1..6335: mol_type = unassigned DNA
acagccagcgccgccgggtgcctcgagggcgcgaggccagcccgcctgcccagcccgggaccagcctccccgcgcagcctggcaggtctcctggaggcaaggcgaccttgcttgccctctcttgcagaataacaaggggcttagccacaggagttgctggcaagtggaaagaagaacaaatgagtcaatcccgacgtgtcaatcccgacgatagagagctcggaggtgatccacaaatccaagcacccagagatcaattgggatccttggcagatggacatcagtgtcatttactaaccagcaggatggagacgacgcccttgaattctcagaagcagctatcagcgtgtgaagatggagaagattgtcaggaaaacggagttctacagaaggttgttcccaccccaggggacaaagtggagtccgggcaaatatccaatgggtactcagcagttccaagtcctggtgcgggagatgacacacggcactctatcccagcgaccaccaccaccctagtggctgagcttcatcaaggggaacgggagacctggggcaagaaggtggatttccttctctcagtgattggctatgctgtggacctgggcaatgtctggcgcttcccctacatatgttaccagaatggagggggggcattcctcctcccctacaccatcatggccatttttgggggaatcccgctcttttacatggagctcgcactgggacagtaccaccgaaatggatgcatttcaatatggaggaaaatctgcccgattttcaaagggattggttatgccatctgcatcattgccttttacattgcttcctactacaacaccatcatggcctgggcgctatactacctcatctcctccttcacggaccagctgccctggaccagctgcaagaactcctggaacactggcaactgcaccaattacttctccgaggacaacatcacctggaccctccattccacgtcccctgctgaagaattttacacgcgccacgtcctgcagatccaccggtctaaggggctccaggacctggggggcatcagctggcagctggccctctgcatcatgctgatcttcactgttatctacttcagcatctggaaaggcgtcaagacctctggcaaggtggtgtgggtgacagccaccttcccttatatcatcctttctgtcctgctggtgaggggtgccaccctccctggagcctggaggggtgttctcttctacttgaaacccaattggcagaaactcctggagacaggggtgtggatagatgcagccgctcagatcttcttctctcttggtccgggctttggggtcctgctggcttttgctagctacaacaagttcaacaacaactgctaccaagatgccctggtgaccagcgtggtgaactgcatgacgagcttcgtttcgggatttgtcatcttcacagtgctcggttacatggctgagatgaggaatgaagatgtgtctgaggtggccaaagacgcaggtcccagcctcctcttcatcacgtatgcagaagcgatagccaacatgccagcgtccactttctttgccatcatcttctttctgatgttaatcacgctgggcttggacagcacgtttgcaggcttggagggggtgatcacggctgtgctggatgagttcccacacgtctgggccaagcgccgggagcggttcgtgctcgccgtggtcatcacctgcttctttggatccctggtcaccctgacttttggaggggcctacgtggtgaagctgctggaggagtatgccacggggcccgcagtgctcactgtcgcgctgatcgaagcagtcgctgtgtcttggttctatggcatcactcagttctgcagggacgtgaaggaaatgctcggcttcagcccggggtggttctggaggatctgctgggtggccatcagccctctgtttctcctgttcatcatttgcagttttctgatgagcccgccacaactacgacttttccaatataattatccttactggagtatcatcttgggttactgcataggaacctcatctttcatttgcatccccacatatatagcttatcggttgatcatcactccagggacatttaaagagcgtattattaaaagtattaccccagaaacaccaacagaaattccttgtggggacatccgcttgaatgctgtgtaacacactcaccgagaggaaaaaggcttctccacaacctcctcctccagttctgatgaggcacgcctgccttctcccctccaagtgaatgagtttccagctaagcctgatgatggaagggccttctccacagggacacagtctggtgcccagactcaaggcctccagccacttatttccatggattcccctggacatattcccatggtagactgtgacacagctgagctggcctattttggacgtgtgaggatgtggatggaggtgatgaaaaccaccctatcatcagttaggattaggtttagaatcaagtctgtgaaagtctcctgtatcatttcttggtatgatcattggtatctgatatctgtttgcttctaaaggtttcactgttcatgaatacgtaaactgcgtaggagagaacagggatgctatctcgctagccatatattttctgagtagcatatataattttattgctggaatctactagaaccttctaatccatgtgctgctgtggcatcaggaaaggaagatgtaagaagctaaaatgaaaaatagtgtgtccatgcaagcttgtgagtctgtgtatattgttgtttcagtgtattcttatctctagtccaatattttgggcccattacaaatatatgaattccccaaatttttcttacattaacaaattctaccaactcaattgtgtatggaggttattatttgaagggtacaatcactacaacatgctctgccacccactccttttccagtgacactacttgagccacacactttcctttacaggccagcctctggcgtttgctgcacctcattgccaccttcctgtctctctgtgctaaacattcaggacagtgttccacaggcagatctggcctatttcattagtcaccatggcttggctgtgaagtacgttgaaggtggatcttgtcacatgccccttcagtgttcacctggccctctggtttaagttctgtctgccttacgtgactgagtttgactgtccaggttgctttgctcggtgaagagaggagggtaaatcggattctcgtttagcactgggttatacagatctggcaccctaacctaaaccaaggcatcttcactccaagagcagttggagagtctgggttagccttacgtggacctcgccgctcgctggcggtcacgattgtgagccctccagataatttttaaggttgagtctaagtaaggctgcttgggaaatggtcagctaagtaaatcacctttcatttcacataaggcccttaatatagataagtaaatttggcctttggtgtctcgtgactctcagaggcgtaggtagaggagcaaattaatatttgcagcatgggaattccttatcagaattttgaggggaataaatcctcatcagagacaaaaggacttaatcatctggccacctatcacttcagttctctgtataaatgaaatttaattctaacaaccttataaaaagaaggtccagacagcagaggaaacatcctgtccaattctaggttttcctcccttggcctcctttccccagcattgtctaccctggcccacttcctgcattctccccatgccctgctatttctgattctttgcttctcctagcgagatactttccttatatgatagctgctgagaagtttcccagaactgctagaggaaaagaagtggggaatttaggaaatatccctcactgacctaactccattatcttcactctttccttcttcctgccacctcatgcccattctctttactgtctagcatgctgaaagaaggaagtgatctaaatgccagcgtgttcagtggtaaatattagttggtgcaaaagaaaaaccatgattacttttgcactaacctaatagctttgcaaattttaagaacttgctttatgaagatattcggatatggattctccccaccccacatacttagacattgttcaaatatactacttttaaaaaaacaccttttcaaacagaattagcgttttgccaagtctggtattaatggaattgtacaggagctttgaaagttttcaaactttattaaactaaaaaaaaaaaatcgaaaatctctgtctgttccgcatagtatgcatttatttgacccctatttatcaatactatgatggggttttttttttttaaagaaaatttaagagtaggtaggtggattttaaaataatattttaaagaccttttatatctatatgtagcatttatagaaaaataaaaactaaaaatagaattgaattgtaacattatttaaggactgaagttttttttcttgtatcagtaagaaatacccaagaggctgggtgcagtgactcacacctgtaatcccagcactttgggaggctgcagtgggaggatcacatgacatcaggagtttgagaccagcttggccaacatagtgaaacgccgtctctattaaaaatacagaaaattagctgaatgtggtggcaggcgcctataattcctgctacttgggaggctgaggcaggagaattgcttgaacccaggaggcagaggttgcagtgagccaaacgttccactgcattccagcctggatgacaagagcgaaactccgtctcaaaaaaaaaaaaaaaaattgttatgcttagttccatggaaagactattctgaagctttaagtcttctttttctattttccatagtattgccccttccccacttcattgcttaactgtctctaaattttaatgataataatattttaaaggtcagataatgccattagaggcagagacaaacctggggaccaagctaatttctctgttattgagagcgctaaagacaggtgaactggagttttatttcctctgctagagtgaaataataccctctccaccaggcacaatggctcacacctgtaattccagcactttgggaggccaaggtgggcggatcacttgaggtcaggagttcgagaccagcctggccaacatggtgaaaccccatctctactaaaaatacaaaaattagccagccatggtggcatgctcctgtaatcccagctacttgggagactgaggtgggataatcacttgaacctgggaggcggaggttgcagtgagctgagattgtgccactgcactccagcctgggtgacagagcaagactccatctaaaaaacaaaaacaaaaacaaaaaaaccctctcaattggtttaataccacgatagaaaagataaatattttaggatggaatcttaaatatgtctgtccttttgtttcatatagttgaaatcaattcagtattgtttctacattaggtgtttcaaaaacagtcacctttgcaacagaagagctcttttgttgaaaatgattcacaatatatttcagttggaatgtcaggtggtatttctcttaccaacacctcacagaatctatgccaagctgctctaccaccaatgcaagtatttttttaaagctactaaaataaactttcttcaccagccaactctaatttggagacagtgtgcattggtgaaggacctcgtcagaataagtttgaatgtctactgaactaagaagaattttgtcgtttgggggagagaatagatggcatcagtccttcaattctgtaactgaagactccaattatagtagataagaattgtgtctagcaatttttaaacactgacagtccaaacaaaaatatttggtgaggaaggatgtcccatatttttgcttaaatatcataaacaaatatgagcatttactaattttttaaatggcattttgaaagattattcttatttacactctaaaattaaaggtgtactttatcttaagaaaatgatatattaaaaattcatattttaaaagataaaattggggaatttacagttattttgtgaatggcctttaaactatgatttgatctatatacaacttttcagaatacttttgattgtgtgttggacatatctaaaattaattttatctggcagaattaaacctaaatttatttgtataaaagagtcccctttctaaaattcatacagtgcccttgtattcatttatgcagtgtttataaatatttcaagttagattgtgagatattaataaatgatttatgctgtgaa

SEQ ID NO: 29335 - DNA, 6192 bp, Homo sapiens
  source 1..6192: mol_type = unassigned DNA
tgcccagcccgggaccagcctccccgcgcagcctggcagagtcaatcccgacgtgtcaatcccgacgatagagagctcggaggtgatccacaaatccaagcacccagagatcaattgggatccttggcagatggacatcagtgtcatttactaaccagcaggatggagacgacgcccttgaattctcagaagcagctatcagcgtgtgaagatggagaagattgtcaggaaaacggagttctacagaaggttgttcccaccccaggggacaaagtggagtccgggcaaatatccaatgggtactcagcagttccaagtcctggtgcgggagatgacacacggcactctatcccagcgaccaccaccaccctagtggctgagcttcatcaaggggaacgggagacctggggcaagaaggtggatttccttctctcagtgattggctatgctgtggacctgggcaatgtctggcgcttcccctacatatgttaccagaatggagggggggcattcctcctcccctacaccatcatggccatttttgggggaatcccgctcttttacatggagctcgcactgggacagtaccaccgaaatggatgcatttcaatatggaggaaaatctgcccgattttcaaagggattggttatgccatctgcatcattgccttttacattgcttcctactacaacaccatcatggcctgggcgctatactacctcatctcctccttcacggaccagctgccctggaccagctgcaagaactcctggaacactggcaactgcaccaattacttctccgaggacaacatcacctggaccctccattccacgtcccctgctgaagaattttacacgcgccacgtcctgcagatccaccggtctaaggggctccaggacctggggggcatcagctggcagctggccctctgcatcatgctgatcttcactgttatctacttcagcatctggaaaggcgtcaagacctctggcaaggtggtgtgggtgacagccaccttcccttatatcatcctttctgtcctgctggtgaggggtgccaccctccctggagcctggaggggtgttctcttctacttgaaacccaattggcagaaactcctggagacaggggtgtggatagatgcagccgctcagatcttcttctctcttggtccgggctttggggtcctgctggcttttgctagctacaacaagttcaacaacaactgctaccaagatgccctggtgaccagcgtggtgaactgcatgacgagcttcgtttcgggatttgtcatcttcacagtgctcggttacatggctgagatgaggaatgaagatgtgtctgaggtggccaaagacgcaggtcccagcctcctcttcatcacgtatgcagaagcgatagccaacatgccagcgtccactttctttgccatcatcttctttctgatgttaatcacgctgggcttggacagcacgtttgcaggcttggagggggtgatcacggctgtgctggatgagttcccacacgtctgggccaagcgccgggagcggttcgtgctcgccgtggtcatcacctgcttctttggatccctggtcaccctgacttttggaggggcctacgtggtgaagctgctggaggagtatgccacggggcccgcagtgctcactgtcgcgctgatcgaagcagtcgctgtgtcttggttctatggcatcactcagttctgcagggacgtgaaggaaatgctcggcttcagcccggggtggttctggaggatctgctgggtggccatcagccctctgtttctcctgttcatcatttgcagttttctgatgagcccgccacaactacgacttttccaatataattatccttactggagtatcatcttgggttactgcataggaacctcatctttcatttgcatccccacatatatagcttatcggttgatcatcactccagggacatttaaagagcgtattattaaaagtattaccccagaaacaccaacagaaattccttgtggggacatccgcttgaatgctgtgtaacacactcaccgagaggaaaaaggcttctccacaacctcctcctccagttctgatgaggcacgcctgccttctcccctccaagtgaatgagtttccagctaagcctgatgatggaagggccttctccacagggacacagtctggtgcccagactcaaggcctccagccacttatttccatggattcccctggacatattcccatggtagactgtgacacagctgagctggcctattttggacgtgtgaggatgtggatggaggtgatgaaaaccaccctatcatcagttaggattaggtttagaatcaagtctgtgaaagtctcctgtatcatttcttggtatgatcattggtatctgatatctgtttgcttctaaaggtttcactgttcatgaatacgtaaactgcgtaggagagaacagggatgctatctcgctagccatatattttctgagtagcatatataattttattgctggaatctactagaaccttctaatccatgtgctgctgtggcatcaggaaaggaagatgtaagaagctaaaatgaaaaatagtgtgtccatgcaagcttgtgagtctgtgtatattgttgtttcagtgtattcttatctctagtccaatattttgggcccattacaaatatatgaattccccaaatttttcttacattaacaaattctaccaactcaattgtgtatggaggttattatttgaagggtacaatcactacaacatgctctgccacccactccttttccagtgacactacttgagccacacactttcctttacaggccagcctctggcgtttgctgcacctcattgccaccttcctgtctctctgtgctaaacattcaggacagtgttccacaggcagatctggcctatttcattagtcaccatggcttggctgtgaagtacgttgaaggtggatcttgtcacatgccccttcagtgttcacctggccctctggtttaagttctgtctgccttacgtgactgagtttgactgtccaggttgctttgctcggtgaagagaggagggtaaatcggattctcgtttagcactgggttatacagatctggcaccctaacctaaaccaaggcatcttcactccaagagcagttggagagtctgggttagccttacgtggacctcgccgctcgctggcggtcacgattgtgagccctccagataatttttaaggttgagtctaagtaaggctgcttgggaaatggtcagctaagtaaatcacctttcatttcacataaggcccttaatatagataagtaaatttggcctttggtgtctcgtgactctcagaggcgtaggtagaggagcaaattaatatttgcagcatgggaattccttatcagaattttgaggggaataaatcctcatcagagacaaaaggacttaatcatctggccacctatcacttcagttctctgtataaatgaaatttaattctaacaaccttataaaaagaaggtccagacagcagaggaaacatcctgtccaattctaggttttcctcccttggcctcctttccccagcattgtctaccctggcccacttcctgcattctccccatgccctgctatttctgattctttgcttctcctagcgagatactttccttatatgatagctgctgagaagtttcccagaactgctagaggaaaagaagtggggaatttaggaaatatccctcactgacctaactccattatcttcactctttccttcttcctgccacctcatgcccattctctttactgtctagcatgctgaaagaaggaagtgatctaaatgccagcgtgttcagtggtaaatattagttggtgcaaaagaaaaaccatgattacttttgcactaacctaatagctttgcaaattttaagaacttgctttatgaagatattcggatatggattctccccaccccacatacttagacattgttcaaatatactacttttaaaaaaacaccttttcaaacagaattagcgttttgccaagtctggtattaatggaattgtacaggagctttgaaagttttcaaactttattaaactaaaaaaaaaaaatcgaaaatctctgtctgttccgcatagtatgcatttatttgacccctatttatcaatactatgatggggttttttttttttaaagaaaatttaagagtaggtaggtggattttaaaataatattttaaagaccttttatatctatatgtagcatttatagaaaaataaaaactaaaaatagaattgaattgtaacattatttaaggactgaagttttttttcttgtatcagtaagaaatacccaagaggctgggtgcagtgactcacacctgtaatcccagcactttgggaggctgcagtgggaggatcacatgacatcaggagtttgagaccagcttggccaacatagtgaaacgccgtctctattaaaaatacagaaaattagctgaatgtggtggcaggcgcctataattcctgctacttgggaggctgaggcaggagaattgcttgaacccaggaggcagaggttgcagtgagccaaacgttccactgcattccagcctggatgacaagagcgaaactccgtctcaaaaaaaaaaaaaaaaattgttatgcttagttccatggaaagactattctgaagctttaagtcttctttttctattttccatagtattgccccttccccacttcattgcttaactgtctctaaattttaatgataataatattttaaaggtcagataatgccattagaggcagagacaaacctggggaccaagctaatttctctgttattgagagcgctaaagacaggtgaactggagttttatttcctctgctagagtgaaataataccctctccaccaggcacaatggctcacacctgtaattccagcactttgggaggccaaggtgggcggatcacttgaggtcaggagttcgagaccagcctggccaacatggtgaaaccccatctctactaaaaatacaaaaattagccagccatggtggcatgctcctgtaatcccagctacttgggagactgaggtgggataatcacttgaacctgggaggcggaggttgcagtgagctgagattgtgccactgcactccagcctgggtgacagagcaagactccatctaaaaaacaaaaacaaaaacaaaaaaaccctctcaattggtttaataccacgatagaaaagataaatattttaggatggaatcttaaatatgtctgtccttttgtttcatatagttgaaatcaattcagtattgtttctacattaggtgtttcaaaaacagtcacctttgcaacagaagagctcttttgttgaaaatgattcacaatatatttcagttggaatgtcaggtggtatttctcttaccaacacctcacagaatctatgccaagctgctctaccaccaatgcaagtatttttttaaagctactaaaataaactttcttcaccagccaactctaatttggagacagtgtgcattggtgaaggacctcgtcagaataagtttgaatgtctactgaactaagaagaattttgtcgtttgggggagagaatagatggcatcagtccttcaattctgtaactgaagactccaattatagtagataagaattgtgtctagcaatttttaaacactgacagtccaaacaaaaatatttggtgaggaaggatgtcccatatttttgcttaaatatcataaacaaatatgagcatttactaattttttaaatggcattttgaaagattattcttatttacactctaaaattaaaggtgtactttatcttaagaaaatgatatattaaaaattcatattttaaaagataaaattggggaatttacagttattttgtgaatggcctttaaactatgatttgatctatatacaacttttcagaatacttttgattgtgtgttggacatatctaaaattaattttatctggcagaattaaacctaaatttatttgtataaaagagtcccctttctaaaattcatacagtgcccttgtattcatttatgcagtgtttataaatatttcaagttagattgtgagatattaataaatgatttatgctgtgaa

SEQ ID NO: 29336 - DNA, 6506 bp, Homo sapiens
  source 1..6506: mol_type = unassigned DNA
gagagctgcctgctcagacaacagacacgcgaggtcaggaagaagccgcttataaattaccgcttccttcgcgccgccgccaacgccgagccccgaggaccgcaagcccagaggacaagctgcgccaagagggagtgctggagctgttcacccagcgggtcagagagcgagccgggcaggccagcccccggccggcggaaccctggcacagcctgagcagatgctgcgggcggcgccgcagccaccccagatccagaaccagaaccacagcccttctgaggagctcccaaacaaagcaaggagatggccaccaaggagaagctgcagtgtctgaaagatttccacaaggacatcctgaagccctcaccagggaagagcccaggcacgcggcctgaggacgaggctgagggaaaacctccgcagagggagaagtggtctagcaagatcgactttgtgctctctgtggctggcggcttcgtgggcttgggcaacgtctggcgcttcccgtacctctgctacaagaatggtggaggtgcgtttctcataccgtattttattttcctgtttgggagcggcctgcctgtgtttttcttggagatcatcataggccagtacacctctgaagggggcatcacctgctgggaaaagatctgccccttgttctctggtatcggctatgcctccgttgtaattgtgtccctcctgaatgtctactacatcgtcatcctggcctgggccacatactacctgttccagtccttccagaaggagctgccctgggcacactgcaaccacagctggaacacacctcactgcatggaggacaccatgcgcaagaacaagagtgtctggatcaccatcagctccaccaacttcacctcccctgtcatcgagttctgggagcgcaacgtgctgagcttgtcccctggaatcgaccacccaggctctctgaaatgggacctcgctctctgccttcttttagtctggctagtgtgtttcttctgcatctggaagggcgtcaggtccactgggaaggtcgtctacttcacagccacttttccattcgccatgctcctggtgctgctggtccgagggctgacgctgccgggcgcgggcgcaggcatcaagttctatctgtatcctgacatcacccgccttgaggacccacaggtgtggattgacgctgggactcagatattcttctcttatgccatctgcctgggggctatgacctcgctggggagctacaacaagtacaagtataactcgtacagggactgtatgctgctgggatgcctgaacagtggtaccagttttgtgtctggcttcgcaattttttccatcctgggcttcatggcacaagagcaaggggtggacattgctgatgtggctgagtcaggtcctggcctggccttcattgcctacccaaaagctgtgacaatgatgccgctgcccacattttggtccattcttttttttattatgcttctcttgcttggactggatagccagtttgttgaagttgaaggacagatcacatccttggttgatctttacccatccttcctaaggaagggttatcgtcgggaaatcttcatcgccttcgtgtgtagcatcagctacctgctggggctgacgatggtgacggagggtggcatgtatgtgtttcagctctttgactactatgcagctagcggtgtatgccttttgtgggttgcattctttgaatgttttgttattgcctggatatatggaggtgataacctttatgatggtattgaggacatgattggctatcggcccgggccctggatgaagtacagctgggctgtgatcactccagttctctgtgttggatgtttcatcttctcgctcgtcaagtacgtacccctgacctacaacaaaacatacgtgtaccccaactgggccattgggctgggctggagcctggccctttcctccatgctctgcgttcccttggtcatcgtcatccgcctctgccagactgaggggccgttccttgtgagagtcaagtacctgctgaccccaagggaacccaaccgctgggctgtggagcgcgagggagccacaccttacaactctcgcaccgtcatgaacggcgctctcgtgaaaccgacccacatcattgtggagaccatgatgtgagctctctcgggtcgacggggccggcggctttcctgctgtttactaacattagattctcataggaccaggtttacagagctttatatttgcactaggatttttttttttttgtaattgtcacagaaaatgtaattgtgggtatgtgtgcgtgcgtgtgtgtgtgtgtgtgtatcgtgtgtgtgtgttttgttttgatttgggggatattttgtacaaaaagaaaacccacgggaagatgtccgtggagaggcagagctttcatactgaattagatgtattttatgggaatttggtaaatttttctttgtatttttttttttacatataagtatatatacacttagagattgtcatatacttttaccacttgaattgatcttcttgccagcaatagatctcattttcaaaagcaattcttcggtgctgtgtagctggcagaaagttctgtccagtaaacgcaggatggaattttcctgggactctacacccatcttaaggtggtataccttccaaatcctggttcagatggaagaaatagcaggagagaggacccattagctggcagacccagggggaagaaaggagggctgtgaggagatacctcattaaacttggcttagtgaagaagagagatgccaaaggaatgaaccaacccttcacataaaggagactggctgaagctgaatgaggaggccctatagcagaagtctgattctaagagcagtagaaacttgtaccagaagcaaaatcccacttttaattttgagatggtgagtggatagtcagtagaccgtcagaaccactggccagagagggagctgctagagatccaagaaggctggcaggagtgaggctcacaactcagcctcgcaagaggtggcagaggcacaggaggccacagtccttcctggggcattccaggcagagaaggagcagaggctctcccggcaggagctggggtctcagggctcagatgagtctgttgcatttgaatggggtcatagcaggttctggtcattccccaagcaacatctcagcatctcttaaagttgcctgcaggaatgaagcatgacatacctgttgagggactaggggagtggtggggaggtgagtggaccaaaggatataggccccaggcatgcagatgggcccggtgtcggggaggggtgctttctttcctcatctccccactccccactctcagcctgggagactcctgccaagccctcattaaagatgccaccctgggctgccctggcacctagcaaggcacaccaagaacagcttttgagtctgtatcctccactgggggaagtgctcccagttcagaacaagggcagcccgtggtgctgacctaggatataacaaagctcttcacttcaaaacccctgcaatagctgggtttacagacatttaccacctgcggacccaaaagagaaggcctaggagagttttctagaaggttgggattgtcagggtcctggcccctcagaactggcttgatcaagggccttatgtggagcagaggttgtctctgaaccaggagagaaggtactatacctttcaaatccccagggcagacacacccccacccagcccctatttggacctaaactgtgccatttgaacagtcacttccaagctcagtctaaatgaaaccgaaacgtgaccacgcacaaaggcagtcactgcctcgaggggtgcagaccgcagaattttcacagcaggggctcttggaaccctggaaacccccttcttaaatttgggaggaggagtatgcctttggtgtccccctcccaaggggcaattctgaaccccatctttggcaggcatacatatttcactgtttccaaagctatctactctgccaaacaacacccagtcctattccaaactctcaacgattctatcttgttcctgtttttctatgtatttatggttgccgtttgtgtctgatttgattttactgttttttccctgattttatggagtagcattgtgacctgttttcctttgtcttatataactttagtaaactaaccactgtcaatgattgagggcaggtggcacgtggggaagaggggacttggcacgcagtggctacctgggcatttgtggtcatttcagtttccatctccccagcgggggctccctgggtgaaaggccacagtattttgggttggtaggcaaattgcaacattctggacatggcctgaggaaggcctcttcttataagattctcagaccaaattctagaccaaagacacaggcagaccaagtccccaggccccgcctggaaggaagtcgttcctcaactctccccaaggcacctgtctccaatcagagccctctcgcccagccagccctggctctgtgtgcagagcatagctctgcgagtacctgtgtaataatgctcaaccttcatgtctccgtataaacgaaactttccatgagagctcatgactctggtccacctgtctatagagaatgggcaaagtccttcacctgctttctgcttgggatgggtcagaaatgctgatgcccgcacatagcccagccagccagatctggaaaggaagcgagggggttgtttaaatcaattttttaagatgaagaagtgggagacactgcgttgagatgggccatgctagggccacagagatttcctgacggtcagggagagaagggcctccagggtcccctaacccaacgcccttgttgtaaatgaggtaactgaggctcagggaggcactgtgagccaggaatggattttcttgaaacagctctagctgcaggttctccgaggtaggtgcagggaatggtgagtgtctaaccagggctacatccagcaacatcctcaaggtcttcctgacaaccaaagacaagcctttatggaaaaggaaatgcgctcccctccatgttcagggatgaggggagcagcagcagccacactcccaccatcctcacagaattcctggacccatgcggtggctccgtgagctgggtgactccagcctcacctgcacaccccagccctgcacggggccctccttcctcccagcagcccttggtgagctaggaattgagatccctgtttgtgaaagagggaactgaggtgcagagaagccagaggtgtgccagatccttaggcaggatttagatgaagtcgccctggctccagactgaccccgaggctctgcggggagtttccaggcagcaggaagtggccttggatgctctccttccaggacagcataacccctgggccatgtgcagctccttcactgccccctggatccccagcatacccccaaagacagtggggaaacacaaggggagagcacagcatggcccctccagcccacttcagggcactcttgtatcacccgggtaccgccacactggtcccccacccagccagcatctcccagcacagcccctctccctggggaaatgctctgggtagccagtctaaaggcagaggcacctaactgctccccgcagcccaccccacccaagattcagacacaagccaggaaaggacccaagagaaaatccttcaaggtggcctgaggtcccatccctccctcagacccatgtggtcccaggccaggctgcctgggacacggtaaataccactgtgtgcaaaaatcgaagtacaaaaccacaagactaaacaaaacaaacccagagagccaaacttgtagaggtgggcagtccagaaagcagggggcagccctccccctttccttctctccctgatcctcagaatatatattgttgtaataggaagcatttttgcattgttctcttgtgggtgtcactacagacatgttctggcgtgttctccgagggatggagcatcctgttatatatttgacttcaaattgagatgttggcttcattttttttttttacccaattaatctcccaatccctagcaactgtgactctgtatttagcacaagagaaagctgagaatgtgggtcttgcctccttccagaaatatgtctggctcatcaggacatttttttaaaacttcaaaatatttttaagatattttaaacttttataaaaaaaaaatcaaccaacaagagacttttctgaggaggaacatttgtatttgaacaagatccttggtgtgtagttcagtcttgcagtatacaagcttttgtgtataaatgttttatgatatgattccctgtattttgcaggggtttttttctcttttgctttttagataaatatgtatatcaatattttaaattcatctttgctttttttagaggagtttgtaatcaccttataacatgaaaataaacatttcctttttaacatcc

SEQ ID NO: 29337 - DNA, 1260 bp, Homo sapiens
  source 1..1260: mol_type = unassigned DNA
cagacaacagacacgcgaggtcaggaagaagccgcttataaattaccgcttccttcgcgccgccgccaacgccgagccccgaggaccgcaagcccagaggacaagctgcgccaagagggagtgctggagctgttcacccagcgggtcagagagcgagccgggcaggccagcccccggccggcggaaccctggcacagcctgagcagatgctgcgggcggcgccgcagccaccccagatccagaaccagaaccacagcccttctgaggagctcccaaacaaagcaaggagatggccaccaaggagaagctgcagtgtctgaaagatttccacaaggacatcctgaagccctcaccagggaagagcccaggcacgcggcctgaggacgaggctgagggaaaacctccgcagagggagaagtggtctagcaagatcgactttgtgctctctgtggctggcggcttcgtgggcttgggcaacgtctggcgcttcccgtacctctgctacaagaatggtggaggtgcgtttctcataccgtattttattttcctgtttgggagcggcctgcctgtgtttttcttggagatcatcataggccagtacacctctgaagggggcatcacctgctgggaaaagatctgccccttgttctctggtatcggctatgcctccgttgtaattgtgtccctcctgaatgtctactacatcgtcatcctggcctgggccacatactacctgttccagtccttccagaaggagctgccctgggcacactgcaaccacagctggaacacacctcactgcatggaggacaccatgcgcaagaacaagagtgtctggatcaccatcagctccaccaacttcacctcccctgtcatcgagttctgggagtaaggccacctcattgaagcaaggaggaggacatgggtggggcagagaggatggcccacttccttatctcctcccctgggatacaggagccactgtcttcgggggagtgggaggagggtgcagatctggagataaatttatgcctttggccatagacaggactggaatcccagttctgccacttactggctgtttgaccttaggcaagccactcctcctttctgagcctcagtttctttacctgtaagataaaaagaatgaatcattactaccctgtgaggcaggtatgcatacttatgttgtctaaaaatgatacagttttcttaatgtattttaggaaaaaatatattctgttattgcacagagaaaaa

SEQ ID NO: 29338 - DNA, 1991 bp, Homo sapiens
  source 1..1991: mol_type = unassigned DNA
atttttccacccagcaggatgggtgatgctgagagctgcctgctcagacaacagacacgcgaggtcaggaagaagccgcttataaattaccgcttccttcgcgccgccgccaacgccgagccccgaggaccgcaagcccagaggacaagctgcgccaagagggagtgctggagctgttcacccagcgggtcagagagcgagccgggcaggccagcccccggccggcggaaccctggcacagcctgagcagatgctgcgggcggcgccgcagccaccccagatccagaaccagaaccacagcccttctgaggagctcccaaacaaagcaaggagatggccaccaaggagaagctgcagtgtctgaaagatttccacaaggacatcctgaagccctcaccagggaagagcccaggcacgcggcctgaggacgaggctgagggaaaacctccgcagagggagaagtggtctagcaagatcgactttgtgctctctgtggctggcggcttcgtgggcttgggcaacgtctggcgcttcccgtacctctgctacaagaatggtggaggtgcgtttctcataccgtattttattttcctgtttgggagcggcctgcctgtgtttttcttggagatcatcataggccagtacacctctgaagggggcatcacctgctgggaaaagatctgccccttgttctctggtatcggctatgcctccgttgtaattgtgtccctcctgaatgtctactacatcgtcatcctggcctgggccacatactacctgttccagtccttccagaaggagctgccctgggcacactgcaaccacagctggaacacacctcactgcatggaggacaccatgcgcaagaacaagagtgtctggatcaccatcagctccaccaacttcacctcccctgtcatcgagttctgggagcgcaacgtgctgagcttgtcccctggaatcgaccacccaggctctctgaaatgggacctcgctctctgccttcttttagtctggctagtgtgtttcttctgcatctggaagggcgtcaggtccactgggaaggtcgtctacttcacagccacttttccattcgccatgctcctggtgctgctggtccgagggctgacgctgccgggcgcgggcgcaggcatcaagttctatctgtatcctgacatcacccgccttgaggacccacaggtgtggattgacgctgggactcagatattcttctcttatgccatctgcctgggggctatgacctcgctggggagctacaacaagtacaagtataactcgtacaggtcctggcctggccttcattgcctacccaaaagctgtgacaatgatgccgctgcccacattttggtccattcttttttttattatgcttctcttgcttggactggatagccagtttgttgaagttgaaggacagatcacatccttggttgatctttacccatccttcctaaggaagggttatcgtcgggaaatcttcatcgccttcgtgtgtagcatcagctacctgctggggctgacgatggtgacggagggtggcatgtatgtgtttcagctctttgactactatgcagctagcggtgtatgccttttgtgggttgcattctttgaatgttttgttattgcctggatatatggtgagtacagattttttcatgtcctttctcaaggctctcctttgggcttctctacttagaagcttcagaagcagagaatactaacagaaattcaatttgagttgaacagtaggccctccctacctagactacacaaataatctcactgtagccacactgaagatcctcctggtgctaaaggtgtgaggtgtgactggatgttttcacagtttcagaacttggttgtgcaggacctggaatactccttttttatctccttgaggccttgggtttgagtttgggctgtgcctaagattgcacacctagggtttggagtgtgcctcagattgccag

SEQ ID NO: 29339 - DNA, 458 bp, Homo sapiens
  source 1..458: mol_type = unassigned DNA
aagtccaacagtgcgcgactccccaggtcaggagaagccccgatgtgtgcagaatctgcagatggggctgctctcggccctgcctctggctgtggaaacaggcctccaagtacccaagaaagcaaggagatggccaccaaggagaagctgcagtgtctgaaagatttccacaaggacatcctgaagccctcaccagggaagagcccaggcacgcggcctgaggacgaggctgagggaaaacctccgcagagggagaagtggtctagcaagatcgactttgtgctctctgtggctggcggcttcgtgggcttgggcaacgtctggcgcttcccgtacctctgctacaagaatggtggaggtgcgtttctcataccgtattttattttcctgtttgggagcggcctgcctgtgtttttcttggagatcatcataggccagtacacctctgaagggggcat

SEQ ID NO: 29340 - DNA, 6534 bp, Homo sapiens
  source 1..6534: mol_type = unassigned DNA
atttttccacccagcaggatgggtgatgctgagagctgcctgctcagacaacagacacgcgaggtcaggaagaagccgcttataaattaccgcttccttcgcgccgccgccaacgccgagccccgaggaccgcaagcccagaggacaagctgcgccaagagggagtgctggagctgttcacccagcgggtcagagagcgagccgggcaggccagcccccggccggcggaaccctggcacagcctgagcagatgctgcgggcggcgccgcagccaccccagatccagaaccagaaccacagcccttctgaggagctcccaaaccaaggagatggccaccaaggagaagctgcagtgtctgaaagatttccacaaggacatcctgaagccctcaccagggaagagcccaggcacgcggcctgaggacgaggctgagggaaaacctccgcagagggagaagtggtctagcaagatcgactttgtgctctctgtggctggcggcttcgtgggcttgggcaacgtctggcgcttcccgtacctctgctacaagaatggtggaggtgcgtttctcataccgtattttattttcctgtttgggagcggcctgcctgtgtttttcttggagatcatcataggccagtacacctctgaagggggcatcacctgctgggaaaagatctgccccttgttctctggtatcggctatgcctccgttgtaattgtgtccctcctgaatgtctactacatcgtcatcctggcctgggccacatactacctgttccagtccttccagaaggagctgccctgggcacactgcaaccacagctggaacacacctcactgcatggaggacaccatgcgcaagaacaagagtgtctggatcaccatcagctccaccaacttcacctcccctgtcatcgagttctgggagcgcaacgtgctgagcttgtcccctggaatcgaccacccaggctctctgaaatgggacctcgctctctgccttcttttagtctggctagtgtgtttcttctgcatctggaagggcgtcaggtccactgggaaggtcgtctacttcacagccacttttccattcgccatgctcctggtgctgctggtccgagggctgacgctgccgggcgcgggcgcaggcatcaagttctatctgtatcctgacatcacccgccttgaggacccacaggtgtggattgacgctgggactcagatattcttctcttatgccatctgcctgggggctatgacctcgctggggagctacaacaagtacaagtataactcgtacagggactgtatgctgctgggatgcctgaacagtggtaccagttttgtgtctggcttcgcaattttttccatcctgggcttcatggcacaagagcaaggggtggacattgctgatgtggctgagtcaggtcctggcctggccttcattgcctacccaaaagctgtgacaatgatgccgctgcccacattttggtccattcttttttttattatgcttctcttgcttggactggatagccagtttgttgaagttgaaggacagatcacatccttggttgatctttacccatccttcctaaggaagggttatcgtcgggaaatcttcatcgccttcgtgtgtagcatcagctacctgctggggctgacgatggtgacggagggtggcatgtatgtgtttcagctctttgactactatgcagctagcggtgtatgccttttgtgggttgcattctttgaatgttttgttattgcctggatatatggaggtgataacctttatgatggtattgaggacatgattggctatcggcccgggccctggatgaagtacagctgggctgtgatcactccagttctctgtgttggatgtttcatcttctcgctcgtcaagtacgtacccctgacctacaacaaaacatacgtgtaccccaactgggccattgggctgggctggagcctggccctttcctccatgctctgcgttcccttggtcatcgtcatccgcctctgccagactgaggggccgttccttgtgagagtcaagtacctgctgaccccaagggaacccaaccgctgggctgtggagcgcgagggagccacaccttacaactctcgcaccgtcatgaacggcgctctcgtgaaaccgacccacatcattgtggagaccatgatgtgagctctctcgggtcgacggggccggcggctttcctgctgtttactaacattagattctcataggaccaggtttacagagctttatatttgcactaggatttttttttttttgtaattgtcacagaaaatgtaattgtgggtatgtgtgcgtgcgtgtgtgtgtgtgtgtgtatcgtgtgtgtgtgttttgttttgatttgggggatattttgtacaaaaagaaaacccacgggaagatgtccgtggagaggcagagctttcatactgaattagatgtattttatgggaatttggtaaatttttctttgtatttttttttttacatataagtatatatacacttagagattgtcatatacttttaccacttgaattgatcttcttgccagcaatagatctcattttcaaaagcaattcttcggtgctgtgtagctggcagaaagttctgtccagtaaacgcaggatggaattttcctgggactctacacccatcttaaggtggtataccttccaaatcctggttcagatggaagaaatagcaggagagaggacccattagctggcagacccagggggaagaaaggagggctgtgaggagatacctcattaaacttggcttagtgaagaagagagatgccaaaggaatgaaccaacccttcacataaaggagactggctgaagctgaatgaggaggccctatagcagaagtctgattctaagagcagtagaaacttgtaccagaagcaaaatcccacttttaattttgagatggtgagtggatagtcagtagaccgtcagaaccactggccagagagggagctgctagagatccaagaaggctggcaggagtgaggctcacaactcagcctcgcaagaggtggcagaggcacaggaggccacagtccttcctggggcattccaggcagagaaggagcagaggctctcccggcaggagctggggtctcagggctcagatgagtctgttgcatttgaatggggtcatagcaggttctggtcattccccaagcaacatctcagcatctcttaaagttgcctgcaggaatgaagcatgacatacctgttgagggactaggggagtggtggggaggtgagtggaccaaaggatataggccccaggcatgcagatgggcccggtgtcggggaggggtgctttctttcctcatctccccactccccactctcagcctgggagactcctgccaagccctcattaaagatgccaccctgggctgccctggcacctagcaaggcacaccaagaacagcttttgagtctgtatcctccactgggggaagtgctcccagttcagaacaagggcagcccgtggtgctgacctaggatataacaaagctcttcacttcaaaacccctgcaatagctgggtttacagacatttaccacctgcggacccaaaagagaaggcctaggagagttttctagaaggttgggattgtcagggtcctggcccctcagaactggcttgatcaagggccttatgtggagcagaggttgtctctgaaccaggagagaaggtactatacctttcaaatccccagggcagacacacccccacccagcccctatttggacctaaactgtgccatttgaacagtcacttccaagctcagtctaaatgaaaccgaaacgtgaccacgcacaaaggcagtcactgcctcgaggggtgcagaccgcagaattttcacagcaggggctcttggaaccctggaaacccccttcttaaatttgggaggaggagtatgcctttggtgtccccctcccaaggggcaattctgaaccccatctttggcaggcatacatatttcactgtttccaaagctatctactctgccaaacaacacccagtcctattccaaactctcaacgattctatcttgttcctgtttttctatgtatttatggttgccgtttgtgtctgatttgattttactgttttttccctgattttatggagtagcattgtgacctgttttcctttgtcttatataactttagtaaactaaccactgtcaatgattgagggcaggtggcacgtggggaagaggggacttggcacgcagtggctacctgggcatttgtggtcatttcagtttccatctccccagcgggggctccctgggtgaaaggccacagtattttgggttggtaggcaaattgcaacattctggacatggcctgaggaaggcctcttcttataagattctcagaccaaattctagaccaaagacacaggcagaccaagtccccaggccccgcctggaaggaagtcgttcctcaactctccccaaggcacctgtctccaatcagagccctctcgcccagccagccctggctctgtgtgcagagcatagctctgcgagtacctgtgtaataatgctcaaccttcatgtctccgtataaacgaaactttccatgagagctcatgactctggtccacctgtctatagagaatgggcaaagtccttcacctgctttctgcttgggatgggtcagaaatgctgatgcccgcacatagcccagccagccagatctggaaaggaagcgagggggttgtttaaatcaattttttaagatgaagaagtgggagacactgcgttgagatgggccatgctagggccacagagatttcctgacggtcagggagagaagggcctccagggtcccctaacccaacgcccttgttgtaaatgaggtaactgaggctcagggaggcactgtgagccaggaatggattttcttgaaacagctctagctgcaggttctccgaggtaggtgcagggaatggtgagtgtctaaccagggctacatccagcaacatcctcaaggtcttcctgacaaccaaagacaagcctttatggaaaaggaaatgcgctcccctccatgttcagggatgaggggagcagcagcagccacactcccaccatcctcacagaattcctggacccatgcggtggctccgtgagctgggtgactccagcctcacctgcacaccccagccctgcacggggccctccttcctcccagcagcccttggtgagctaggaattgagatccctgtttgtgaaagagggaactgaggtgcagagaagccagaggtgtgccagatccttaggcaggatttagatgaagtcgccctggctccagactgaccccgaggctctgcggggagtttccaggcagcaggaagtggccttggatgctctccttccaggacagcataacccctgggccatgtgcagctccttcactgccccctggatccccagcatacccccaaagacagtggggaaacacaaggggagagcacagcatggcccctccagcccacttcagggcactcttgtatcacccgggtaccgccacactggtcccccacccagccagcatctcccagcacagcccctctccctggggaaatgctctgggtagccagtctaaaggcagaggcacctaactgctccccgcagcccaccccacccaagattcagacacaagccaggaaaggacccaagagaaaatccttcaaggtggcctgaggtcccatccctccctcagacccatgtggtcccaggccaggctgcctgggacacggtaaataccactgtgtgcaaaaatcgaagtacaaaaccacaagactaaacaaaacaaacccagagagccaaacttgtagaggtgggcagtccagaaagcagggggcagccctccccctttccttctctccctgatcctcagaatatatattgttgtaataggaagcatttttgcattgttctcttgtgggtgtcactacagacatgttctggcgtgttctccgagggatggagcatcctgttatatatttgacttcaaattgagatgttggcttcattttttttttttacccaattaatctcccaatccctagcaactgtgactctgtatttagcacaagagaaagctgagaatgtgggtcttgcctccttccagaaatatgtctggctcatcaggacatttttttaaaacttcaaaatatttttaagatattttaaacttttataaaaaaaaaatcaaccaacaagagacttttctgaggaggaacatttgtatttgaacaagatccttggtgtgtagttcagtcttgcagtatacaagcttttgtgtataaatgttttatgatatgattccctgtattttgcaggggtttttttctcttttgctttttagataaatatgtatatcaatattttaaattcatctttgctttttttagaggagtttgtaatcaccttataacatgaaaataaacatttcctttttaacatccaa

SEQ ID NO: 29341 - DNA, 6409 bp, Homo sapiens
  source 1..6409: mol_type = unassigned DNA
atttttccacccagcaggatgggtgatgctgagagctgcctgctcagacaacagacacgcgaggtcaggaagaagccgcttataaattaccgcttccttcgcgccgccgccaacgccgagccccgaggaccgcaagcccagaggacaagctgcgccaagagggagtgctggagctgttcacccagcgggtcagagagcgagccgggcaggccagcccccggccggcggaaccctggcacagcctgagcagatgctgcgggcggcgccgcagccaccccagatccagaaccagaaccacagcccttctgaggagctcccaaaccaaggagatggccaccaaggagaagctgcagtgtctgaaagatttccacaaggacatcctgaagccctcaccagggaagagcccaggcacgcggcctgaggacgaggctgagggaaaacctccgcagagggagaagtggtctagcaagatcgactttgtgctctctgtggctggcggcttcgtgggcttgggcaacgtctggcgcttcccgtacctctgctacaagaatggtggaggtgcgtttctcataccgtattttattttcctgtttgggagcggcctgcctgtgtttttcttggagatcatcataggccagtacacctctgaagggggcatcacctgctgggaaaagatctgccccttgttctctggtatcggctatgcctccgttgtaattgtgtccctcctgaatgtctactacatcgtcatcctggcctgggccacatactacctgttccagtccttccagaaggagctgccctgggcacactgcaaccacagctggaacacacctcactgcatggaggacaccatgcgcaagaacaagagtgtctggatcaccatcagctccaccaacttcacctcccctgtcatcgagttctgggagcgcaacgtgctgagcttgtcccctggaatcgaccacccaggctctctgaaatgggacctcgctctctgccttcttttagtctggctagtgtgtttcttctgcatctggaagggcgtcaggtccactgggaaggtcgtctacttcacagccacttttccattcgccatgctcctggtgctgctggtccgagggctgacgctgccgggcgcgggcgcaggcatcaagttctatctgtatcctgacatcacccgccttgaggacccacaggtgtggattgacgctgggactcagatattcttctcttatgccatctgcctgggggctatgacctcgctggggagctacaacaagtacaagtataactcgtacaggtcctggcctggccttcattgcctacccaaaagctgtgacaatgatgccgctgcccacattttggtccattcttttttttattatgcttctcttgcttggactggatagccagtttgttgaagttgaaggacagatcacatccttggttgatctttacccatccttcctaaggaagggttatcgtcgggaaatcttcatcgccttcgtgtgtagcatcagctacctgctggggctgacgatggtgacggagggtggcatgtatgtgtttcagctctttgactactatgcagctagcggtgtatgccttttgtgggttgcattctttgaatgttttgttattgcctggatatatggaggtgataacctttatgatggtattgaggacatgattggctatcggcccgggccctggatgaagtacagctgggctgtgatcactccagttctctgtgttggatgtttcatcttctcgctcgtcaagtacgtacccctgacctacaacaaaacatacgtgtaccccaactgggccattgggctgggctggagcctggccctttcctccatgctctgcgttcccttggtcatcgtcatccgcctctgccagactgaggggccgttccttgtgagagtcaagtacctgctgaccccaagggaacccaaccgctgggctgtggagcgcgagggagccacaccttacaactctcgcaccgtcatgaacggcgctctcgtgaaaccgacccacatcattgtggagaccatgatgtgagctctctcgggtcgacggggccggcggctttcctgctgtttactaacattagattctcataggaccaggtttacagagctttatatttgcactaggatttttttttttttgtaattgtcacagaaaatgtaattgtgggtatgtgtgcgtgcgtgtgtgtgtgtgtgtgtatcgtgtgtgtgtgttttgttttgatttgggggatattttgtacaaaaagaaaacccacgggaagatgtccgtggagaggcagagctttcatactgaattagatgtattttatgggaatttggtaaatttttctttgtatttttttttttacatataagtatatatacacttagagattgtcatatacttttaccacttgaattgatcttcttgccagcaatagatctcattttcaaaagcaattcttcggtgctgtgtagctggcagaaagttctgtccagtaaacgcaggatggaattttcctgggactctacacccatcttaaggtggtataccttccaaatcctggttcagatggaagaaatagcaggagagaggacccattagctggcagacccagggggaagaaaggagggctgtgaggagatacctcattaaacttggcttagtgaagaagagagatgccaaaggaatgaaccaacccttcacataaaggagactggctgaagctgaatgaggaggccctatagcagaagtctgattctaagagcagtagaaacttgtaccagaagcaaaatcccacttttaattttgagatggtgagtggatagtcagtagaccgtcagaaccactggccagagagggagctgctagagatccaagaaggctggcaggagtgaggctcacaactcagcctcgcaagaggtggcagaggcacaggaggccacagtccttcctggggcattccaggcagagaaggagcagaggctctcccggcaggagctggggtctcagggctcagatgagtctgttgcatttgaatggggtcatagcaggttctggtcattccccaagcaacatctcagcatctcttaaagttgcctgcaggaatgaagcatgacatacctgttgagggactaggggagtggtggggaggtgagtggaccaaaggatataggccccaggcatgcagatgggcccggtgtcggggaggggtgctttctttcctcatctccccactccccactctcagcctgggagactcctgccaagccctcattaaagatgccaccctgggctgccctggcacctagcaaggcacaccaagaacagcttttgagtctgtatcctccactgggggaagtgctcccagttcagaacaagggcagcccgtggtgctgacctaggatataacaaagctcttcacttcaaaacccctgcaatagctgggtttacagacatttaccacctgcggacccaaaagagaaggcctaggagagttttctagaaggttgggattgtcagggtcctggcccctcagaactggcttgatcaagggccttatgtggagcagaggttgtctctgaaccaggagagaaggtactatacctttcaaatccccagggcagacacacccccacccagcccctatttggacctaaactgtgccatttgaacagtcacttccaagctcagtctaaatgaaaccgaaacgtgaccacgcacaaaggcagtcactgcctcgaggggtgcagaccgcagaattttcacagcaggggctcttggaaccctggaaacccccttcttaaatttgggaggaggagtatgcctttggtgtccccctcccaaggggcaattctgaaccccatctttggcaggcatacatatttcactgtttccaaagctatctactctgccaaacaacacccagtcctattccaaactctcaacgattctatcttgttcctgtttttctatgtatttatggttgccgtttgtgtctgatttgattttactgttttttccctgattttatggagtagcattgtgacctgttttcctttgtcttatataactttagtaaactaaccactgtcaatgattgagggcaggtggcacgtggggaagaggggacttggcacgcagtggctacctgggcatttgtggtcatttcagtttccatctccccagcgggggctccctgggtgaaaggccacagtattttgggttggtaggcaaattgcaacattctggacatggcctgaggaaggcctcttcttataagattctcagaccaaattctagaccaaagacacaggcagaccaagtccccaggccccgcctggaaggaagtcgttcctcaactctccccaaggcacctgtctccaatcagagccctctcgcccagccagccctggctctgtgtgcagagcatagctctgcgagtacctgtgtaataatgctcaaccttcatgtctccgtataaacgaaactttccatgagagctcatgactctggtccacctgtctatagagaatgggcaaagtccttcacctgctttctgcttgggatgggtcagaaatgctgatgcccgcacatagcccagccagccagatctggaaaggaagcgagggggttgtttaaatcaattttttaagatgaagaagtgggagacactgcgttgagatgggccatgctagggccacagagatttcctgacggtcagggagagaagggcctccagggtcccctaacccaacgcccttgttgtaaatgaggtaactgaggctcagggaggcactgtgagccaggaatggattttcttgaaacagctctagctgcaggttctccgaggtaggtgcagggaatggtgagtgtctaaccagggctacatccagcaacatcctcaaggtcttcctgacaaccaaagacaagcctttatggaaaaggaaatgcgctcccctccatgttcagggatgaggggagcagcagcagccacactcccaccatcctcacagaattcctggacccatgcggtggctccgtgagctgggtgactccagcctcacctgcacaccccagccctgcacggggccctccttcctcccagcagcccttggtgagctaggaattgagatccctgtttgtgaaagagggaactgaggtgcagagaagccagaggtgtgccagatccttaggcaggatttagatgaagtcgccctggctccagactgaccccgaggctctgcggggagtttccaggcagcaggaagtggccttggatgctctccttccaggacagcataacccctgggccatgtgcagctccttcactgccccctggatccccagcatacccccaaagacagtggggaaacacaaggggagagcacagcatggcccctccagcccacttcagggcactcttgtatcacccgggtaccgccacactggtcccccacccagccagcatctcccagcacagcccctctccctggggaaatgctctgggtagccagtctaaaggcagaggcacctaactgctccccgcagcccaccccacccaagattcagacacaagccaggaaaggacccaagagaaaatccttcaaggtggcctgaggtcccatccctccctcagacccatgtggtcccaggccaggctgcctgggacacggtaaataccactgtgtgcaaaaatcgaagtacaaaaccacaagactaaacaaaacaaacccagagagccaaacttgtagaggtgggcagtccagaaagcagggggcagccctccccctttccttctctccctgatcctcagaatatatattgttgtaataggaagcatttttgcattgttctcttgtgggtgtcactacagacatgttctggcgtgttctccgagggatggagcatcctgttatatatttgacttcaaattgagatgttggcttcattttttttttttacccaattaatctcccaatccctagcaactgtgactctgtatttagcacaagagaaagctgagaatgtgggtcttgcctccttccagaaatatgtctggctcatcaggacatttttttaaaacttcaaaatatttttaagatattttaaacttttataaaaaaaaaatcaaccaacaagagacttttctgaggaggaacatttgtatttgaacaagatccttggtgtgtagttcagtcttgcagtatacaagcttttgtgtataaatgttttatgatatgattccctgtattttgcaggggtttttttctcttttgctttttagataaatatgtatatcaatattttaaattcatctttgctttttttagaggagtttgtaatcaccttataacatgaaaataaacatttcctttttaacatccaa

SEQ ID NO: 29342 - DNA, 5174 bp, Homo sapiens
  source 1..5174: mol_type = unassigned DNA
actcgccctccagcttctgccctgcctgctgtgtgcggagccgtccagcgaccaccatggtgaggctcgtgctgcccaaccccggcctagacgcccggatcccgtccctggctgagctggagaccatcgagcaggaggaggccagctcccggccgaagtgggacaacaaggcgcagtacatgctcacctgcctgggcttctgcgtgggcctcggcaacgtgtggcgcttcccctacctgtgtcagagccacggaggaggagccttcatgatcccgttcctcatcctgctggtcctggagggcatccccctgctgtacctggagttcgccatcgggcagcggctgcggcggggcagcctgggtgtgtggagctccatccacccggccctgaagggcctaggcctggcctccatgctcacgtccttcatggtgggactgtattacaacaccatcatctcctggatcatgtggtacttattcaactccttccaggagcctctgccctggagcgactgcccgctcaacgagaaccagacagggtatgtggacgagtgcgccaggagctcccctgtggactacttctggtaccgagagacgctcaacatctccacgtccatcagcgactcgggctccatccagtggtggatgctgctgtgcctggcctgcgcatggagcgtcctgtacatgtgcaccatccgcggcatcgagaccaccgggaaggccgtgtacatcacctccacgctgccctatgtcgtcctgaccatcttcctcatccgaggcctgacgctgaagggcgccaccaatggcatcgtcttcctcttcacgcccaacgtcacggagctggcccagccggacacctggctggacgcgggcgcacaggtcttcttctccttctccctggccttcgggggcctcatctccttctccagctacaactctgtgcacaacaactgcgagaaggactcggtgattgtgtccatcatcaacggcttcacatcggtgtatgtggccatcgtggtctactccgtcattgggttccgcgccacacagcgctacgacgactgcttcagcacgaacatcctgaccctcatcaacgggttcgacctgcctgaaggcaacgtgacccaggagaactttgtggacatgcagcagcggtgcaacgcctccgaccccgcggcctacgcgcagctggtgttccagacctgcgacatcaacgccttcctctcagaggccgtggagggcacaggcctggccttcatcgtcttcaccgaggccatcaccaagatgccgttgtccccactgtggtctgtgctcttcttcattatgctcttctgcctggggctgtcatctatgtttgggaacatggagggcgtcgttgtgcccctgcaggacctcagagtcatccccccgaagtggcccaaggaggtgctcacaggcctcatctgcctggggacattcctcattggcttcatcttcacgctgaactccggccagtactggctctccctgctggacagctatgccggctccattcccctgctcatcatcgccttctgcgagatgttctctgtggtctacgtgtacggtgtggacaggttcaataaggacatcgagttcatgatcggccacaagcccaacatcttctggcaagtcacgtggcgcgtggtcagccccctgctcatgctgatcatcttcctcttcttcttcgtggtagaggtcagtcaggagctgacctacagcatctgggaccctggctacgaggaatttcccaaatcccagaagatctcctacccgaactgggtgtatgtggtggtggtgattgtggctggagtgccctccctcaccatccctggctatgccatctacaagctcatcaggaaccactgccagaagccaggggaccatcaggggctggtgagcacactgtccacagcctccatgaacggggacctgaagtactgagaaggcccatcccacggcgtgccatacactggtgtcagggaaggaggaaccagcaagacctgtggggtgggggccgggctgcacctgcatgtgtgtaagcgtgagtgtatgctcgtgtgtgagtgtgtgtattgtacacgcatgtgccatgtgtgcagatatgtatcgtgtgtgcatgtacatgcatgggcactgtgtgagtgtgcacgtgtatgcacacatatacatgtgtgtgggtgtgtgtattgtatgtgcatgtgccatgtgtgcagatgtgtcatgttgtgtgtgtgcatgtacatgtatggacattgtgtgagtgtgcaagtgtgcatgcatatacatgtgtgcgatatttgctgcccgtgtgtgtgcatgtatatatagacatacatgcctatgttgtgtgtggtgtgcatatgtgtgaacacacacgtgtatacatgcatgcacatgtgctcgtacaatgggtgtccacatgcacgtgtatatgtatatctgtgagtgtatatacatgcatgcaattgtgtgtatgtgtgttctgtgtgtgcgtttgcaagtatatatgcacatgtgtatatgtacatgtatgcctgtgtgacgtgtgtatatgtgagcatgtgtacgtgtgtgtatacgtgtgttgtgtatatgtgtgtgtctgtacctgtttgtgtatatgtgtgtgatgtgtgctcgtgtgtgtgcatattcaggcaggtgtgcatttgtgcatgccagtgtgtatgtatgtgcgcatatggacacgcatggacacgcatatggacacatatggacacacatatggacacgtgtggatatgtgtgcgtacacgtcgctgggacacatgcctgccactcggggcccagctgccctctgtgtttgtccttgccacagtcacggggtgcatgtgcagaggggagcagaccactggggacgtgctgtgccctgcacgtgcccgggggaagcggaagctgcagctggggtgggggcagcacctctatgcttcatctctgtgggtggcaggagacaaaagcacagggtactatcttggctcctgggagcgactcttgctacccacccccacccatccccttccccttggtgttgacctttgacctgggggttcccagagccctgtagccctcgacccggagcagcctctcggaagccggagtgggcagttgctggcgattctgagaaaacttggccgcatccaccggggccctgcctccagtcggccgctgccgagtctctgcgttctggccgcttcccggcttaatgaatgccagccatttaatcattgctcctgccaccacaaatagatgagcagttaaataaaactcaacttggcataattcaaggcaaataccactctgtgcattttcttaagaggacatgagctgtgtgaatttttagccagcctttggaaaagatgggttacagggtaactcaaccctggctgccatccttgggcactgtgtgtgtccagggcaccttggaggaccgtgcagcccccagaagcttccagctcccgcaccactcagtgaagcccagcctggcgcctgccctgcccccgtcacgggatgggcccccattggggttcaacattccatcgcagccaaaggcagtcggcacttgggacatctgcttccacggacaggtcacctccgctttgcacggaagaatctggatgcttacattaaactggtgttctgagagttcctacggacaggtcacctccgctttgcatggaagaatctggatgcttacattaaactggtgttctgagagttcctacggacaggtcacctctgctttccatagaagaatctggacgcttacattaaactgatgttctgagaattcctacaggcaggactgaaagcctggtgtgtgccagtatgatgttccacccacagaaacctggtcacaatcgtcccttccagcaccccatccagcagtgactgcacacactgagtcccctaccagcccctttcaccctgctgactgtcactgggccctgggatgcgcaagactccacagcagcagaggtggggggacatatcacagcctctgcccccggctgtgatgccaccgaggggctcgcctgctgatggcttcaacagggtctcacctcatcttttcctgctctttggccctggatcgagaaaatttccatcagtgccccattaatatgctgccctgtggcatctgcccaggaggccctgccaggcgtgcacaggtgtgcattggtgtaccctggcatgcacaggtgtgcactgatgtgccctggcatccattggtgtaccctggtgtgcctgccataggaccctgggcgggagctcccatctcatctacatctcctgattcatgcgttgtttcataggtttcaatgtctctgtaaatgtggtagaaatgcaggctttatgggcataaagtgtacatttctaaataaatcccttctattgagtatgctcaccctagaagttactgttgtccagacgtagagggatgagtgagccagtgacctcagacgggatggtggggacggcaggtccagctcctgcctcctcctggggggtctggctttgggggcttgctccgaagaggccatggcccaggcctgtggcctcacaatggggaccaaccagctcttctcatcttcttccctcacacttcctctcactcaaataagaaccttccaaaaatgtgtccacctgggcccctgccctgggactcatggatttggagttgtggccacacggttgaggggtgcagtgtccagtggaatggggcaattgcgggcctgggggcccttggcctgtccgtggcgggagcatctgcaaggaggagccccagagtccagggagcactgtggggagctccttagagctgaactcacccggcgtcaactcatcaaccctccacccatggacaggggtgcccccagcacaggagaggactcagccctctgcccccacgcacggtgggtgcctgtcaccctgtcctgcccagcggcccgagggcagcagtgggtgtgagggcagcccccggcctcccaagagcagctgagaggatccctgcgggaatccgggcttcgggtgcatgcgatctgatctgagttgtttctgacagtgacagagtgacaatctataagtatctcaagatcaaatggttaaataaaacataagaaatttaaaacgattaaaa

SEQ ID NO: 29343 - DNA, 5247 bp, Homo sapiens
  source 1..5247: mol_type = unassigned DNA
actgccgtgccggacccccgagccggagccgagcgcgccgaggccggggccatggagaaagcgcggccgctgtgggccaactcgctacagttcgtgttcgcctgcatctcgtacgccgtgggcctgggcaacgtgtggcgattcccgtacctgtgccagatgtacggcggaggtagtttcctggtcccctacatcatcatgcttatcgtggagggaatgccgctcttgtacctggaactggctgtggggcagcgcatgcggcagggcagcatcggcgcctggaggaccatcagcccgtacctcagtggtgtcggggtcgccagcgtggtggtctctttcttcctctccatgtactacaacgtcatcaacgcctgggccttctggtacctcttccactccttccaggatcccctgccgtggtctgtctgcccactgaatggtaaccacacgggctacgatgaggagtgtgagaaggcgtcctccacacagtacttctggtacaggaaaaccctcaatatctcgccgtccctccaggagaacgggggtgtgcagtgggagccggcgctgtgcctcctcctggcctggctggtggtgtacctgtgcatcctgcgtggcaccgagtccactggcaagatagagcagctggccaaccccaaggcctggatcaatgcagccacccagatcttcttctcacttggcctgggcttcggcagcctgatcgccttcgccagctacaatgagccatccaacaactgccagaagcacgccatcatcgtgtccctcatcaacagcttcacctccatatttgccagcattgtcaccttctccatctatggcttcaaggccaccttcaattatgaaaactgcttgaagaaggtgagtctgctgctgaccaacacttttgaccttgaagatggctttttgacagccagcaacctggagcaggtgaagggctacctcgcatctgcctacccaagcaaatacagcgagatgttcccgcaaatcaaaaactgcagcttggaatcggagctagacacggccgtccagggcactggcctggcattcatcgtctacacagaggccattaaaaacatggaggtgtcccagctgtggtcggtgctctacttcttcatgctgctgatgctgggcattgggagcatgctggggaacacagcggccatcctcacccctctgacagacagcaagatcatctccagccacctgcccaaggaggccatctcaggtctggtgtgccttgtcaactgtgccattggcatggtgttcacgatggaggctgggaactactggtttgacatattcaacgactacgcggccacactgtccctgctgctcatcgtgctggtggagacgattgccgtgtgctacgtgtacgggctgaggagatttgaaagtgaccttaaggccatgaccggccgagctgtgagctggtactggaaggtgatgtgggctggcgtaagcccactgctgattgtcagcctctttgtcttctacctgagcgactacatcctcacggggaccctgaagtatcaagcctgggacgcctcccagggccagctcgtgaccaaagattacccggcctatgcactggctgtcatcgggctgcttgtggcctcctccaccatgtgcatccccctggcggccctggggacttttgttcagcgtcgcctcaagaggggagacgcagaccccgtggcctgagatgtgggcttcccagccgctcacggttttacagatactatttacaggcggaaactcctcggctgctttttcaaatgcttaagccaggagtgctcagcccatcaacttcctgagtgtctaaagaagatgaggaaggtgtgcaggaagaaaactcccttgggagaacgcacaccctcccgtggtggctgttcctccctgtcacctgcctcctcatcatggaagggggtgggctatgaaagccggtctcaaagataactgcatccttcattccaggaaagccctagaattagggcacattgcaaactgaaatatgactataattcttatgggaccaaatttaagcaatttttgtttttggctgaagagacaccaaaatattagaggacaaatatttttagatccatttaaggagttttgaagtgcctaagatgacctatttgtcagtggtgcaaaattaattctcttcttttttgagttgtagtgaatatgcaatttctgtgttccccttccaccctttaaatcttaggatgacaagttataaagaaagaagatctttgtctgggacccccaaagggatcctttctctaaggtctctgacggtgggtccaggaccagacctctctacaaaaaattgccccaactacagtttgcaaccccaaaccacattagaagtctgtgcagacatccctccgtggtgtgtgtcttggtgcattggaaaaggagtcaggagccactgtgaggtgagaatgaaagtggatctcagctgggcacggtggctcacgcctgtaatcctagcaccttgggggtcaaggtgggtggatcacttgaggtcaggagtttgaggccagcctggccaacatggcgaaaccccatttctactaaaaatacaaaaaaattagctgggagtggtggcataggcctgtaattccagctactctggctgctgaggcacaagaatcatttgaacctaggaggtggcggttgctgtgagccaagatcatgccactccactccagtctgggcgacagagcaagactctgactcaaaaaaaaaaaaaaaaaaaagtggctctgactttcccataggcttaatattacatttggacatcgtggccaactctatcaagaccacaaataccacttacaattaattttaaattattcatctgtacatagttttctaaaatgtatataattcaaacagagcatcttgtaactgaagacacaccatatctatgatatcgcattagtccatgtggggaaaagaaagatcagattgttactgtgtctgtgtagaaaaggaagacataagaaactccattttgatctgtactaagaaaaattgtttctgctttgagatgttgttagcctataactttagccccaactctgtgctcacagaaacatgcgctgtaatgaatcaaagtttaatggatttagggctgtgcaggatgtgccttgttaacaatatgtttgcaggctgtatgcttggtagaagtcatcgccattctccattctcgattaaccagggacacaatgcacagcagaaagctgcagggacctctgcccaagaaagcctgggtattgtccaaggtttcccccccactgagacagcctgagatatggcctcatgggaagggaaagacctgactgtcccccagcccgacacctgtaaagggtcggtgctgaggaggaatagtgaaggagggaggcctctttgcagttgagataagaggaaggcttctgtctcctgcttgtccctggtaatggaatgtctcggtgtaaaaagctgaccattcccattcgttctattctgagataggagaaaaccgccctgtggctggaggtgagatatgctggcagcaatactgctctgttactccttgctacactgagatgtttgggtaaagagaaacataaatctagcctacgtgcacatctgggcacagtacctttccttgaacttattcgtgatacagattcctttgctcacatgtttccctgctgaccttcttcccacctgttgccctgctacactcccctcgctaagacagtaaaaataatgatcaataaatactgagggaactcagaggccagcgccggtgcgggtcctccacatgctgagcgccggtcctgggcccactgttctttctctatactttgtctctgtgtcttatttcttttctcaaaaaaatttttctttttttaactgcaataaagtaggtcgttacccctaaagtgagcgagtcccttcctgctctaacgtccagtgcttccttgagatcatggaattctggagagtttctgtggatatatttgcacagatatctttgaagacacaaacactcacctgggacgttggccggagatgtctttttatttttgtgctgtaaaattctcttacagcaaaaataggctttagaaaggtcttctactgtcttcagcaaccatctcatcttccagcttcacctgattgtccagttatcatacatttgactttcaaatgtatgaaccagcatgtaccccatggatttaatcttatctaccccgtggattcaatcttcttatcagaaggttcttttatgtcaaaaaacctgctgtcaaggcttgaagagccggcacactcaatggcaaacacagcaccgagtctgctctgaatcctggaggatctggccctcctctcaatccccactcacagtcaccgtcttacaactcagggccacctgggatcagtcatcagtcagggtgcgtaagccttgaataccaggtagcctcaggagtgaaaagataaatgtcctagatcattaccttattcagtgtccccaccttgcagcgcattccaaccacctgggagcatttaaaactccagatgcccacaccacaccctggggccacccatcagaccttctggaagcaagacctgggcctccatggccccaaaaactccctaggtgatccgatgtgcagccaaatctgagaggccccatttaaaaaagaaagaacatgggtggtacattgaggagtatttacattttataaaatgacttaaaaatttgaaggcatttttgagcatttccaattatatggaagagttacttctacggaatagtttttgctcatggaactcaaacagatgaagcaccactgttacagaataatgtgctccagatgaaaatgtctcgtttctgtgaatttcatgaagagcagaacatttctcaagaatcctcttgagccagtaatcaatcctgtctcaaaaaatgttctttgccatttcctagatactgcacaaaagtggccatgtcgacatttgtccacccaccctccaataagctggagcgacaaagggacattccatccctgtacccttagtggtagccatgacacgatggccagatcatggactccggaaagctttctgtttttactggaaacatagcaaaccttgatttagctccaagaaattgagtagggaaatatttgttttttagcaattgtcatagtaaataaaactctaagcaagtgtatctac

SEQ ID NO: 29344 - DNA, 5423 bp, Homo sapiens
  source 1..5423: mol_type = unassigned DNA
gaggcgcggggccacccccaagccgagccggggtgggacggcgcgcctggcgaccgcgcactgagactgccgtgccggacccccgagccggagccgagcgcgccgaggccggggccatggagaaagcgcggccgctgtgggccaactcgctacagttcgtgttcgcctgcatctcgtacgccgtgggcctgggcaacgtgtggcgattcccgtacctgtgccagatgtacggcggaggtagtttcctggtcccctacatcatcatgcttatcgtggagggaatgccgctcttgtacctggaactggctgtggggcagcgcatgcggcagggcagcatcggcgcctggaggaccatcagcccgtacctcagtggtgtcggggtcgccagcgtggtggtctctttcttcctctccatgtactacaacgtcatcaacgcctgggccttctggtacctcttccactccttccaggatcccctgccgtggtctgtctgcccactgaatggtaaccacacgggctacgatgaggagtgtgagaaggcgtcctccacacagtacttctggtacaggaaaaccctcaatatctcgccgtccctccaggagaacgggggtgtgcagtgggagccggcgctgtgcctcctcctggcctggctggtggtgtacctgtgcatcctgcgtggcaccgagtccactggcaaggtggtgtatttcacggcgtcactgccctattgcgtgctcatcatctacctcatcaggggcctcacgctccacggagccaccaatggcctcatgtacatgttcactcccaagatagagcagctggccaaccccaaggcctggatcaatgcagccacccagatcttcttctcacttggcctgggcttcggcagcctgatcgccttcgccagctacaatgagccatccaacaactgccagaagcacgccatcatcgtgtccctcatcaacagcttcacctccatatttgccagcattgtcaccttctccatctatggcttcaaggccaccttcaattatgaaaactgcttgaagaaggtgagtctgctgctgaccaacacttttgaccttgaagatggctttttgacagccagcaacctggagcaggtgaagggctacctcgcatctgcctacccaagcaaatacagcgagatgttcccgcaaatcaaaaactgcagcttggaatcggagctagacacggccgtccagggcactggcctggcattcatcgtctacacagaggccattaaaaacatggaggtgtcccagctgtggtcggtgctctacttcttcatgctgctgatgctgggcattgggagcatgctggggaacacagcggccatcctcacccctctgacagacagcaagatcatctccagccacctgcccaaggaggccatctcaggtctggtgtgccttgtcaactgtgccattggcatggtgttcacgatggaggctgggaactactggtttgacatattcaacgactacgcggccacactgtccctgctgctcatcgtgctggtggagacgattgccgtgtgctacgtgtacgggctgaggagatttgaaagtgaccttaaggccatgaccggccgagctgtgagctggtactggaaggtgatgtgggctggcgtaagcccactgctgattgtcagcctctttgtcttctacctgagcgactacatcctcacggggaccctgaagtatcaagcctgggacgcctcccagggccagctcgtgaccaaagattacccggcctatgcactggctgtcatcgggctgcttgtggcctcctccaccatgtgcatccccctggcggccctggggacttttgttcagcgtcgcctcaagaggggagacgcagaccccgtggcctgagatgtgggcttcccagccgctcacggttttacagatactatttacaggcggaaactcctcggctgctttttcaaatgcttaagccaggagtgctcagcccatcaacttcctgagtgtctaaagaagatgaggaaggtgtgcaggaagaaaactcccttgggagaacgcacaccctcccgtggtggctgttcctccctgtcacctgcctcctcatcatggaagggggtgggctatgaaagccggtctcaaagataactgcatccttcattccaggaaagccctagaattagggcacattgcaaactgaaatatgactataattcttatgggaccaaatttaagcaatttttgtttttggctgaagagacaccaaaatattagaggacaaatatttttagatccatttaaggagttttgaagtgcctaagatgacctatttgtcagtggtgcaaaattaattctcttcttttttgagttgtagtgaatatgcaatttctgtgttccccttccaccctttaaatcttaggatgacaagttataaagaaagaagatctttgtctgggacccccaaagggatcctttctctaaggtctctgacggtgggtccaggaccagacctctctacaaaaaattgccccaactacagtttgcaaccccaaaccacattagaagtctgtgcagacatccctccgtggtgtgtgtcttggtgcattggaaaaggagtcaggagccactgtgaggtgagaatgaaagtggatctcagctgggcacggtggctcacgcctgtaatcctagcaccttgggggtcaaggtgggtggatcacttgaggtcaggagtttgaggccagcctggccaacatggcgaaaccccatttctactaaaaatacaaaaaaattagctgggagtggtggcataggcctgtaattccagctactctggctgctgaggcacaagaatcatttgaacctaggaggtggcggttgctgtgagccaagatcatgccactccactccagtctgggcgacagagcaagactctgactcaaaaaaaaaaaaaaaaaaaagtggctctgactttcccataggcttaatattacatttggacatcgtggccaactctatcaagaccacaaataccacttacaattaattttaaattattcatctgtacatagttttctaaaatgtatataattcaaacagagcatcttgtaactgaagacacaccatatctatgatatcgcattagtccatgtggggaaaagaaagatcagattgttactgtgtctgtgtagaaaaggaagacataagaaactccattttgatctgtactaagaaaaattgtttctgctttgagatgttgttagcctataactttagccccaactctgtgctcacagaaacatgcgctgtaatgaatcaaagtttaatggatttagggctgtgcaggatgtgccttgttaacaatatgtttgcaggctgtatgcttggtagaagtcatcgccattctccattctcgattaaccagggacacaatgcacagcagaaagctgcagggacctctgcccaagaaagcctgggtattgtccaaggtttcccccccactgagacagcctgagatatggcctcatgggaagggaaagacctgactgtcccccagcccgacacctgtaaagggtcggtgctgaggaggaatagtgaaggagggaggcctctttgcagttgagataagaggaaggcttctgtctcctgcttgtccctggtaatggaatgtctcggtgtaaaaagctgaccattcccattcgttctattctgagataggagaaaaccgccctgtggctggaggtgagatatgctggcagcaatactgctctgttactccttgctacactgagatgtttgggtaaagagaaacataaatctagcctacgtgcacatctgggcacagtacctttccttgaacttattcgtgatacagattcctttgctcacatgtttccctgctgaccttcttcccacctgttgccctgctacactcccctcgctaagacagtaaaaataatgatcaataaatactgagggaactcagaggccagcgccggtgcgggtcctccacatgctgagcgccggtcctgggcccactgttctttctctatactttgtctctgtgtcttatttcttttctcaaaaaaatttttctttttttaactgcaataaagtaggtcgttacccctaaagtgagcgagtcccttcctgctctaacgtccagtgcttccttgagatcatggaattctggagagtttctgtggatatatttgcacagatatctttgaagacacaaacactcacctgggacgttggccggagatgtctttttatttttgtgctgtaaaattctcttacagcaaaaataggctttagaaaggtcttctactgtcttcagcaaccatctcatcttccagcttcacctgattgtccagttatcatacatttgactttcaaatgtatgaaccagcatgtaccccatggatttaatcttatctaccccgtggattcaatcttcttatcagaaggttcttttatgtcaaaaaacctgctgtcaaggcttgaagagccggcacactcaatggcaaacacagcaccgagtctgctctgaatcctggaggatctggccctcctctcaatccccactcacagtcaccgtcttacaactcagggccacctgggatcagtcatcagtcagggtgcgtaagccttgaataccaggtagcctcaggagtgaaaagataaatgtcctagatcattaccttattcagtgtccccaccttgcagcgcattccaaccacctgggagcatttaaaactccagatgcccacaccacaccctggggccacccatcagaccttctggaagcaagacctgggcctccatggccccaaaaactccctaggtgatccgatgtgcagccaaatctgagaggccccatttaaaaaagaaagaacatgggtggtacattgaggagtatttacattttataaaatgacttaaaaatttgaaggcatttttgagcatttccaattatatggaagagttacttctacggaatagtttttgctcatggaactcaaacagatgaagcaccactgttacagaataatgtgctccagatgaaaatgtctcgtttctgtgaatttcatgaagagcagaacatttctcaagaatcctcttgagccagtaatcaatcctgtctcaaaaaatgttctttgccatttcctagatactgcacaaaagtggccatgtcgacatttgtccacccaccctccaataagctggagcgacaaagggacattccatccctgtacccttagtggtagccatgacacgatggccagatcatggactccggaaagctttctgtttttactggaaacatagcaaaccttgatttagctccaagaaattgagtagggaaatatttgttttttagcaattgtcatagtaaataaaactctaagcaagtgtatctac

SEQ ID NO: 29345 - DNA, 2662 bp, Homo sapiens
  source 1..2662: mol_type = unassigned DNA
accgcgcactgagactgccgtgccggacccccgagccggagccgagcgcgccgaggccggggccatggagaaagcgcggccgctgtgggccaactcgctacagttcgtgttcgcctgcatctcgtacgccgtgggcctgggcaacgtgtggcgattcccgtacctgtgccagatgtacggcggaggtagtttcctggtcccctacatcatcatgcttatcgtggagggaatgccgctcttgtacctggaactggctgtggggcagcgcatgcggcagggcagcatcggcgcctggaggaccatcagcccgtacctcagtggtgtcggggtcgccagcgtggtggtctctttcttcctctccatgtactacaacgtcatcaacgcctgggccttctggtacctcttccactccttccaggatcccctgccgtggtctgtctgcccactgaatggtaaccacacgggctacgatgaggagtgtgagaaggcgtcctccacacagtacttctggtacaggaaaaccctcaatatctcgccgtccctccaggagaacgggggtgtgcagtgggagccggcgctgtgcctcctcctggcctggctggtggtgtacctgtgcatcctgcgtggcaccgagtccactggcaaggtggtgtatttcacggcgtcactgccctattgcgtgctcatcatctacctcatcaggggcctcacgctccacggagccaccaatggcctcatgtacatgttcactcccaagatagagcagctggccaaccccaaggcctggatcaatgcagccacccagatcttcttctcacttggcctgggcttcggcagcctgatcgccttcgccagctacaatgagccatccaacaactgccagaagcacgccatcatcgtgtccctcatcaacagcttcacctccatatttgccagcattgtcaccttctccatctatggcttcaaggccaccttcaattatgaaaactgcttgaagaaggtgagtctgctgctgaccaacacttttgaccttgaagatggctttttgacagccagcaacctggagcaggtgaagggctacctcgcatctgcctacccaagcaaatacagcgagatgttcccgcaaatcaaaaactgcagcttggaatcggagctagacacggccgtccagggcactggcctggcattcatcgtctacacagaggccattaaaaacatggaggtgtcccagctgtggtcggtgctctacttcttcatgctgctgatgctgggcattgggagcatgctggggaacacagcggccatcctcacccctctgacagacagcaagatcatctccagccacctgcccaaggaggccatctcaggtctggtgtgccttgtcaactgtgccattggcatggtgttcacgatggaggctgggaactactggtttgacatattcaacgactacgcggccacactgtccctgctgctcatcgtgctggtggagacgattgccgtgtgctacgtgtacgggctgaggagatttgaaagtgaccttaaggccatgaccggccgagctgtgagctggtactggaaggtgatgtgggctggcgtaagcccactgctgattgtcagcctctttgtcttctacctgagcgactacatcctcacggggaccctgaagtatcaagcctgggacgcctcccaggatgacaagttataaagaaagaagatctttgtctgggacccccaaagggatcctttctctaaggtctctgacggtgggtccaggaccagacctctctacaaaaaattgccccaactacagtttgcaaccccaaaccacattagaagtctgtgcagacatccctccgtggtgtgtgtcttggtgcattggaaaaggagtcaggagccactgtgagtaggtcgttacccctaaagtgagcgagtcccttcctgctctaacgtccagtgcttccttgagatcatggaattctggagagtttctgtggatatatttgcacagatatctttgaagacacaaacactcacctgggacgttggccggagatgtctttttatttttgtgctgtaaaattctcttacagcaaaaataggctttagaaaggtcttctactgtcttcagcaaccatctcatcttccagcttcacctgattgtccagttatcatacatttgactttcaaatgtatgaaccagcatgtaccccatggatttaatcttatctaccccgtggattcaatcttcttatcagaaggttcttttatgtcaaaaaacctgctgtcaaggcttgaagagccggcacactcaatggcaaacacagcaccgagtctgctctgaatcctggaggatctggccctcctctcaatccccactcacagtcaccgtcttacaactcagggccacctgggatcagtcatcagtcagggtgcgtaagccttgaataccaggtagcctcaggagtgaaaagataaatgtcctagatcattaccttattcagtgtccccaccttgcagcgcattccaaccacctgggagcatttaaaactccagatgcccacaccacaccctggggccacccatcagaccttctggaagcaagacctgggcctccatggccccaaaaactccctaggtgatccgatgtgcagccaaatct

SEQ ID NO: 29346 - DNA, 1317 bp, Homo sapiens
  source 1..1317: mol_type = unassigned DNA
aatacaactgcagtggggctgcttgtggtttccaaacgtcggcagaggctggagacggctctctagtgctgggtgtggagtgaggcaccacccttgccctgaagcctggggcactcagtcaccatggctcatgccccagaaccggacccggccgcctgcgacctcggggatgagaggcccaagtgggacaacaaggcccagtacctcctgagctgcactgggtttgccgtgggactggggaacatttggcggttcccatacctgtgccagacctatggaggaggggccttcctcatcccctacgtcatcgcgctggtcttcgaggggatccccattttccacgtcgagctcgccatcggccagcggctgcggaagggcagcgtcggcgtgtggacggccatctccccgtacctcagtggagtagggctgggctgtgtcacgctgtccttcctgatcagcctgtactacaacaccatcgtggcgtgggtgctgtggtacctcctcaactccttccagcacccgctgccctggagctcctgcccaccggacctcaacagaacagggtttgtggaggagtgccagggcagcagcgccgtgagctacttctggtaccggcagacactgaacatcacagccgacatcaatgacagtggctccatccagtggtggctgctcatctgcttggcagcctcctgggcagtcgtgtacatgtgtgtcatcaggggcattgagactacagggaaggtgatttacttcacagctttgttcccttacctggtcctgaccatctttctcatcagagggctgaccctgccaggggcaacaaaaggactcatctacttgttcactcccaacaacccccgggtgtggctggacgcagccacccagatattcttctctctgtccctggccttcggaggacacatcgcttttgcaagttacaactcgcccaggaatgactgccagaaggatgcggtggtcatcgccctggtcaacaggatgacctccctgtacgcgtccatcgctgtcttctctgtcctgggtgcctcgggcccgggcctggccttcgtcgtcttcacggagaccgacctccacatgccgggggctcctgtgtgggccatgctcttcttcgggatgctgttcaccttggggctatcgaccatgttcgggaccgtggaggcggtcatcacacccctgctggactctgggaactactggctggagattttcgacaattttgccgcttccccgaacctgctcatgttggcctttctcgaggttgtgggtgtcgtttatgtttatggaatgaaacggtga

SEQ ID NO: 29347 - DNA, 2121 bp, Homo sapiens
  source 1..2121: mol_type = unassigned DNA
aatacaactgcagtggggctgcttgtggtttccaaacgtcggcagaggctggagacggctctctagtgctgggtgtggagtgaggcaccacccttgccctgaagcctggggcactcagtcaccatggctcatgccccagaaccggacccggccgcctgcgacctcggggatgagaggcccaagtgggacaacaaggcccagtacctcctgagctgcactgggtttgccgtgggactggggaacatttggcggttcccatacctgtgccagacctatggaggaggggccttcctcatcccctacgtcatcgcgctggtcttcgaggggatccccattttccacgtcgagctcgccatcggccagcggctgcggaagggcagcgtcggcgtgtggacggccatctccccgtacctcagtggagtagggctgggctgtgtcacgctgtccttcctgatcagcctgtactacaacaccatcgtggcgtgggtgctgtggtacctcctcaactccttccagcacccgctgccctggagctcctgcccaccggacctcaacagaacagggtttgtggaggagtgccagggcagcagcgccgtgagctacttctggtaccggcagacactgaacatcacagccgacatcaatgacagtggctccatccagtggtggctgctcatctgcttggcagcctcctgggcagtcgtgtacatgtgtgtcatcaggggcattgagactacagggaaggtgatttacttcacagctttgttcccttacctggtcctgaccatctttctcatcagagggctgaccctgccaggggcaacaaaaggactcatctacttgttcactcccaacatgcacattctccagaacccccgggtgtggctggacgcagccacccagatattcttctctctgtccctggccttcggaggacacatcgcttttgcaagttacaactcgcccaggaatgactgccagaaggatgcggtggtcatcgccctggtcaacaggatgacctccctgtacgcgtccatcgctgtcttctctgtcctggggttcaaagcaactaatgactacgagcactgcctggacagaaacatcctcagcctcatcaacgactttgacttcccagagcagagcatctccagggacgactacccagccgtcctcatgcacctgaacgccacctggcccaagagggtggcccagctccccctgaaggcctgcctcctggaagactttctggataagagtgcctcgggcccgggcctggccttcgtcgtcttcacggagaccgacctccacatgccgggggctcctgtgtgggccatgctcttcttcgggatgctgttcaccttggggctatcgaccatgttcgggaccgtggaggcggtcatcacacccctgctggacgtgggggtcctgcctagatgggtccccaaggaggccctgactgggctggtctgcctggtctgcttcctctccgccacctgcttcacgctgcagtctgggaactactggctggagattttcgacaattttgccgcttccccgaacctgctcatgttggcctttctcgaggttgtgggtgtcgtttatgtttatggaatgaaacggttctgcgatgacattgcgtggatgaccgggaggcggcccagcccctactggcggctgacctggagggtggtcagtcccctgctgctgaccatctttgtggcttacatcatcctcctgttctggaagccactgagatacaaggcctggaaccccaaatacgagctgttcccctcgcgtcaggagaagctctacccgggctgggcgcgcgccgcctgtgtgctgctgtccttgctgcccgtgctgtgggtcccggtggccgcgcttgctcagctgctcacccggcggaggcggacgtggagggacagggacgcgcgcccagacacggacatgcgcccggacacggacacgcgcccagacacggacatgcgcccggacacggacatgcgctgaagccggccggagcggggcctgcatgggcgggtctgtgggggggcttggcctgatggtgggcggggccccgcccacagggccgaccccaatacaccagcgactcaaccttga

SEQ ID NO: 29348 - DNA, 6308 bp, Homo sapiens
  source 1..6308: mol_type = unassigned DNA
cgccgggccactgggagagtttatgtggccgaggcagacaagtggaattaggccttgctgcaggggacttcatttccttctcagtactggacccatttatgaggaggtggcttatgaaagtgtgatgttcgcgtatttcttgacaggcagtggcgtgatcttggctcactgcaacctccgactccctggttcaagcgattctcctgcctcagcctcctgagtggggattacaggccacagcaaacacaggtgtgcaggaaccgtttgtcatggaagccagggagcctgggaggcccacacccacctaccatcttgtccctaacaccagccagtcccaggtggaagaagatgtcagctcgccacctcaaaggtcctccgaaactatgcagctgaagaaggagatctccctgctgaatggggtcagcctggtggtgggcaacatgatcggctcagggatctttgtctcacccaagggtgtgctggtacacactgcctcctatgggatgtcactgattgtgtgggccattggtgggctcttctctgttgtgggtgccctttgttatgcagagctggggaccaccatcaccaagtcgggagccagctacgcttatattctagaggcctttgggggcttcattgccttcatccgcctgtgggtctcactgctagttgttgagcccaccggtcaggccatcatcgccatcacctttgccaactacatcatccagccgtccttccccagctgtgatcccccatacctggcctgccgtctcctggctgctgcttgcatatgtctgctgacatttgtgaactgtgcctatgtcaagtggggcacacgtgtgcaggacacgttcacttacgccaaggtcgtagcgctcattgccatcattgtcatgggccttgttaaactgtgccagggacactctgagcactttcaggacgcctttgagggttcctcctgggacatgggaaacctctctcttgccctctactctgccctcttctcttactcaggttgggacacccttaattttgtaacagaagaaatcaaaaacccagaaagaaatttgcccttggccattgggatttctatgccaattgtgacgctcatctacatcctgaccaatgtggcctattacacagtgctgaacatttcagatgtccttagcagtgatgctgtggctgtgacatttgctgaccagacgtttggcatgttcagctggaccatccccattgctgttgccctgtcctgctttgggggcctcaatgcatccatctttgcttcatcaaggttgttcttcgtgggctcccgggagggccacctaccggaccttctgtccatgatccacattgagcgttttacacctatccctgctttactgttcaattgcaccatggcactcatctacctcatcgtggaggatgttttccagcttatcaactacttcagcttcagctactggttcttcgtgggcctgtctgttgttggacagctctacctccgctggaaggagcccaagcggccccggcctctcaagctgagcgtgtttttccccatcgtgttctgcatatgctccgtgtttctggtgatagtgcccctcttcactgacaccattaattccctcattggcatcgggattgccctttctggagtccctttctacttcatgggtgtttacctgccagagtcccggaggccattgtttattcggaatgtcctggctgctatcaccagaggcacccagcagctttgcttttgtgtcctgactgagcttgatgtagccgaagaaaaaaaggatgagaggaaaactgactagaggtcagaggtggctttctgaggcctggaaggcaggccaaccagcaaaatcctgataacaagactctgtgggcccaactctcctgaattaaaggagccttttgacccaatcatatagtggggctcagggccagtgctcactcttattggtaagctataggagactcaggatctgggccaacctcaaggtgggggcttcagagggtggggggaagattggggaacggggggaatggtcatttagttttactcctgataggtagatgcagctcttacagatatttacttggtaaagtgcagtggggaagagggaatgctaggttgatagggctggtggcttctgaatttggtatttgaactaggagtccctatagaggggctgctttatgggaagtttttctctgaccaggtacaacacctgactttaaaggcctgaaatgctaccatttcttcctctggctcaaaattcttccctggggagagagttatattcccttatttattgatatttagtccagaacaccagttctaacgaagcatgcgtgtctcttcatctacaggatgcaataggctgattgtatttaaaaatcaaagtacccaaaactgagtccctttgggctcagaaatgtctgtggtattgggtcagactctgaccacaggttttatgctgtttagcacaatttctattgagtcttacctgcaacaatgaaccttaaagatttttttactcacgtacctgttacactttagcatacagatagatcatagatcacgttacaagcacttggctcaggtccagcaaggacagatgaacaaattcctgagtcagaagtctgttaatattgctgttttgaaggacaatcctttattttacttgagaccttacatctttgttctagctgacagtaaatctctgggtttctgttacgaactctaagagggctgaaacttctgatattcaggtggatcacctgaattctctcagctgtcaatggcttggagaacatctcatgggcccaagtcatcaaataacctgttcctctctgtaagggcagtgtgagggactgctgtgcagacccaagcaatcccaacctggtgctaggtcatttcacttttctgaaaacctcacatcaggctgcatcctcttctgtccctggcaccaggctttgtttacacttggagccaccttggtgtgggtcaccgggacagtgtactcctctcctgccagcctccccttccccgaggtgtggtggctgcagtctcaggaagagcttggtacttgtggggacttctgttttctccctgtggagatcagtgaagactgggaggaaagctgcttcaacctgagtccggctcttcagcaggctgcacaagtggaagcaactaattctggtgctcaggctgggctctccacccaagttaggcctgctctggcctaatggatcttactgtatgagcaggacggctgcattggattgtacaactgttttgtgatgcccccagacactgtcatcctgggccgagaagaacctgctagcttgacataccccatgggcttatccttaggttttggaattggtcaacagtgaggcagtctcccttcctgaccattcttctccacccagtcacagataagggaataaccttggccatatatttgctcaataaagattgaaggaagcatggtcatagttgccctgggttcagagcataatgcatatgtgaagcatggggtgacattcctactgtcatgggtttgggatttgtaacggcaaattcctgcccgacgacagggtgtcttatgcaaaggctgacttgcctgaacgctaagaacatgacttctgtctgagctaagctggcacccatcccagggctcctctggagctaatcctttaagcaaaatgtgcttgccttttaaagatccctgaccccagctttagctttctccaccagataaccagctaatcccaggaatttgctgccccccaccagtggcttctagggaaagcaaggacctcacatgccaggtgccctagtacttgcttagtgagccatgtcatcctcctttcatttttggatggtgacagcatttttcccctctgtgctggatacagacttctcccaggatcctctctttgggagcgaagccagaggatccctacagcactcaagcttcatggtggaattaatttctgccagctctttgttgtctgtctccttaaatccttttcctggtgtgcttattatcccttttgcagtgagtacagtttattaagttgtcagccctttaatattggggaaacttaatgagtataaatagcagggagcacattgtaacagcacagtgttttgtttttttcacccggttgctgtatgagaatggctttcaatcctttgtttctatgcctacagacagaaagcaagatgtctaatattagacatacaagttgctgcctgttataacggtgaattatacctttgtgcatgcctaggatgtttgttgttttaattagctgcaatatatacggcctgtgtacacagaatttaatcacttcggcaggttgaacaactccatgtagataagagcaagtgtaggcaaaggtttagaaaatggacataaagtcaaagaatgatggcaggtaggatgaaggagagatacttaggaaatcctaaaagaggcggcaagaaggtacctccctgtgtaactcaccttcccccatgacagtgagtaagagacactcacaggctatgagggtacacccctagctgaatgttctgtgttgtttccttagacctgtggtgtccgctgcaacagctactagccacgtgtagctaattacattaaaatgaaataaaattaaaagctcagtttctcagttgcgctaatcacatttcaagtgctcagcagccacccgtgtctactactacacagtgcagacacagaacatatcatcactgcagatagttctactggacaatgttacgctagaataaacaccaaggcagtcagttaaggcagctatggtttggaaaggcatacggacagagtctgcttagaagagatacaagttgttaataaaattgatcctgttgatagtagtttgtttttgtggtgggtgctgtgaagagtaaacattactcagtggaaagctaagttcagaaggtactttgtttttcctcccttgccttaagtccttggtatttataatcaatgctgaaccttctatttcactaccgctccctgttttagatattcagatttaaaaggttttcaaagaattactttcttccatgttcaaagctagattttactaaacacatgtatcacattcatatatattgtttcttggccccactgccaaaggaagtcagtcagtaatttcacaaccgttatcagagtttggaagcagaaatagctgttaactaaaatctcccactgctcagactactttctgccctaatggccattactatccagtctgtattgctacaagggacccactggtaccccttttagattctatcaaaaggaacagggttttcctagaggcaggcagcctggtggtatggcacagcagaagcttactgctaatgaaatgggaacctccccctcccttgtggtttcagcacagaacctgaatgccaggaaaaattcctgggccaagaagctaaagctaaagaaaccttccttttttcaacgtttttttttctttcaaactgtagggtcacttttgattgaggcaaaggggtcctactgtaagtggaaaagactcactcccctaacataagttttcactgtggtgggatggtgccgcccgatatgcttgatatgcttttccttccacatgttaagctaggaaacctaacaggatgtcagcagggcagttaactctggactcagagccctcaagggcatgtggcagaacctcatggacatcacaagaccatcagtctgaatccaggtcgtgggggctgtcatagccgaactccttctgcacatccagagggtacttgctccacatccgctgtctgctgctgcctctttcctcctcactcaggctgttgtagtcagcagagcctagaatgacatcccgggagtggattctaaatgtgattttcctaggctactgcaggagccccttctcttctcagaaaggtctgtttttgttcccgattgtaatgcaaaatccttgctcaataaataaaaaagaatatagaattcttttttttttaaagaaggaatcactttcctatcatctaaaccaagttccttcacactggagtattttgtcacttctcccctccgtggagtattttgtcacttctcccctccgtataggattttttgttgttgtaagagttgtagtcatattgtaaatatttttgtacctttctccttttaacgtgttattgacaaacctccccaaaagaatatgcaattgtttgattcatttctctgttatcagacaccaataaattctttttgttgggc

SEQ ID NO: 29349 - DNA, 4575 bp, Homo sapiens
  source 1..4575: mol_type = unassigned DNA
gcggggttcctgacgcagctgcgggcggcgggcggcgcgcacactgctcgctgggccgcggctcccgggtgtcccaggcccggccggtgcgcagagcatggcgggtgcgggcccgaagcggcgcgcgctagcggcgccggcggccgaggagaaggaagaggcgcgggagaagatgctggccgccaagagcgcggacggctcggcgccggcaggcgagggcgagggcgtgaccctgcagcggaacatcacgctgctcaacggcgtggccatcatcgtggggaccattatcggctcgggcatcttcgtgacgcccacgggcgtgctcaaggaggcaggctcgccggggctggcgctggtggtgtgggccgcgtgcggcgtcttctccatcgtgggcgcgctctgctacgcggagctcggcaccaccatctccaaatcgggcggcgactacgcctacatgctggaggtctacggctcgctgcccgccttcctcaagctctggatcgagctgctcatcatccggccttcatcgcagtacatcgtggccctggtcttcgccacctacctgctcaagccgctcttccccacctgcccggtgcccgaggaggcagccaagctcgtggcctgcctctgcgtgctgctgctcacggccgtgaactgctacagcgtgaaggccgccacccgggtccaggatgcctttgccgccgccaagctcctggccctggccctgatcatcctgctgggcttcgtccagatcgggaagggtgatgtgtccaatctagatcccaacttctcatttgaaggcaccaaactggatgtggggaacattgtgctggcattatacagcggcctctttgcctatggaggatggaattacttgaatttcgtcacagaggaaatgatcaacccctacagaaacctgcccctggccatcatcatctccctgcccatcgtgacgctggtgtacgtgctgaccaacctggcctacttcaccaccctgtccaccgagcagatgctgtcgtccgaggccgtggccgtggacttcgggaactatcacctgggcgtcatgtcctggatcatccccgtcttcgtgggcctgtcctgcttcggctccgtcaatgggtccctgttcacatcctccaggctcttcttcgtggggtcccgggaaggccacctgccctccatcctctccatgatccacccacagctcctcacccccgtgccgtccctcgtgttcacgtgtgtgatgacgctgctctacgccttctccaaggacatcttctccgtcatcaacttcttcagcttcttcaactggctctgcgtggccctggccatcatcggcatgatctggctgcgccacagaaagcctgagcttgagcggcccatcaaggtgaacctggccctgcctgtgttcttcatcctggcctgcctcttcctgatcgccgtctccttctggaagacacccgtggagtgtggcatcggcttcaccatcatcctcagcgggctgcccgtctacttcttcggggtctggtggaaaaacaagcccaagtggctcctccagggcatcttctccacgaccgtcctgtgtcagaagctcatgcaggtggtcccccaggagacatagccaggaggccgagtggctgccggaggagcatgcgcagaggccagttaaagtagatcacctcctcgaacccactccggttccccgcaacccacagctcagctgcccatcccagtccctcgccgtccctcccaggtcgggcagtggaggctgctgtgaaaactctggtacgaatctcatccctcaactgagggccagggacccaggtgtgcctgtgctcctgcccaggagcagcttttggtctccttgggccctttttcccttccctcctttgtttacttatatatatattttttttaaacttaaattttgggtcaacttgacaccactaagatgattttttaaggagctgggggaaggcaggagccttcctttctcctgccccaagggcccagaccctgggcaaacagagctactgagacttggaacctcattgctaccacagacttgcactgaagccggacagctgcccagacacatgggcttgtgacattcgtgaaaaccaaccctgtgggcttatgtctctgccttagggtttgcagagtggaaactcagccgtagggtggcactgggagggggtgggggatctgggcaaggtgggtgattcctcccaggaggtgcttgaggccccgatggactcctgaccataatcctagccccgagacaccatcctgagccagggaacagccccagggttggggggtgccggcatctcccctagctcaccaggcctggcctctgggcagtgtggcctcttggctatttctgtgtccagttttggaggctgagttctggttcatgcagacaaagccctgtccttcagtcttctagaaacagagacaagaaaggcagacacaccgcggccaggcacccatgtgggcgcccaccctgggctccacacagcagtgtcccctgccccagaggtcgcagctaccctcagcctccaatgcattggcctctgtaccgcccggcagccccttctggccggtgctgggttcccactcccggcctaggcacctccccgctctccctgtcacgctcatgtcctgtcctggtcctgatgcccgttgtctaggagacagagccaagcactgctcacgtctctgccgcctgcgtttggaggcccctgggctctcacccagtccccacccgcctgcagagagggaactagggcaccccttgtttctgttgttcccgtgaatttttttcgctatgggaggcagccgaggcctggccaatgcggcccactttcctgagctgtcgctgcctccatggcagcagccagggacccccagaacaagaagaccccgcaggatccctcctgagctcggggggctctgccttctcaggccccgggcttcccttctccccagccagaggtggagccaagtggtccagcgtcactccagtgctcagctgtggctggaggagctggcctgtggcacagccctgagtgtcccaagccgggagccaacgaagccggacacggcttcactgaccagcggctgctcaagccgcaagctctcagcaagtgcccagtggagcctgccgcccccgcctgggcaccgggaccccctcaccatccagtgggcccggagaaacctgatgaacagtttggggactcaggaccagatgtccgtctctcttgcttgaggaatgaagacctttattcacccctgccccgttgcttcccgctgcacatggacagacttcacagcgtctgctcataggacctgcatccttcctggggacgaattccactcgtccaagggacagcccacggtctggaggccgaggaccaccagcaggcaggtggactgactgtgttgggcaagacctcttccctctgggcctgttctcttggctgcaaataaggacagcagctggtgccccacctgcctggtgcattgctgtgtgaatccaggaggcagtggacatcgtaggcagccacggccccgggtccaggagaagtgctccctggaggcacgcaccactgcttcccactggggccggcggggcccacgcacgacgtcagcctcttaccttcccgcctcggctaggggtcctcgggatgccgttctgttccaacctcctgctctgggacgtggacatgcctcaaggatacagggagccggcggcctctcgacggcacgcacttgcctgttggctgctgcggctgtgggcgagcatgggggctgccagcgtctgttgtggaaagtagctgctagtgaaatggctggggccgctggggtccgtcttcacactgcgcaggtctcttctgggcgtctgagctggggtgggagctcctccgcagaaggttggtggggggtccagtctgtgatccttggtgctgtgtgccccactccagcctggggaccccacttcagaaggtaggggccgtgtcccgcggtgctgactgaggcctgcttccccctccccctcctgctgtgctggaattccacagggaccagggccaccgcaggggactgtctcagaagacttgatttttccgtccctttttctccacactccactgacaaacgtccccagcggtttccacttgtgggcttcaggtgttttcaagcacaacccaccacaacaagcaagtgcattttcagtcgttgtgcttttttgttttgtgctaacgtcttactaatttaaagatgctgtcggcaccatgtttatttatttccagtggtcatgctcagccttgctgctctgcgtggcgcaggtgccatgcctgctccctgtctgtgtcccagccacgcagggccatccactgtgacgtcggccgaccaggctggacaccctctgccgagtaatgacgtgtgtggctgggaccttctttattctgtgttaatggctaacctgttacactgggctgggttgggtagggtgttctggcttttttgtggggtttttatttttaaagaaacactcaatcatcctaccgctga

SEQ ID NO: 29350 - DNA, 1380 bp, Homo sapiens
  source 1..1380: mol_type = unassigned DNA
tgtgctggtgatctaccccaccaaccaggctgtcatcgccctcaccttctccaactacgtgctgcagccgctcttccccacctgcttccccccagagtctggccttcggctcctggctgccatctgcttattgctcctcacatgggtcaactgttccagtgtgcggtgggccacccgggttcaagacatcttcacagctgggaagctcctggccttggccctgattatcatcatggggattgtacagatatgcaaaggagagtacttctggctggagccaaagaatgcatttgagaatttccaggaacctgacatcggcctcgtcgcactggctttccttcagggctcctttgcctatggaggctggaactttctgaattacgtgactgaggagcttgttgatccctacaagaaccttcccagagccatcttcatctccatcccactggtcacatttgtgtatgtctttgccaatgtcgcttatgtcactgcaatgtccccccaggagctgctggcatccaacgccgtcgctgtgacttttggagagaagctcctaggagtcatggcctggatcatgcccatttctgttgccctgtccacatttggaggagttaatgggtctctcttcacctcctctcggctgttcttcgctggagcccgagagggccaccttcccagtgtgttggccatgatccacgtgaagcgctgcaccccaatcccagccctgctcttcacatgcatctccaccctgctgatgctggtcaccagcgacatgtacacactcatcaactatgtgggcttcatcaactacctcttctatggggtcacggttgctggacagatagtccttcgctggaagaagcctgatatcccccgccccatcaagatcaacctgctgttccccatcatctacttgctgttctgggccttcctgctggtcttcagcctgtggtcagagccggtggtgtgtggcattggcctggccatcatgctgacaggagtgcctgtctatttcctgggtgtttactggcaacacaagcccaagtgtttcagtgacttcattgagctgctaaccctggtgagccagaagatgtgtgtggtcgtgtaccccgaggtggaggggctcagggacagaggaggctaatgaggacatggaggagcagcagcagcccatgtaccaacccactcccacgaaggacaaggacgtggcggggcagccccagccctgaggaccaccattccctggctactctctccttcctcccccttttatcctacctccctgccttggtcctgccaacacatgcgagtacacacacacccctctctctgcttttgtcaggcagtggtaggactttggtgtgggtggtgagaaattgt

SEQ ID NO: 29351 - DNA, 4216 bp, Homo sapiens
  source 1..4216: mol_type = unassigned DNA
tcccgaaaccagagggatggggccggctgtgcagtagaacggggatcgaaaagaggaaaacaagggcacgaagaccagcgagaaagaagaggacacctgggaaaggcggaagcagaagacggggaagggaaaagaaacccaaagcaggtggaaaccagatctagagcaacaccgtcaggttcacagtttgtttttctagaagagaagaaagtacctgaggattgctcttttttcctaccgttaatgaaaactacttttgtcttcatcataaaagaaaaaactaaggggaggtaaaggcagtctcctgttttattagggggagaggtgaagggaaatccaggctcactttctgaataagccactgcctggtgcacagagcagaaccatcctggtttctgaagacacatccctttcagcagaattccagccggagtcgctggcacagttctatttttatatttaaatgtatgtctcccctggcctttttttttttttttttttttagcaacacttttcttgtttgtaaacgcgagtgaccagaaagtgtgaatgcggagtaggaatatttttcgtgttctcttttatctgcttgccttttttagagagtagcagtggttcctatttcggaaaaggacgttctaattcaaagctctctcccaatatatttacacgaatacgcatttagaaagggaggcagcttttgaggttgcaatcctactgagaaggatggaagaaggagccaggcaccgaaacaacaccgaaaagaaacacccaggtgggggcgagtcggacgccagccccgaggctggttccggagggggcggagtagccctgaagaaagagatcggattggtcagtgcctgtggtatcatcgtagggaacatcatcggctctggaatctttgtctcgccaaagggagtgctggagaatgctggttctgtgggccttgctctcatcgtctggattgtgacgggcttcatcacagttgtgggagccctctgctatgctgaactcggggtcaccatccccaaatctggaggtgactactcctatgtcaaggacatcttcggaggactggctgggttcctgaggctgtggattgctgtgctggtgatctaccccaccaaccaggctgtcatcgccctcaccttctccaactacgtgctgcagccgctcttccccacctgcttccccccagagtctggccttcggctcctggctgccatctgcttattgctcctcacatgggtcaactgttccagtgtgcggtgggccacccgggttcaagacatcttcacagctgggaagctcctggccttggccctgattatcatcatggggattgtacagatatgcaaaggagagtacttctggctggagccaaagaatgcatttgagaatttccaggaacctgacatcggcctcgtcgcactggctttccttcagggctcctttgcctatggaggctggaactttctgaattacgtgactgaggagcttgttgatccctacaagaaccttcccagagccatcttcatctccatcccactggtcacatttgtgtatgtctttgccaatgtcgcttatgtcactgcaatgtccccccaggagctgctggcatccaacgccgtcgctgtgacttttggagagaagctcctaggagtcatggcctggatcatgcccatttctgttgccctgtccacatttggaggagttaatgggtctctcttcacctcctctcggctgttcttcgctggagcccgagagggccaccttcccagtgtgttggccatgatccacgtgaagcgctgcaccccaatcccagccctgctcttcacatgcatctccaccctgctgatgctggtcaccagcgacatgtacacactcatcaactatgtgggcttcatcaactacctcttctatggggtcacggttgctggacagatagtccttcgctggaagaagcctgatatcccccgccccatcaagatcaacctgctgttccccatcatctacttgctgttctgggccttcctgctggtcttcagcctgtggtcagagccggtggtgtgtggcattggcctggccatcatgctgacaggagtgcctgtctatttcctgggtgtttactggcaacacaagcccaagtgtttcagtgacttcattgagctgctaaccctggtgagccagaagatgtgtgtggtcgtgtaccccgaggtggagcggggctcagggacagaggaggctaatgaggacatggaggagcagcagcagcccatgtaccaacccactcccacgaaggacaaggacgtggcggggcagccccagccctgaggaccaccattccctggctactctctccttcctcccccttttatcctacctccctgccttggtcctgccaacacatgcgagtacacacacacccctctctctgcttttgtcaggcagtggtaggactttggtgtgggtggtgagaaattgtaaacaaaaactgacattcatacccaaagaaccagcctctcaccccagggtccatgtcccaggccccactccagtgctgcccacactcccagctgctggaggagaggggagatgccaaggtgccctgcaggacctccctccgggccacaccctcagctgcctcttcaggaaccggagctcattactgccttccctcccagggaggccccttcagagaggagaggccacaggagctgcattgtggggggacaggctcaagcaattctgtccccatcaaggggtcagctggagagacccaagaccctatctgttcaccagggacccaaaatccaaggggatgcttccctctgccctctttcctgcccctccccatcatacctgcacccaccccagccagggctccctgtccagaattcggttctcctcaggacgccaactcccagagctaaggaccaaggagaagaacagcctctccacccccaagccaggcggttgaggaacatattgagaaaggttcagattgcagaaacccagccctgcccctgcctcctgcatccagcccccaacatggtgccaaagcttccagaagccaaaaagcttctgatttttaaggtagtgggcatctctctcctaatgacgaagctgctcagcaactccacctgcccgccgcaggaaggagcagtcccctgctatccctgcagccactcccagcacacccgcacacagccagcaccaccgcccccaccgtgcacttctcctctctgggccttggcttgggaccaggtacgaaggatccccaagcccttcaggcctgagatcagagccagatcagccttaagtcacctcccatccaagaacttggcctaaaaatactcccctatttctaaccctcaggacggatctgatattaaatgccttccctgggaggaagggtgctttccccctccctagaggtgcccattccataccctgggagactgaggagagcattggctgaagcccagttcctttcccatccatccccaactccaataatcccccactcctcgcaggtctcagtgtcatgctgtcttggggcagggtgaaagggtagtggcagcagggcgcccactctggagatcctcaaaaaaggccctcctctgtggctggcagcctctgacctttccctgggcttcaaaggaaggctatggagtttgctgtgggccctgcaaccttcccagccactcctgctgcactaaggacttaggatccttttatcacaaatcgggattctctcccccaccccgaattctgtctgcttaaactggaatacacaggagcccttcctggcctggatggtgtctcccagcttccccgcccagcttgcccaccccatagttggtgagatgccaagtttggtctgagttgtgaccccttcagagtagatgcccggcaggctggggttggcccctggagggtcaggggaccatcttcttattccctcttttctcattcctccaacttcctcccctccttcaattatttttttgtaaagttgatgccttactttttggataaatatttttgaagctggtatttctatttcttttggattttttttaatgtaaggttgttttgggggatggagttagaaccttaatgataatttctttcgtttggtgtaggttttagagatttgttttgtggagaggtttttttcttttgatgtaataaaatttaaaatggaaatgaa

SEQ ID NO: 29352 - DNA, 4212 bp, Homo sapiens
  source 1..4212: mol_type = unassigned DNA
tcccgaaaccagagggatggggccggctgtgcagtagaacggggatcgaaaagaggaaaacaagggcacgaagaccagcgagaaagaagaggacacctgggaaaggcggaagcagaagacggggaagggaaaagaaacccaaagcaggtggaaaccagatctagagcaacaccgtcaggttcacagtttgtttttctagaagagaagaaagtacctgaggattgctcttttttcctaccgttaatgaaaactacttttgtcttcatcataaaagaaaaaactaaggggaggtaaaggcagtctcctgttttattagggggagaggtgaagggaaatccaggctcactttctgaataagccactgcctggtgcacagagcagaaccatcctggtttctgaagacacatccctttcagcagaattccagccggagtcgctggcacagttctatttttatatttaaatgtatgtctcccctggcctttttttttttttttttttttagcaacacttttcttgtttgtaaacgcgagtgaccagaaagtgtgaatgcggagtaggaatatttttcgtgttctcttttatctgcttgccttttttagagagtagcagtggttcctatttcggaaaaggacgttctaattcaaagctctctcccaatatatttacacgaatacgcatttagaaagggaggcagcttttgaggttgcaatcctactgagaaggatggaagaaggagccaggcaccgaaacaacaccgaaaagaaacacccaggtgggggcgagtcggacgccagccccgaggctggttccggagggggcggagtagccctgaagaaagagatcggattggtcagtgcctgtggtatcatcgtagggaacatcatcggctctggaatctttgtctcgccaaagggagtgctggagaatgctggttctgtgggccttgctctcatcgtctggattgtgacgggcttcatcacagttgtgggagccctctgctatgctgaactcggggtcaccatccccaaatctggaggtgactactcctatgtcaaggacatcttcggaggactggctgggttcctgaggctgtggattgctgtgctggtgatctaccccaccaaccaggctgtcatcgccctcaccttctccaactacgtgctgcagccgctcttccccacctgcttccccccagagtctggccttcggctcctggctgccatctgcttattgctcctcacatgggtcaactgttccagtgtgcggtgggccacccgggttcaagacatcttcacagctgggaagctcctggccttggccctgattatcatcatggggattgtacagatatgcaaaggagagtacttctggctggagccaaagaatgcatttgagaatttccaggaacctgacatcggcctcgtcgcactggctttccttcagggctcctttgcctatggaggctggaactttctgaattacgtgactgaggagcttgttgatccctacaagaaccttcccagagccatcttcatctccatcccactggtcacatttgtgtatgtctttgccaatgtcgcttatgtcactgcaatgtccccccaggagctgctggcatccaacgccgtcgctgtgacttttggagagaagctcctaggagtcatggcctggatcatgcccatttctgttgccctgtccacatttggaggagttaatgggtctctccacctcctctcggctgttcttcgctggagcccgagagggccaccttcccagtgtgttggccatgatccacgtgaagcgctgcaccccaatcccagccctgctcttcacatgcatctccaccctgctgatgctggtcaccagcgacatgtacacactcatcaactatgtgggcttcatcaactacctcttctatggggtcacggttgctggacagatagtccttcgctggaagaagcctgatatcccccgccccatcaagatcaacctgctgttccccatcatctacttgctgttctgggccttcctgctggtcttcagcctgtggtcagagccggtggtgtgtggcattggcctggccatcatgctgacaggagtgcctgtctatttcctgggtgtttactggcaacacaagcccaagtgtttcagtgacttcattgagctgctaaccctggtgagccagaagatgtgtgtggtcgtgtaccccgaggtggagcggggctcagggacagaggaggctaatgaggacatggaggagcagcagcagcccatgtaccaacccactcccacgaaggacaaggacgtggcggggcagccccagccctgaggaccaccattccctggctactctctccttcctcccccttttatcctacctccctgccttggtcctgccaacacatgcgagtacacacacacccctctctctgcttttgtcaggcagtggtaggactttggtgtgggtggtgagaaattgtaaacaaaaactgacattcatacccaaagaaccagcctctcaccccagggtccatgtcccaggccccactccagtgctgcccacactcccagctgctggaggagaggggagatgccaaggtgccctgcaggacctccctccgggccacaccctcagctgcctcttcaggaaccggagctcattactgccttccctcccagggaggccccttcagagaggagaggccacaggagctgcattgtggggggacaggctcaagcaattctgtccccatcaaggggtcagctggagagacccaagaccctatctgttcaccagggacccaaaatccaaggggatgcttccctctgccctctttcctgcccctccccatcatacctgcacccaccccagccagggctccctgtccagaattcggttctcctcaggacgccaactcccagagctaaggaccaaggagaagaacagcctctccacccccaagccaggcggttgaggaacatattgagaaaggttcagattgcagaaacccagccctgcccctgcctcctgcatccagcccccaacatggtgccaaagcttccagaagccaaaaagcttctgatttttaaggtagtgggcatctctctcctaatgacgaagctgctcagcaactccacctgcccgccgcaggaaggagcagtcccctgctatccctgcagccactcccagcacacccgcacacagccagcaccaccgcccccaccgtgcacttctcctctctgggccttggcttgggaccaggtacgaaggatccccaagcccttcaggcctgagatcagagccagatcagccttaagtcacctcccatccaagaacttggcctaaaaatactcccctatttctaaccctcaggacggatctgatattaaatgccttccctgggaggaagggtgctttccccctccctagaggtgcccattccataccctgggagactgaggagagcattggctgaagcccagttcctttcccatccatccccaactccaataatcccccactcctcgcaggtctcagtgtcatgctgtcttggggcagggtgaaagggtagtggcagcagggcgcccactctggagatcctcaaaaaaggccctcctctgtggctggcagcctctgacctttccctgggcttcaaaggaaggctatggagtttgctgtgggccctgcaaccttcccagccactcctgctgcactaaggacttaggatccttttatcacaaatcgggattctctcccccaccccgaattctgtctgcttaaactggaatacacaggagcccttcctggcctggatggtgtctcccagcttccccgcccagcttgcccaccccatagttggtgagatgccaagtttggtctgagttgtgaccccttcagagtagatgcccggcaggctggggttggcccctggagggtcaggggaccatcttcttattccctcttttctcattcctccaacttcctcccctccttcaattatttttttgtaaagttgatgccttactttttggataaatatttttgaagctggtatttctatttcttttggattttttttaatgtaaggttgttttgggggatggagttagaaccttaatgataatttctttcgtttggtgtaggttttagagatttgttttgtggagaggtttttttcttttgatgtaataaaatttaaaatggaaatg

SEQ ID NO: 29353 - DNA, 3066 bp, Homo sapiens
  source 1..3066: mol_type = unassigned DNA
tgtgcctccaggagcactcacagccctcacagcttctctgcaccctcctcctctgctggtgtgtccttggaagagagaggcccttccggaaggctcagagcacctcctctcctttggagggggttccgagatttctaaaacgtttgctcctcacatgggtcaactgttccagtgtgcggtgggccacccgggttcaagacatcttcacagctgggaagctcctggccttggccctgattatcatcatggggattgtacagatatgcaaaggagagtacttctggctggagccaaagaatgcatttgagaatttccaggaacctgacatcggcctcgtcgcactggctttccttcagggctcctttgcctatggaggctggaactttctgaattacgtgactgaggagcttgttgatccctacaagctgttcttcgctggagcccgagagggccaccttcccagtgtgttggccatgatccacgtgaagcgctgcaccccaatcccagccctgctcttcacatgcatctccaccctgctgatgctggtcaccagcgacatgtacacactcatcaactatgtgggcttcatcaactacctcttctatggggtcacggttgctggacagatagtccttcgctggaagaagcctgatatcccccgccccatcaagcccctgccctaccaggggtgagtgtgggaccacagagccgagggaagcccagcctttgcccttgaggatgtgtctctgtgggtgaagaagagagagaatgccccagtccctagtcctgggggccacgtggcctacacagttcatacgcctcatgcctctgctccacagatcaacctgctgttccccatcatctacttgctgttctgggccttcctgctggtcttcagcctgtggtcagagccggtggtgtgtggcattggcctggccatcatgctgacaggagtgcctgtctatttcctgggtgtttactggcaacacaagcccaagtgtttcagtgacttcattgagctgctaaccctggtgagccagaagatgtgtgtggtcgtgtaccccgaggtggagcggggctcagggacagaggaggctaatgaggacatggaggagcagcagcagcccatgtaccaacccactcccacgaaggacaaggacgtggcggggcagccccagccctgaggaccaccattccctggctactctctccttcctcccccttttatcctacctccctgccttggtcctgccaacacatgcgagtacacacacacccctctctctgcttttgtcaggcagtggtaggactttggtgtgggtggtgagaaattgtaaacaaaaactgacattcatacccaaagaaccagcctctcaccccagggtccatgtcccaggccccactccagtgctgcccacactcccagctgctggaggagaggggagatgccaaggtgccctgcaggacctccctccgggccacaccctcagctgcctcttcaggaaccggagctcattactgccttccctcccagggaggccccttcagagaggagaggccacaggagctgcattgtggggggacaggctcaagcaattctgtccccatcaaggggtcagctggagagacccaagaccctatctgttcaccagggacccaaaatccaaggggatgcttccctctgccctctttcctgcccctccccatcatacctgcacccaccccagccagggctccctgtccagaattcggttctcctcaggacgccaactcccagagctaaggaccaaggagaagaacagcctctccacccccaagccaggcggttgaggaacatattgagaaaggttcagattgcagaaacccagccctgcccctgcctcctgcatccagcccccaacatggtgccaaagcttccagaagccaaaaagcttctgatttttaaggtagtgggcatctctctcctaatgacgaagctgctcagcaactccacctgcccgccgcaggaaggagcagtcccctgctatccctgcagccactcccagcacacccgcacacagccagcaccaccgcccccaccgtgcacttctcctctctgggccttggcttgggaccaggtacgaaggatccccaagcccttcaggcctgagatcagagccagatcagccttaagtcacctcccatccaagaacttggcctaaaaatactcccctatttctaaccctcaggacggatctgatattaaatgccttccctgggaggaagggtgctttccccctccctagaggtgcccattccataccctgggagactgaggagagcattggctgaagcccagttcctttcccatccatccccaactccaataatcccccactcctcgcaggtctcagtgtcatgctgtcttggggcagggtgaaagggtagtggcagcagggcgcccactctggagatcctcaaaaaaggccctcctctgtggctggcagcctctgacctttccctgggcttcaaaggaaggctatggagtttgctgtgggccctgcaaccttcccagccactcctgctgcactaaggacttaggatccttttatcacaaatcgggattctctcccccaccccgaattctgtctgcttaaactggaatacacaggagcccttcctggcctggatggtgtctcccagcttccccgcccagcttgcccaccccatagttggtgagatgccaagtttggtctgagttgtgaccccttcagagtagatgcccggcaggctggggttggcccctggagggtcaggggaccatcttcttattccctcttttctcattcctccaacttcctcccctccttcaattatttttttgtaaagttgatgccttactttttggataaatatttttgaagctggtatttctatttcttttggattttttttaatgtaaggttgttttgggggatggagttagaaccttaatgataatttctttcgtttggtgtaggttttagagatttgttttgtggagaggtttttttcttttgatgtaataaaatttaaaatggaaatgaa

SEQ ID NO: 29354 - DNA, 1499 bp, Homo sapiens
  source 1..1499: mol_type = unassigned DNA
agcctgggcacccagacccagagggctgctgggagggacatgcctcaccccttttgctccagctggaggggagggagtctgtgggagctggccagagcgtggcagaaggcagagaagtgaacgccccagcaaaagtgctcctcacatgggtcaactgttccagtgtgcggtgggccacccgggttcaagacatcttcacagctgggaagctcctggccttggccctgattatcatcatggggattgtacagatatgcaaaggaaccttcccagagccatcttcatctccatcccactggtcacatttgtgtatgtctttgccaatgtcgcttatgtcactgcaatgtccccccaggagctgctggcatccaacgccgtcgctgtgacttttggagagaagctcctaggagtcatggcctggatcatgcccatttctgttgccctgtccacatttggaggagttaatgggtctctcttcacctcctctcggctgttcttcgctggagcccgagagggccaccttcccagtgtgttggccatgatccacgtgaagcgctgcaccccaatcccagccctgctcttcacatgcatctccaccctgctgatgctggtcaccagcgacatgtacacactcatcaactatgtgggcttcatcaactacctcttctatggggtcacggttgctggacagatagtccttcgctggaagaagcctgatatcccccgccccatcaagatcaacctgctgttccccatcatctacttgctgttctgggccttcctgctggtcttcagcctgtggtcagagccggtggtgtgtggcattggcctggccatcatgctgacaggagtgcctgtctatttcctgggtgtttactggcaacacaagcccaagtgtttcagtgacttcattgagctgctaaccctggtgagccagaagatgtgtgtggtcgtgtaccccgaggtggagcggggctcagggacagaggaggctaatgaggacatggaggagcagcagcagcccatgtaccaacccactcccacgaaggacaaggacgtggcggggcagccccagccctgaggaccaccattccctggctactctctccttcctcccccttttatcctacctccctgccttggtcctgccaacacatgcgagtacacacacacccctctctctgcttttgtcaggcagtggtaggactttggtgtgggtggtgagaaattgtaaacaaaaactgacattcatacccaaagaaccagcctctcaccccagggtccatgtcccaggccccactccagtgctgcccacactcccagctgctggaggagaggggagatgccaaggtgccctgcaggacctccctccgggccacaccctcagctgcctcttcaggaaccggagctcattactgccttccctcccagggaggccccttcagagaggagaggccacaggagctgcattgtggggggacaggctcaagcaattctgt

SEQ ID NO: 29355 - DNA, 1752 bp, Homo sapiens
  source 1..1752: mol_type = unassigned DNA
caacctccagcctgggcacccagacccagagggctgctgggagggacatgcctcaccccttttgctccagctggaggggagggagtctgtgggagctggccagagcgtggcagaaggcagagaagtgaacgccccagcaaaagtgctcctcacatgggtcaactgttccagtgtgcggtgggccacccgggttcaagacatcttcacagctgggaagctcctggccttggccctgattatcatcatggggattgtacagatatgcaaaggagagtacttctggctggagccaaagaatgcatttgagaatttccaggaacctgacatcggcctcgtcgcactggctttccttcagggctcctttgcctatggaggctggaactttctgaattacgtgactgaggagcttgttgatccctacaagaaccttcccagagccatcttcatctccatcccactggtcacatttgtgtatgtctttgccaatgtcgcttatgtcactgcaatgtccccccaggagctgctggcatccaacgccgtcgctgtgacttttggagagaagctcctaggagtcatggcctggatcatgcccatttctgttgccctgtccacatttggaggagttaatgggtctctcttcacctcctctcggctgttcttcgctggagcccgagagggccaccttcccagtgtgttggccatgatccacgtgaagcgctgcaccccaatcccagccctgctcttcacatgcatctccaccctgctgatgctggtcaccagcgacatgtacacactcatcaactatgtgggcttcatcaactacctcttctatggggtcacggttgctggacagatagtccttcgctggaagaagcctgatatcccccgccccatcaagatcaacctgctgttccccatcatctacttgctgttctgggccttcctgctggtcttcagcctgtggtcagagccggtggtgtgtggcattggcctggccatcatgctgacaggagtgcctgtctatttcctgggtgtttactggcaacacaagcccaagtgtttcagtgacttcattgagctgctaaccctggtgagccagaagatgtgtgtggtcgtgtaccccgaggtggagcggggctcagggacagaggaggctaatgaggacatggaggagcagcagcagcccatgtaccaacccactcccacgaaggacaaggacgtggcggggcagccccagccctgaggaccaccattccctggctactctctccttcctcccccttttatcctacctccctgccttggtcctgccaacacatgcgagtacacacacacccctctctctgcttttgtcaggcagtggtaggactttggtgtgggtggtgagaaattgtaaacaaaaactgacattcatacccaaagaaccagcctctcaccccagggtccatgtcccaggccccactccagtgctgcccacactcccagctgctggaggagaggggagatgccaaggtgccctgcaggacctccctccgggccacaccctcagctgcctcttcaggaaccggagctcattactgccttccctcccagggaggccccttcagagaggagaggccacaggagctgcattgtggggggacaggctcaagcaattctgtccccatcaaggggtcagctggagagacccaagaccctatctgttcaccagggacccaaaatccaaggggatgcttccctctgccctctttc

SEQ ID NO: 29356 - DNA, 536 bp, Homo sapiens
  source 1..536: mol_type = unassigned DNA
aagagaagcacgttagtgtgtggagaagccactctcccgaaaccagagggatggggccggctgtgcagtagaacggggatcgaaaagaggaaaacaagggcacgaagaccagcgagaaagaagaggacacctgggaaaggcggaagcagaagacggggaagggaaaagaaacccaaagcaggtggaaaccagatctagagcaacaccgtcagaaagggaggcagcttttgaggttgcaatcctactgagaaggatggaagaaggagccaggcaccgaaacaacaccgaaaagaaacacccaggtgggggcgagtcggacgccagccccgaggctggttccggagggggcggagtagccctgaagaaagagatcggattggtcagtgcctgtggtatcatcgtagggaacatcatcggctctggaatctttgtctcgccaaagggagtgctggagaatgctggttctgtgggccttgctctcatcgtctggattgtgacgggcttcatcacagttgtgggagccctctgctatgctg

SEQ ID NO: 29357 - DNA, 658 bp, Homo sapiens
  source 1..658: mol_type = unassigned DNA
gaagccactctcccgaaaccagagggatggggccggctgtgcagtagaacggggatcgaaaagaggaaaacaagggcacgaagaccagcgagaaagaagaggacacctgggaaaggcggaagcagaagacggggaagggaaaagaaacccaaagcaggtggaaaccagatctagagcaacaccgtcaggttcacagtttgtttttctagaagagaagaaagtacctgaggattgctcttttttcctaccgttaatgaaaactacttttgtcttcatcataaaagaaaaaactaaggggagagagtagcagtggttcctatttcggaaaaggacgttctaattcaaagctctctcccaatatatttacacgaatacgcatttagaaagggaggcagcttttgaggttgcaatcctactgagaaggatggaagaaggagccaggcaccgaaacaacaccgaaaagaaacacccaggtgggggcgagtcggacgccagccccgaggctggttccggagggggcggagtagccctgaagaaagagatcggattggtcagtgcctgtggtatcatcgtagggaacatcatcggctctggaatctttgtctcgccaaagggagtgctggagaatgctggttctgtgggccttgctctcatcgtc

SEQ ID NO: 29358 - DNA, 1819 bp, Homo sapiens
  source 1..1819: mol_type = unassigned DNA
gtggtgattcagcagaaaccccagctccagcagctggcgcaggagctaacaggataagaaggaaggggaagagagagccaggaagggaggaggggaggggatggggcagtatgggcaggagcttagctggaagtgtttggtaaaagctgtgtgcctccaggagcactcacagccctcacagcttctctgcaccctcctcctctgctggtgtgtccttggaagagagaggcccttccggaaggctcagagcacctcctctcctttggagggggttccgagatttctaaaacgtttgctcctcacatgggtcaactgttccagtgtgcggtgggccacccgggttcaagacatcttcacagctgggaagctcctggccttggccctgattatcatcatggggattgtacagatatgcaaaggagagtacttctggctggagccaaagaatgcatttgagaatttccaggaacctgacatcggcctcgtcgcactggctttccttcagggctcctttgcctatggaggctggaactttctgaattacgtgactgaggagcttgttgatccctacaagaaccttcccagagccatcttcatctccatcccactggtcacatttgtgtatgtctttgccaatgtcgcttatgtcactgcaatgtccccccaggagctgctggcatccaacgccgtcgctgtgacttttggagagaagctcctaggagtcatggcctggatcatgcccatttctgttgccctgtccacatttggaggagttaatgggtctctcttcacctcctctcggctgttcttcgctggagcccgagagggccaccttcccagtgtgttggccatgatccacgtgaagcgctgcaccccaatcccagccctgctcttcacatgcatctccaccctgctgatgctggtcaccagcgacatgtacacactcatcaactatgtgggcttcatcaactacctcttctatggggtcacggttgctggacagatagtccttcgctggaagaagcctgatatcccccgccccatcaagatcaacctgctgttccccatcatctacttgctgttctgggccttcctgctggtcttcagcctgtggtcagagccggtggtgtgtggcattggcctggccatcatgctgacaggagtgcctgtctatttcctgggtgtttactggcaacacaagcccaagtgtttcagtgacttcattgagctgctaaccctggtgagccagaagatgtgtgtggtcgtgtaccccgaggtggagcggggctcagggacagaggaggctaatgaggacatggaggagcagcagcagcccatgtaccaacccactcccacgaaggacaaggacgtggcggggcagccccagccctgaggaccaccattccctggctactctctccttcctcccccttttatcctacctccctgccttggtcctgccaacacatgcgagtacacacacacccctctctctgcttttgtcaggcagtggtaggactttggtgtgggtggtgagaaattgtaaacaaaaactgacattcatacccaaagaaccagcctctcaccccagggtccatgtcccaggccccactccagtgctgcccacactcccagctgctggaggagaggggagatgccaaggtgccctgcaggacctccctccgggccacaccctcagctgcctcttcaggaaccggagctcattactgccttccctcccagggaggccccttcagagaggagaggccacaggagctgcattgtggggggacaggctcaagcaattctgtccccatca

SEQ ID NO: 29359 - DNA, 6261 bp, Homo sapiens
  source 1..6261: mol_type = unassigned DNA
gctgccgcggcggcggcggcgcgaccgagcatcctggcggcgccgggccactgggagagtttatgtggccgaggcagacaagtggaattaggccttgctgcaggggacttcatttccttctcagtactggacccatttatgaggaggtggcttatgaaagtgtgatgttcgcgtatttcttgacaggccacagcaaacacaggtgtgcaggaaccgtttgtcatggaagccagggagcctgggaggcccacacccacctaccatcttgtccctaacaccagccagtcccaggtggaagaagatgtcagctcgccacctcaaaggtcctccgaaactatgcagctgaagaaggagatctccctgctgaatggggtcagcctggtggtgggcaacatgatcggctcagggatctttgtctcacccaagggtgtgctggtacacactgcctcctatgggatgtcactgattgtgtgggccattggtgggctcttctctgttgtgggtgccctttgttatgcagagctggggaccaccatcaccaagtcgggagccagctacgcttatattctagaggcctttgggggcttcattgccttcatccgcctgtgggtctcactgctagttgttgagcccaccggtcaggccatcatcgccatcacctttgccaactacatcatccagccgtccttccccagctgtgatcccccatacctggcctgccgtctcctggctgctgcttgcatatgtctgctgacatttgtgaactgtgcctatgtcaagtggggcacacgtgtgcaggacacgttcacttacgccaaggtcgtagcgctcattgccatcattgtcatgggccttgttaaactgtgccagggacactctgagcactttcaggacgcctttgagggttcctcctgggacatgggaaacctctctcttgccctctactctgccctcttctcttactcaggttgggacacccttaattttgtaacagaagaaatcaaaaacccagaaagaaatttgcccttggccattgggatttctatgccaattgtgacgctcatctacatcctgaccaatgtggcctattacacagtgctgaacatttcagatgtccttagcagtgatgctgtggctgtgacatttgctgaccagacgtttggcatgttcagctggaccatccccattgctgttgccctgtcctgctttgggggcctcaatgcatccatctttgcttcatcaaggttgttcttcgtgggctcccgggagggccacctaccggaccttctgtccatgatccacattgagcgttttacacctatccctgctttactgttcaattgcaccatggcactcatctacctcatcgtggaggatgttttccagcttatcaactacttcagcttcagctactggttcttcgtgggcctgtctgttgttggacagctctacctccgctggaaggagcccaagcggccccggcctctcaagctgagcgtgtttttccccatcgtgttctgcatatgctccgtgtttctggtgatagtgcccctcttcactgacaccattaattccctcattggcatcgggattgccctttctggagtccctttctacttcatgggtgtttacctgccagagtcccggaggccattgtttattcggaatgtcctggctgctatcaccagaggcacccagcagctttgcttttgtgtcctgactgagcttgatgtagccgaagaaaaaaaggatgagaggaaaactgactagaggtcagaggtggctttctgaggcctggaaggcaggccaaccagcaaaatcctgataacaagactctgtgggcccaactctcctgaattaaaggagccttttgacccaatcatatagtggggctcagggccagtgctcactcttattggtaagctataggagactcaggatctgggccaacctcaaggtgggggcttcagagggtggggggaagattggggaacggggggaatggtcatttagttttactcctgataggtagatgcagctcttacagatatttacttggtaaagtgcagtggggaagagggaatgctaggttgatagggctggtggcttctgaatttggtatttgaactaggagtccctatagaggggctgctttatgggaagtttttctctgaccaggtacaacacctgactttaaaggcctgaaatgctaccatttcttcctctggctcaaaattcttccctggggagagagttatattcccttatttattgatatttagtccagaacaccagttctaacgaagcatgcgtgtctcttcatctacaggatgcaataggctgattgtatttaaaaatcaaagtacccaaaactgagtccctttgggctcagaaatgtctgtggtattgggtcagactctgaccacaggttttatgctgtttagcacaatttctattgagtcttacctgcaacaatgaaccttaaagatttttttactcacgtacctgttacactttagcatacagatagatcatagatcacgttacaagcacttggctcaggtccagcaaggacagatgaacaaattcctgagtcagaagtctgttaatattgctgttttgaaggacaatcctttattttacttgagaccttacatctttgttctagctgacagtaaatctctgggtttctgttacgaactctaagagggctgaaacttctgatattcaggtggatcacctgaattctctcagctgtcaatggcttggagaacatctcatgggcccaagtcatcaaataacctgttcctctctgtaagggcagtgtgagggactgctgtgcagacccaagcaatcccaacctggtgctaggtcatttcacttttctgaaaacctcacatcaggctgcatcctcttctgtccctggcaccaggctttgtttacacttggagccaccttggtgtgggtcaccgggacagtgtactcctctcctgccagcctccccttccccgaggtgtggtggctgcagtctcaggaagagcttggtacttgtggggacttctgttttctccctgtggagatcagtgaagactgggaggaaagctgcttcaacctgagtccggctcttcagcaggctgcacaagtggaagcaactaattctggtgctcaggctgggctctccacccaagttaggcctgctctggcctaatggatcttactgtatgagcaggacggctgcattggattgtacaactgttttgtgatgcccccagacactgtcatcctgggccgagaagaacctgctagcttgacataccccatgggcttatccttaggttttggaattggtcaacagtgaggcagtctcccttcctgaccattcttctccacccagtcacagataagggaataaccttggccatatatttgctcaataaagattgaaggaagcatggtcatagttgccctgggttcagagcataatgcatatgtgaagcatggggtgacattcctactgtcatgggtttgggatttgtaacggcaaattcctgcccgacgacagggtgtcttatgcaaaggctgacttgcctgaacgctaagaacatgacttctgtctgagctaagctggcacccatcccagggctcctctggagctaatcctttaagcaaaatgtgcttgccttttaaagatccctgaccccagctttagctttctccaccagataaccagctaatcccaggaatttgctgccccccaccagtggcttctagggaaagcaaggacctcacatgccaggtgccctagtacttgcttagtgagccatgtcatcctcctttcatttttggatggtgacagcatttttcccctctgtgctggatacagacttctcccaggatcctctctttgggagcgaagccagaggatccctacagcactcaagcttcatggtggaattaatttctgccagctctttgttgtctgtctccttaaatccttttcctggtgtgcttattatcccttttgcagtgagtacagtttattaagttgtcagccctttaatattggggaaacttaatgagtataaatagcagggagcacattgtaacagcacagtgttttgtttttttcacccggttgctgtatgagaatggctttcaatcctttgtttctatgcctacagacagaaagcaagatgtctaatattagacatacaagttgctgcctgttataacggtgaattatacctttgtgcatgcctaggatgtttgttgttttaattagctgcaatatatacggcctgtgtacacagaatttaatcacttcggcaggttgaacaactccatgtagataagagcaagtgtaggcaaaggtttagaaaatggacataaagtcaaagaatgatggcaggtaggatgaaggagagatacttaggaaatcctaaaagaggcggcaagaaggtacctccctgtgtaactcaccttcccccatgacagtgagtaagagacactcacaggctatgagggtacacccctagctgaatgttctgtgttgtttccttagacctgtggtgtccgctgcaacagctactagccacgtgtagctaattacattaaaatgaaataaaattaaaagctcagtttctcagttgcgctaatcacatttcaagtgctcagcagccacccgtgtctactactacacagtgcagacacagaacatatcatcactgcagatagttctactggacaatgttacgctagaataaacaccaaggcagtcagttaaggcagctatggtttggaaaggcatacggacagagtctgcttagaagagatacaagttgttaataaaattgatcctgttgatagtagtttgtttttgtggtgggtgctgtgaagagtaaacattactcagtggaaagctaagttcagaaggtactttgtttttcctcccttgccttaagtccttggtatttataatcaatgctgaaccttctatttcactaccgctccctgttttagatattcagatttaaaaggttttcaaagaattactttcttccatgttcaaagctagattttactaaacacatgtatcacattcatatatattgtttcttggccccactgccaaaggaagtcagtcagtaatttcacaaccgttatcagagtttggaagcagaaatagctgttaactaaaatctcccactgctcagactactttctgccctaatggccattactatccagtctgtattgctacaagggacccactggtaccccttttagattctatcaaaaggaacagggttttcctagaggcaggcagcctggtggtatggcacagcagaagcttactgctaatgaaatgggaacctccccctcccttgtggtttcagcacagaacctgaatgccaggaaaaattcctgggccaagaagctaaagctaaagaaaccttccttttttcaacgtttttttttctttcaaactgtagggtcacttttgattgaggcaaaggggtcctactgtaagtggaaaagactcactcccctaacataagttttcactgtggtgggatggtgccgcccgatatgcttgatatgcttttccttccacatgttaagctaggaaacctaacaggatgtcagcagggcagttaactctggactcagagccctcaagggcatgtggcagaacctcatggacatcacaagaccatcagtctgaatccaggtcgtgggggctgtcatagccgaactccttctgcacatccagagggtacttgctccacatccgctgtctgctgctgcctctttcctcctcactcaggctgttgtagtcagcagagcctagaatgacatcccgggagtggattctaaatgtgattttcctaggctactgcaggagccccttctcttctcagaaaggtctgtttttgttcccgattgtaatgcaaaatccttgctcaataaataaaaaagaatatagaattcttttttttttaaagaaggaatcactttcctatcatctaaaccaagttccttcacactggagtattttgtcacttctcccctccgtggagtattttgtcacttctcccctccgtataggattttttgttgttgtaagagttgtagtcatattgtaaatatttttgtacctttctccttttaacgtgttattgacaaacctccccaaaagaatatgcaattgtttgattcatttctctgttatcagacaccaataaattctttttgttgggc

SEQ ID NO: 29360 - DNA, 5074 bp, Homo sapiens
  source 1..5074: mol_type = unassigned DNA
gcatcctggcggcgccgggccactgggagagtttatgtggccgaggcagacaagtggaattaggccttgctgcaggggacttcatttccttctcagtactggacccatttatgaggaggtggcttatgaaagtgtgatgttcgcgtatttcttgacaggccacagcaaacacaggtgtgcaggaaccgtttgtcatggaagccagggagcctgggaggcccacacccacctaccatcttgtccctaacaccagccagtcccaggtggaagaagatgtcagctcgccacctcaaaggtcctccgaaactatgcagctgaagaaggagatctccctgctgaatggggtcagcctggtggtgggcaacatgatcggctcagggatctttgtctcacccaagggtgtgctggtacacactgcctcctatgggatgtcactgattgtgtgggccattggtgggctcttctctgttgtgggtgccctttgttatgcagagctggggaccaccatcaccaagtcgggagccagctacgcttatattctagaggcctttgggggcttcattgccttcatccgcctgtgggtctcactgctagttgttgagcccaccggtcaggccatcatcgccatcacctttgccaactacatcatccagccgtccttccccagctgtgatcccccatacctggcctgccgtctcctggctgctgcttgcatatgtctgctgacatttgtgaactgtgcctatgtcaagtggggcacacgtgtgcaggacacgttcacttacgccaaggtcgtagcgctcattgccatcattgtcatgggccttgttaaactgtgccaggaaatttgcccttggccattgggatttctatgccaattgtgacgctcatctacatcctgaccaatgtggcctattacacagtgctgaacatttcagatgtccttagcagtgatgctgtggctgtgacatttgctgaccagacgtttggcatgttcagctggaccatccccattgctgttgccctgtcctgctttgggggcctcaatgcatccatctttgcttcatcaaggttgttcttcgtgggctcccgggagggccacctaccggaccttctgtccatgatccacattgagcgttttacacctatccctgctttactgttcaattgcaccatggcactcatctacctcatcgtggaggatgttttccagcttatcaactacttcagcttcagctactggttcttcgtgggcctgtctgttgttggacagctctacctccgctggaaggagcccaagcggccccggcctctcaagctgagcgtgtttttccccatcgtgttctgcatatgctccgtgtttctggtgatagtgcccctcttcactgacaccattaattccctcattggcatcgggattgccctttctggagtccctttctacttcatgggtgtttacctgccagagtcccggaggccattgtttattcggaatgtcctggctgctatcaccagaggcacccagcagctttgcttttgtgtcctgactgagcttgatgtagccgaagaaaaaaaggatgagaggaaaactgactagaggtcagaggtggctttctgaggcctggaaggcaggccaaccagcaaaatcctgataacaagactctgtgggcccaactctcctgaattaaaggagccttttgacccaatcatatagtggggctcagggccagtgctcactcttattggctttgtttacacttggagccaccttggtgtgggtcaccgggacagtgtactcctctcctgccagcctccccttccccgaggtgtggtggctgcagtctcaggaagagcttggtacttgtggggacttctgttttctccctgtggagatcagtgaagactgggaggaaagctgcttcaacctgagtccggctcttcagcaggctgcacaagtggaagcaactaattctggtgctcaggctgggctctccacccaagttaggcctgctctggcctaatggatcttactgtatgagcaggacggctgcattggattgtacaactgttttgtgatgcccccagacactgtcatcctgggccgagaagaacctgctagcttgacataccccatgggcttatccttaggttttggaattggtcaacagtgaggcagtctcccttcctgaccattcttctccacccagtcacagataagggaataaccttggccatatatttgctcaataaagattgaaggaagcatggtcatagttgccctgggttcagagcataatgcatatgtgaagcatggggtgacattcctactgtcatgggtttgggatttgtaacggcaaattcctgcccgacgacagggtgtcttatgcaaaggctgacttgcctgaacgctaagaacatgacttctgtctgagctaagctggcacccatcccagggctcctctggagctaatcctttaagcaaaatgtgcttgccttttaaagatccctgaccccagctttagctttctccaccagataaccagctaatcccaggaatttgctgccccccaccagtggcttctagggaaagcaaggacctcacatgccaggtgccctagtacttgcttagtgagccatgtcatcctcctttcatttttggatggtgacagcatttttcccctctgtgctggatacagacttctcccaggatcctctctttgggagcgaagccagaggatccctacagcactcaagcttcatggtggaattaatttctgccagctctttgttgtctgtctccttaaatccttttcctggtgtgcttattatcccttttgcagtgagtacagtttattaagttgtcagccctttaatattggggaaacttaatgagtataaatagcagggagcacattgtaacagcacagtgttttgtttttttcacccggttgctgtatgagaatggctttcaatcctttgtttctatgcctacagacagaaagcaagatgtctaatattagacatacaagttgctgcctgttataacggtgaattatacctttgtgcatgcctaggatgtttgttgttttaattagctgcaatatatacggcctgtgtacacagaatttaatcacttcggcaggttgaacaactccatgtagataagagcaagtgtaggcaaaggtttagaaaatggacataaagtcaaagaatgatggcaggtaggatgaaggagagatacttaggaaatcctaaaagaggcggcaagaaggtacctccctgtgtaactcaccttcccccatgacagtgagtaagagacactcacaggctatgagggtacacccctagctgaatgttctgtgttgtttccttagacctgtggtgtccgctgcaacagctactagccacgtgtagctaattacattaaaatgaaataaaattaaaagctcagtttctcagttgcgctaatcacatttcaagtgctcagcagccacccgtgtctactactacacagtgcagacacagaacatatcatcactgcagatagttctactggacaatgttacgctagaataaacaccaaggcagtcagttaaggcagctatggtttggaaaggcatacggacagagtctgcttagaagagatacaagttgttaataaaattgatcctgttgatagtagtttgtttttgtggtgggtgctgtgaagagtaaacattactcagtggaaagctaagttcagaaggtactttgtttttcctcccttgccttaagtccttggtatttataatcaatgctgaaccttctatttcactaccgctccctgttttagatattcagatttaaaaggttttcaaagaattactttcttccatgttcaaagctagattttactaaacacatgtatcacattcatatatattgtttcttggccccactgccaaaggaagtcagtcagtaatttcacaaccgttatcagagtttggaagcagaaatagctgttaactaaaatctcccactgctcagactactttctgccctaatggccattactatccagtctgtattgctacaagggacccactggtaccccttttagattctatcaaaaggaacagggttttcctagaggcaggcagcctggtggtatggcacagcagaagcttactgctaatgaaatgggaacctccccctcccttgtggtttcagcacagaacctgaatgccaggaaaaattcctgggccaagaagctaaagctaaagaaaccttccttttttcaacgtttttttttctttcaaactgtagggtcacttttgattgaggcaaaggggtcctactgtaagtggaaaagactcactcccctaacataagttttcactgtggtgggatggtgccgcccgatatgcttgatatgcttttccttccacatgttaagctaggaaacctaacaggatgtcagcagggcagttaactctggactcagagccctcaagggcatgtggcagaacctcatggacatcacaagaccatcagtctgaatccaggtcgtgggggctgtcatagccgaactccttctgcacatccagagggtacttgctccacatccgctgtctgctgctgcctctttcctcctcactcaggctgttgtagtcagcagagcctagaatgacatcccgggagtggattctaaatgtgattttcctaggctactgcaggagccccttctcttctcagaaaggtctgtttttgttcccgattgtaatgcaaaatccttgctcaataaataaaaaagaatatagaattcttttttttttaaagaaggaatcactttcctatcatctaaaccaagttccttcacactggagtattttgtcacttctcccctccgtggagtattttgtcacttctcccctccgtataggattttttgttgttgtaagagttgtagtcatattgtaaatatttttgtacctttctccttttaacgtgttattgacaaacctccccaaaagaatatgcaattgtttgattcatttctctgttatcagacaccaataaattctttttgttgggc

SEQ ID NO: 29361 - DNA, 2263 bp, Homo sapiens
  source 1..2263: mol_type = unassigned DNA
atttcagtccccgttaccctctgctttttctgctcctcagagtcaacagctgttgcagcatgagcgatacgcttggttctcctaactagcaccttcccctctcccctgactcagctggtagcccctcctccccgcacctgcccaaaggtcactggacaggcatttgtctggccttcccttttactgctggctgggaaggaggagcatcagaccacagatcctggaaggcacttctctccctgactgctgctcacactgccgtgagaacctgcttatatccaggaccaaggagtgagtggcaatgccaggaagctggtgaagggtttcctctcctccaccatggttgacagcactgagtatgaagtggcctcccagcctgaggtggaaacctcccctttgggtgatggggccagcccagggccggagcaggtgaagctgaagaaggagatctcactgcttaacggcgtgtgcctgattgtggggaacatgatcggctcgggcatctttgtttcccccaagggtgtgctcatatacagtgcctcctttggtctctctctggtcatctgggctgtcgggggcctcttctccgtctttggggccctttgttatgcggaactgggcaccaccattaagaaatctggggccagctatgcctatatcctggaggcctttggaggattccttgctttcatcagactctggacctccctgctcatcattgagcccaccagccaggccatcattgccatcacctttgccaactacatggtacagcctctcttcccgagctgcttcgccccttatgctgccagccgcctgctggctgctgcctgcatttgtctcttaaccttcattaactgtgcctatgtcaaatggggaaccctggtacaagatattttcacctatgctaaagtattggcactgatcgcggtcatcgttgcaggcattgttagacttggccagggagcctctactcattttgagaattcctttgagggttcatcatttgcagtgggtgacattgccctggcactgtactcagctctgttctcctactcaggctgggacaccctcaactatgtcactgaagagatcaagaatcctgagaggaacctgcccctctccattggcatctccatgcccattgtcaccatcatctatatcttgaccaatgtggcctattatactgtgctagacatgagagacatcttggccagtgatgctgttgctgtgacttttgcagatcagatatttggaatatttaactggataattccactgtcagttgcattatcctgttttggtggcctcaatgcctccattgtggctgcttctaggcttttctttgtgggctcaagagaaggccatctccctgatgccatctgcatgatccatgttgagcggttcacaccagtgccttctctgctcttcaatggtatcatggcattgatctacttgtgcgtggaagacatcttccagctcattaactactacagcttcagctactggttctttgtggggctttctattgtgggtcagctttatctgcgctggaaggagcctgatcgacctcgtcccctcaagctcagcgttttcttcccgattgtcttctgcctctgcaccatcttcctggtggctgttccactttacagtgatactatcaactccctcatcggcattgccattgccctctcaggcctgcccttttacttcctcatcatcagagtgccagaacataagcgaccgctttacctccgaaggatcgtggggtctgccacaaggtacctccaggtcctgtgtatgtcagttgctgcagaaatggatttggaagatggaggagagatgcccaagcaacgggatcccaaatctaactaaacaccatctggaatcctgatgtggaaagcaggggtttctggtctactggctagagctaaggaagttgaaaaggaaagctcacttctttggaggcacctgtccagaagcctggcctaggcagcttcaacctttgaacttactttttgaaatgaaaagtaatttatttgttttgctacatactgttccagacttttaaaggggacaatgaaggtgactgtggggaggagcatgtcaggtttgggcttggttgttttagaagcacctgggtgtgcctacctactcctcttttcttttaaaagggcccacaatgctccaatttcctgtctcctttagagagacatgaaactatcacaggtgctggatgacaataaaagtttatgttcctaaa

SEQ ID NO: 29362 - DNA, 2098 bp, Homo sapiens
  source 1..2098: mol_type = unassigned DNA
aatctcagcatgggaacaagcctttgtgtcacactgtgcaaccttcctccctttcttaaatgcttggggcatttgtctggccttcccttttactgctggctgggaaggaggagcatcagaccacagatcctggaaggcacttctctccctgactgctgctcacactgccgtgagaacctgcttatatccaggaccaaggaggcaatgccaggaagctggtgaagggtttcctctcctccaccatggttgacagcactgagtatgaagtggcctcccagcctgaggtggaaacctcccctttgggtgatggggccagcccagggccggagcaggtgaagctgaagaaggagatctcactgcttaacggcgtgtgcctgattgtggggaacatgatcggctcgggcatctttgtttcccccaagggtgtgctcatatacagtgcctcctttggtctctctctggtcatctgggctgtcgggggcctcttctccgtctttggggccctttgttatgcggaactgggcaccaccattaagaaatctggggccagctatgcctatatcctggaggcctttggaggattccttgctttcatcagactctggacctccctgctcatcattgagcccaccagccaggccatcattgccatcacctttgccaactacatggtacagcctctcttcccgagctgcttcgccccttatgctgccagccgcctgctggctgctgcctgcatttgtctcttaaccttcattaactgtgcctatgtcaaatggggaaccctggtacaagatattttcacctatgctaaagtattggcactgatcgcggtcatcgttgcaggcattgttagacttggccagggagcctctactcattttgagaattcctttgagggttcatcatttgcagtgggtgacattgccctggcactgtactcagctctgttctcctactcaggctgggacaccctcaactatgtcactgaagagatcaagaatcctgagaggaacctgcccctctccattggcatctccatgcccattgtcaccatcatctatatcttgaccaatgtggcctattatactgtgctagacatgagagacatcttggccagtgatgctgttgctgtgacttttgcagatcagatatttggaatatttaactggataattccactgtcagttgcattatcctgttttggtggcctcaatgcctccattgtggctgcttctaggcttttctttgtgggctcaagagaaggccatctccctgatgccatctgcatgatccatgttgagcggttcacaccagtgccttctctgctcttcaatggtatcatggcattgatctacttgtgcgtggaagacatcttccagctcattaactactacagcttcagctactggttctttgtggggctttctattgtgggtcagctttatctgcgctggaaggagcctgatcgacctcgtcccctcaagctcagcgttttcttcccgattgtcttctgcctctgcaccatcttcctggtggctgttccactttacagtgatactatcaactccctcatcggcattgccattgccctctcaggcctgcccttttacttcctcatcatcagagtgccagaacataagcgaccgctttacctccgaaggatcgtggggtctgccacaaggtacctccaggtcctgtgtatgtcagttgctgcagaaatggatttggaagatggaggagagatgcccaagcaacgggatcccaaatctaactaaacaccatctggaatcctgatgtggaaagcaggggtttctggtctactggctagagctaaggaagttgaaaaggaaagctcacttctttggaggcacctgtccagaagcctggcctaggcagcttcaacctttgaacttactttttgaaatgaaaagtaatttatttgttttgctacatactgttccagacttttaaaggggacaatgaaggtgactgtggggaggagcatgtcaggtttgggcttggttgttttagaagcacctgggtgtgcctacctactcctcttttcttttaaaagggcccacaatgctccaatttc

SEQ ID NO: 29363 - DNA, 2094 bp, Homo sapiens
  source 1..2094: mol_type = unassigned DNA
atttcagtccccgttaccctctgctttttctgctcctcagagtcaacagctgttgcagcatgagcgatacgcttggttctcctaactagcaccttcccctctcccctgactcagctggtagcccctcctccccgcacctgcccaaaggtcactggacagggcaatgccaggaagctggtgaagggtttcctctcctccaccatggttgacagcactgagtatgaagtggcctcccagcctgaggtggaaacctcccctttgggtgatggggccagcccagggccggagcaggtgaagctgaagaaggagatctcactgcttaacggcgtgtgcctgattgtggggaacatgatcggctcgggcatctttgtttcccccaagggtgtgctcatatacagtgcctcctttggtctctctctggtcatctgggctgtcgggggcctcttctccgtctttggggccctttgttatgcggaactgggcaccaccattaagaaatctggggccagctatgcctatatcctggaggcctttggaggattccttgctttcatcagactctggacctccctgctcatcattgagcccaccagccaggccatcattgccatcacctttgccaactacatggtacagcctctcttcccgagctgcttcgccccttatgctgccagccgcctgctggctgctgcctgcatttgtctcttaaccttcattaactgtgcctatgtcaaatggggaaccctggtacaagatattttcacctatgctaaagtattggcactgatcgcggtcatcgttgcaggcattgttagacttggccagggagcctctactcattttgagaattcctttgagggttcatcatttgcagtgggtgacattgccctggcactgtactcagctctgttctcctactcaggctgggacaccctcaactatgtcactgaagagatcaagaatcctgagaggaacctgcccctctccattggcatctccatgcccattgtcaccatcatctatatcttgaccaatgtggcctattatactgtgctagacatgagagacatcttggccagtgatgctgttgctgtgacttttgcagatcagatatttggaatatttaactggataattccactgtcagttgcattatcctgttttggtggcctcaatgcctccattgtggctgcttctaggcttttctttgtgggctcaagagaaggccatctccctgatgccatctgcatgatccatgttgagcggttcacaccagtgccttctctgctcttcaatggtatcatggcattgatctacttgtgcgtggaagacatcttccagctcattaactactacagcttcagctactggttctttgtggggctttctattgtgggtcagctttatctgcgctggaaggagcctgatcgacctcgtcccctcaagctcagcgttttcttcccgattgtcttctgcctctgcaccatcttcctggtggctgttccactttacagtgatactatcaactccctcatcggcattgccattgccctctcaggcctgcccttttacttcctcatcatcagagtgccagaacataagcgaccgctttacctccgaaggatcgtggggtctgccacaaggtacctccaggtcctgtgtatgtcagttgctgcagaaatggatttggaagatggaggagagatgcccaagcaacgggatcccaaatctaactaaacaccatctggaatcctgatgtggaaagcaggggtttctggtctactggctagagctaaggaagttgaaaaggaaagctcacttctttggaggcacctgtccagaagcctggcctaggcagcttcaacctttgaacttactttttgaaatgaaaagtaatttatttgttttgctacatactgttccagacttttaaaggggacaatgaaggtgactgtggggaggagcatgtcaggtttgggcttggttgttttagaagcacctgggtgtgcctacctactcctcttttcttttaaaagggcccacaatgctccaatttcctgtctcctttagagagacatgaaactatcacaggtg

SEQ ID NO: 29364 - DNA, 2447 bp, Homo sapiens
  source 1..2447: mol_type = unassigned DNA
gcatggaggacacagagagagagagtgctgtgtattccttccccgctactgtcctgtcctcagctaacttgctctgggacagcttccccagggctacagatactgcactcagctgactgtcctttcttctgggcccctggtcccagagcagagctgacaaaggagattcctgagagagcaccttcttatcacagaaagtgctgagccaagagctcctagctgccccttttgcagatgtgaagggccagtgaaccttggacccagatggttgcttaatactcctttccccctccctcactccttcctttgcgggctgcctcacctcctccacccttcttgcttaaatccataggcatttgtctggccttcccttttactgctggctgggaaggaggagcatcagaccacagatcctggaaggcacttctctccctgactgctgctcacactgccgtgagaacctgcttatatccaggaccaaggaggcaatgccaggaagctggtgaagggtttcctctcctccaccatggttgacagcactgagtatgaagtggcctcccagcctgaggtggaaacctcccctttgggtgatggggccagcccagggccggagcaggtgaagctgaagaaggagatctcactgcttaacggcgtgtgcctgattgtggggaacatgatcggctcgggcatctttgtttcccccaagggtgtgctcatatacagtgcctcctttggtctctctctggtcatctgggctgtcgggggcctcttctccgtctttggggccctttgttatgcggaactgggcaccaccattaagaaatctggggccagctatgcctatatcctggaggcctttggaggattccttgctttcatcagactctggacctccctgctcatcattgagcccaccagccaggccatcattgccatcacctttgccaactacatggtacagcctctcttcccgagctgcttcgccccttatgctgccagccgcctgctggctgctgcctgcatttgtctcttaaccttcattaactgtgcctatgtcaaatggggaaccctggtacaagatattttcacctatgctaaagtattggcactgatcgcggtcatcgttgcaggcattgttagacttggccagggagcctctactcattttgagaattcctttgagggttcatcatttgcagtgggtgacattgccctggcactgtactcagctctgttctcctactcaggctgggacaccctcaactatgtcactgaagagatcaagaatcctgagaggaacctgcccctctccattggcatctccatgcccattgtcaccatcatctatatcttgaccaatgtggcctattatactgtgctagacatgagagacatcttggccagtgatgctgttgctgtgacttttgcagatcagatatttggaatatttaactggataattccactgtcagttgcattatcctgttttggtggcctcaatgcctccattgtggctgcttctaggcttttctttgtgggctcaagagaaggccatctccctgatgccatctgcatgatccatgttgagcggttcacaccagtgccttctctgctcttcaatggtatcatggcattgatctacttgtgcgtggaagacatcttccagctcattaactactacagcttcagctactggttctttgtggggctttctattgtgggtcagctttatctgcgctggaaggagcctgatcgacctcgtcccctcaagctcagcgttttcttcccgattgtcttctgcctctgcaccatcttcctggtggctgttccactttacagtgatactatcaactccctcatcggcattgccattgccctctcaggcctgcccttttacttcctcatcatcagagtgccagaacataagcgaccgctttacctccgaaggatcgtggggtctgccacaaggtacctccaggtcctgtgtatgtcagttgctgcagaaatggatttggaagatggaggagagatgcccaagcaacgggatcccaaatctaactaaacaccatctggaatcctgatgtggaaagcaggggtttctggtctactggctagagctaaggaagttgaaaaggaaagctcacttctttggaggcacctgtccagaagcctggcctaggcagcttcaacctttgaacttactttttgaaatgaaaagtaatttatttgttttgctacatactgttccagacttttaaaggggacaatgaaggtgactgtggggaggagcatgtcaggtttgggcttggttgttttagaagcacctgggtgtgcctacctactcctcttttcttttaaaagggcccacaatgctccaatttcctgtctcctttagagagacatgaaactatcacaggtgctggatgacaataaaagtttatgttcct

SEQ ID NO: 29365 - DNA, 1996 bp, Homo sapiens
  source 1..1996: mol_type = unassigned DNA
cttttactgctggctgggaaggaggagcatcagaccacagatcctggaaggcacttctctccctgactgctgctcacactgccgtgagaacctgcttatatccaggaccaaggaggcaatgccaggaagctggtgaagggtttcctctcctccaccatggttgacagcactgagtatgaagtggcctcccagcctgaggtggaaacctcccctttgggtgatggggccagcccagggccggagcaggtgaagctgaagaaggagatatacagtgcctcctttggtctctctctggtcatctgggctgtcgggggcctcttctccgtctttggggccctttgttatgcggaactgggcaccaccattaagaaatctggggccagctatgcctatatcctggaggcctttggaggattccttgctttcatcagactctggacctccctgctcatcattgagcccaccagccaggccatcattgccatcacctttgccaactacatggtacagcctctcttcccgagctgcttcgccccttatgctgccagccgcctgctggctgctgcctgcatttgtctcttaaccttcattaactgtgcctatgtcaaatggggaaccctggtacaagatattttcacctatgctaaagtattggcactgatcgcggtcatcgttgcaggcattgttagacttggccagggagcctctactcattttgagaattcctttgagggttcatcatttgcagtgggtgacattgccctggcactgtactcagctctgttctcctactcaggctgggacaccctcaactatgtcactgaagagatcaagaatcctgagaggaacctgcccctctccattggcatctccatgcccattgtcaccatcatctatatcttgaccaatgtggcctattatactgtgctagacatgagagacatcttggccagtgatgctgttgctgtgacttttgcagatcagatatttggaatatttaactggataattccactgtcagttgcattatcctgttttggtggcctcaatgcctccattgtggctgcttctaggcttttctttgtgggctcaagagaaggccatctccctgatgccatctgcatgatccatgttgagcggttcacaccagtgccttctctgctcttcaatggtatcatggcattgatctacttgtgcgtggaagacatcttccagctcattaactactacagcttcagctactggttctttgtggggctttctattgtgggtcagctttatctgcgctggaaggagcctgatcgacctcgtcccctcaagctcagcgttttcttcccgattgtcttctgcctctgcaccatcttcctggtggctgttccactttacagtgatactatcaactccctcatcggcattgccattgccctctcaggcctgcccttttacttcctcatcatcagagtgccagaacataagcgaccgctttacctccgaaggatcgtggggtctgccacaaggtacctccaggtcctgtgtatgtcagttgctgcagaaatggatttggaagatggaggagagatgcccaagcaacgggatcccaaatctaactaaacaccatctggaatcctgatgtggaaagcaggggtttctggtctactggctagagctaaggaagttgaaaaggaaagctcacttctttggaggcacctgtccagaagcctggcctaggcagcttcaacctttgaacttactttttgaaatgaaaagtaatttatttgttttgctacatactgttccagacttttaaaggggacaatgaaggtgactgtggggaggagcatgtcaggtttgggcttggttgttttagaagcacctgggtgtgcctacctactcctcttttcttttaaaagggcccacaatgctccaatttcctgtctcctttagagagacatgaaactatcacaggtgctggatgacaataaaagtttatgttcct

SEQ ID NO: 29366 - DNA, 847 bp, Homo sapiens
  source 1..847: mol_type = unassigned DNA
atctgggttttcaatcacggctccgccatcttgggtcatcgtacggaaggagagacaaaactgcagtacaggtttttgagagctgtcaaatctctgctatatcagtactggctaaattaggtgttaaatgattgagcttcaagatgggcaaatcatgacttcggactacattcctccttgcctggcggctgggaaattccgtccgcgctgctgctaagacttcagatgaaagacgctccggggactccggcatttgtctggccttcccttttactgctggctgggaaggaggagcatcagaccacagatcctggaaggcacttctctccctgactgctgctcacactgccgtgagaacctgcttatatccaggaccaaggaggcaatgccaggaagctggtgaagggtttcctctcctccaccatggttgacagcactgagtatgaagtggcctcccagcctgaggtggaaacctcccctttgggtgatggggccagcccagggccggagcaggtgaagctgaagaaggagatctcactgcttaacggcgtgtgcctgattgtggggaacatgatcggctcgggcatctttgtttcccccaagggtgtgctcatatacagtgcctcctttggtctctctctggtcatctgggctgtcgggggcctcttctccgtctttggggccctttgttatgcggaactgggcaccaccattaagaaatctggggccagctatgcctatatcctggaggcctttggaggattccttgctttcatcagactctggacctccctgctcatcattgagcccaccagccaggccatcattgccatcacctttgccaact

SEQ ID NO: 29367 - DNA, 741 bp, Homo sapiens
  source 1..741: mol_type = unassigned DNA
gtcaaatctctgctatatcagtactggctaaattaggtgttaaatgattgagcttcaagatgggcaaatcatgacttcggactacattcctccttgcctggcggctgggaaattcctgggagtgctgacagcaaacaaatgacaccgggaatggacaatatcactgggaagcatgttccaggcagggagaacaggagttgcaaaagctgtgaggcgggagcatgcttgctgtgcggccaccgcagggaagccagtgaagctggagtggagtggggaagacagcagggaggcccatgcagacaaggacagcttctctctttctaggacctcccttacgacttggacccgactccagagtgcaattaaggggccggcaagttgggtagcaggctgagagtgtctaaaggacactaaaatatctttggaataattcaggcatttgtctggccttcccttttactgctggctgggaaggaggagcatcagaccacagatcctggaaggcacttctctccctgactgctgctcacactgccgtgagaacctgcttatatccaggaccaaggaggcaatgccaggaagctggtgaagggtttcctctcctccaccatggttgacagcactgagtatgaagtggcctcccagcctgaggtggaaacctcccctttgggtgatggggccagcccagggccggagcaggtgaagctgaagaaggagatctcactgcttaacggcgtgtgc

SEQ ID NO: 29368 - DNA, 720 bp, Homo sapiens
  source 1..720: mol_type = unassigned DNA
tttgtgtcacactgtgcaaccttcctccctttcttaaatgcttggggcatttgtctggccttcccttttactgctggctgggaaggaggagcatcagaccacagatcctggaaggcacttctctccctgactgctgctcacactgccgtgagaacctgcttatatccaggaccaaggagtgagtggcaatgccaggaagctggtgaagggtttcctctcctccaccatggttgacagcactgagtatgaagtggcctcccagcctgaggtggaaacctcccctttgggtgatggggccagcccagggccggagcaggtgaagctgaagaaggagatctcactgcttaacggcgtgtgcctgattgtggggaacatgatcggctcgggcatctttgtttcccccaagggtgtgctcatatacagtgcctcctttggtctctctctggtcatctgggctgtcgggggcctcttctccgtctttggggccctttgttatgcggaactgggcaccaccattaagaaatctggggccagctatgcctatatcctggaggcctttggaggattccttgctttcatcagactctggacctccctgctcatcattgagcccaccagccaggccatcattgccatcacctttgccaactacatggtacagcctctcttcccgagctgcttcgccccttatgctgccagccgcctgctggctgctgcctg

SEQ ID NO: 29369 - DNA, 519 bp, Homo sapiens
  source 1..519: mol_type = unassigned DNA
cattttcctctcagctgtctcctgttcggtgttttccagcatgtgctgcctggctgcagctgtctccctgccttggctcggggtgatatctctccagcagcaactctgggggcaatgccaggaagctggtgaagggtttcctctcctccaccatggttgacagcactgagtatgaagtggcctcccagcctgaggtggaaacctcccctttgggtgatggggccagcccagggccggagcaggtgaagctgaagaaggagatctcactgcttaacggcgtgtgcctgattgtggggaacatgatcggctcgggcatctttgtttcccccaagggtgtgctcatatacagtgcctcctttggtctctctctggtcatctgggctgtcgggggcctcttctccgtctttggggccctttgttatgcggaactgggcaccaccattaagaaatctggggccagctatgcctatatcctggaggcctttggaggattccttgctttcatcagactctggacct

SEQ ID NO: 29370 - DNA, 2272 bp, Homo sapiens
  source 1..2272: mol_type = unassigned DNA
gttttcctgttttccatttcagtccccgttaccctctgctttttctgctcctcagagtcaacagctgttgcagcatgagcgatacgcttggttctcctaactagcaccttcccctctcccctgactcagctggtagcccctcctccccgcacctgcccaaaggtcactggacaggcatttgtctggccttcccttttactgctggctgggaaggaggagcatcagaccacagatcctggaaggcacttctctccctgactgctgctcacactgccgtgagaacctgcttatatccaggaccaaggaggcaatgccaggaagctggtgaagggtttcctctcctccaccatggttgacagcactgagtatgaagtggcctcccagcctgaggtggaaacctcccctttgggtgatggggccagcccagggccggagcaggtgaagctgaagaaggagatctcactgcttaacggcgtgtgcctgattgtggggaacatgatcggctcgggcatctttgtttcccccaagggtgtgctcatatacagtgcctcctttggtctctctctggtcatctgggctgtcgggggcctcttctccgtctttggggccctttgttatgcggaactgggcaccaccattaagaaatctggggccagctatgcctatatcctggaggcctttggaggattccttgctttcatcagactctggacctccctgctcatcattgagcccaccagccaggccatcattgccatcacctttgccaactacatggtacagcctctcttcccgagctgcttcgccccttatgctgccagccgcctgctggctgctgcctgcatttgtctcttaaccttcattaactgtgcctatgtcaaatggggaaccctggtacaagatattttcacctatgctaaagtattggcactgatcgcggtcatcgttgcaggcattgttagacttggccagggagcctctactcattttgagaattcctttgagggttcatcatttgcagtgggtgacattgccctggcactgtactcagctctgttctcctactcaggctgggacaccctcaactatgtcactgaagagatcaagaatcctgagaggaacctgcccctctccattggcatctccatgcccattgtcaccatcatctatatcttgaccaatgtggcctattatactgtgctagacatgagagacatcttggccagtgatgctgttgctgtgacttttgcagatcagatatttggaatatttaactggataattccactgtcagttgcattatcctgttttggtggcctcaatgcctccattgtggctgcttctaggcttttctttgtgggctcaagagaaggccatctccctgatgccatctgcatgatccatgttgagcggttcacaccagtgccttctctgctcttcaatggtatcatggcattgatctacttgtgcgtggaagacatcttccagctcattaactactacagcttcagctactggttctttgtggggctttctattgtgggtcagctttatctgcgctggaaggagcctgatcgacctcgtcccctcaagctcagcgttttcttcccgattgtcttctgcctctgcaccatcttcctggtggctgttccactttacagtgatactatcaactccctcatcggcattgccattgccctctcaggcctgcccttttacttcctcatcatcagagtgccagaacataagcgaccgctttacctccgaaggatcgtggggtctgccacaaggtacctccaggtcctgtgtatgtcagttgctgcagaaatggatttggaagatggaggagagatgcccaagcaacgggatcccaaatctaactaaacaccatctggaatcctgatgtggaaagcaggggtttctggtctactggctagagctaaggaagttgaaaaggaaagctcacttctttggaggcacctgtccagaagcctggcctaggcagcttcaacctttgaacttactttttgaaatgaaaagtaatttatttgttttgctacatactgttccagacttttaaaggggacaatgaaggtgactgtggggaggagcatgtcaggtttgggcttggttgttttagaagcacctgggtgtgcctacctactcctcttttcttttaaaagggcccacaatgctccaatttcctgtctcctttagagagacatgaaactatcacaggtgctggatgacaataaaagtttatgttcctaaa

SEQ ID NO: 29371 - DNA, 596 bp, Homo sapiens
  source 1..596: mol_type = unassigned DNA
cctttccccctccctcactccttcctttgcgggctgcctcacctcctccacccttcttgcttaaatccataggcatttgtctggccttcccttttactgctggctgggaaggaggagcatcagaccacagatcctggaaggcacttctctccctgactgctgctcacactgccgtgagaacctgcttatatccaggaccaaggagtgagtggcaatgccaggaagctggtgaagggtttcctctcctccaccatggttgacagcactgagtatgaagtggcctcccagcctgaggtggaaacctcccctttgggtgatggggccagcccagggccggagcaggtgaagctgaagaaggagatctcactgcttaacggcgtgtgcctgattgtggggaacatgatcggctcgggcatctttgtttcccccaagggtgtgctcatatacagtgcctcctttggtctctctctggtcatctgggctgtcgggggcctcttctccgtctttggggccctttgttatgcggaactgggcaccaccattaagaaatctggggccagctatgcctatatcctggaggcctttggaggattcct

SEQ ID NO: 29372 - DNA, 476 bp, Homo sapiens
  source 1..476: mol_type = unassigned DNA
ttgcttaaatccataggcatttgtctggccttcccttttactgctggctgggaaggaggagcatcagaccacagatcctggaaggcacttctctccctgactgctgctcacactgccgtgagaacctgcttatatccaggaccaaggagtgagtggtgaagtgggtctacttgggctttgccagggctgaagactccagctaagggttaagggatgctctttgggcaggaggatggttgtgggtttccagcaggtttctgaagcctttagttttggcagacgtagagtccttggggaaaagagcagtgtcatgagacgctcccacagattagctgctggtaggggcaatgccaggaagctggtgaagggtttcctctcctccaccatggttgacagcactgagtatgaagtggcctcccagcctgaggtggaaacctcccctttgggtgatggggccagcccagggccggagcagg

SEQ ID NO: 29373 - DNA, 3017 bp, Homo sapiens
  source 1..3017: mol_type = unassigned DNA
tggagtgcagtggcctaatgtgggttcactgcaagctccgcctcccgggttcatgccattctcctcattctcctgcctcagcctcccgaatagctgggactacaggtgcccgccaccacgcccggctaatttttatttttttgtgtttttagtagagacggggtttcaccgtgttagccaggatggtcttgatctcctgaccttgtgatccgcctgcctcagcctcccaaagtgctgggattacaggcgtgagccaccgcgtctggcctgatttcctcatattttttaggaaagtggagtcaacttatatttgaggaaggcgtttataggaatttatgcttatcccagagatcttggtatgttttgtcaagaatgaaaaggcacgtgggtctggtggggatgcagtcagatatttgatctcttgactgtgtttcttttgaagtagtctgaggctcagactttggggcagtggcccaggcttggaggcaaccccccagtctctctttgcatggggaagtgtgcagagttctcttagaacacccagtcacatggtgtagagactgctcttacacttcctgtaatctcagcatgggaacaagcctttgtgtcacactgtgcaaccttcctccctttcttaaatgcttggggtgagagagaagagaggctagggtggggcatggaggacacagagagagagagtgctgtgtattccttccccgctactgtcctgtcctcagctaacttgctctgggacagcttccccagggctacagatactgcactcagctgactgtcctttcttctgggcccctggtcccagagcagagctgacaaaggagattcctgagagagcaccttcttatcacagaaagtgctgagccaagagctcctagctgccccttttgcagatgtgaagggccagtgaaccttggacccagatggttgcttaatactcctttccccctccctcactccttcctttgcgggctgcctcacctcctccacccttcttgcttaaatccataggcatttgtctggccttcccttttactgctggctgggaaggaggagcatcagaccacagatcctggaaggcacttctctccctgactgctgctcacactgccgtgagaacctgcttatatccaggaccaaggaggcaatgccaggaagctggtgaagggtttcctctcctccaccatggttgacagcactgagtatgaagtggcctcccagcctgaggtggaaacctcccctttgggtgatggggccagcccagggccggagcaggtgaagctgaagaaggagatctcactgcttaacggcgtgtgcctgattgtggggaacatgatcggctcgggcatctttgtttcccccaagggtgtgctcatatacagtgcctcctttggtctctctctggtcatctgggctgtcgggggcctcttctccgtctttggggccctttgttatgcggaactgggcaccaccattaagaaatctggggccagctatgcctatatcctggaggcctttggaggattccttgctttcatcagactctggacctccctgctcatcattgagcccaccagccaggccatcattgccatcacctttgccaactacatggtacagcctctcttcccgagctgcttcgccccttatgctgccagccgcctgctggctgctgcctgcatttgtctcttaaccttcattaactgtgcctatgtcaaatggggaaccctggtacaagatattttcacctatgctaaagtattggcactgatcgcggtcatcgttgcaggcattgttagacttggccagggagcctctactcattttgagaattcctttgagggttcatcatttgcagtgggtgacattgccctggcactgtactcagctctgttctcctactcaggctgggacaccctcaactatgtcactgaagagatcaagaatcctgagaggaacctgcccctctccattggcatctccatgcccattgtcaccatcatctatatcttgaccaatgtggcctattatactgtgctagacatgagagacatcttggccagtgatgctgttgctgtggcttttctttgtgggctcaagagaaggccatctccctgatgccatctgcatgatccatgttgagcggttcacaccagtgccttctctgctcttcaatggtatcatggcattgatctacttgtgcgtggaagacatcttccagctcattaactactacagcttcagctactggttctttgtggggctttctattgtgggtcagctttatctgcgctggaaggagcctgatcgacctcgtcccctcaagctcagcgttttcttcccgattgtcttctgcctctgcaccatcttcctggtggctgttccactttacagtgatactatcaactccctcatcggcattgccattgccctctcaggcctgcccttttacttcctcatcatcagagtgccagaacataagcgaccgctttacctccgaaggatcgtggggtctgccacaaggtacctccaggtcctgtgtatgtcagttgctgcagaaatggatttggaagatggaggagagatgcccaagcaacgggatcccaaatctaactaaacaccatctggaatcctgatgtggaaagcaggggtttctggtctactggctagagctaaggaagttgaaaaggaaagctcacttctttggaggcacctgtccagaagcctggcctaggcagcttcaacctttgaacttactttttgaaatgaaaagtaatttatttgttttgctacatactgttccagacttttaaaggggacaatgaaggtgactgtggggaggagcatgtcaggtttgggcttggttgttttagaagcacctgggtgtgcctacctactcctcttttcttttaaaagggcccacaatgctccaatttcctgtctcctttagagagacatgaaactatcacaggtgctggatgacaataaaagtttatgttcct

SEQ ID NO: 29374 - DNA, 572 bp, Homo sapiens
  source 1..572: mol_type = unassigned DNA
atattttttaggaaagtggagtcaacttatatttgaggaaggcgtttataggaatttatgcttatcccagagatcttggcatttgtctggccttcccttttactgctggctgggaaggaggagcatcagaccacagatcctggaaggcacttctctccctgactgctgctcacactgccgtgagaacctgcttatatccaggaccaaggaggcaatgccaggaagctggtgaagggtttcctctcctccaccatggttgacagcactgagtatgaagtggcctcccagcctgaggtggaaacctcccctttgggtgatggggccagcccagggccggagcaggtgaagctgaagaaggagatctcactgcttaacggcgtgtgcctgattgtggggaacatgatcggctcgggcatctttgtttcccccaagggtgtgctcatatacagtgcctcctttggtctctctctggtcatctgggctgtcgggggcctcttctccgtctttggggccctttgttatgcggaactgggcaccaccattaagaaatctggggccagctatgcctatat

SEQ ID NO: 29375 - DNA, 569 bp, Homo sapiens
  source 1..569: mol_type = unassigned DNA
ttgctgcccgacgccttcccagcttagtggagcccactttctttggcatttgtctggccttcccttttactgctggctgggaaggaggagcatcagaccacagatcctggaaggcacttctctccctgactgctgctcacactgccgtgagaacctgcttatatccaggaccaaggaggcaatgccaggaagctggtgaagggtttcctctcctccaccatggttgacagcactgagtatgaagtggcctcccagcctgaggtggaaacctcccctttgggtgatggggccagcccagggccggagcaggtgaagctgaagaaggagatctcactgcttaacggcgtgtgcctgattgtggggaacatgatcggctcgggcatctttgtttcccccaagggtgtgctcatatacagtgcctcctttggtctctctctggtcatctgggctgtcgggggcctcttctccgtctttggggccctttgttatgcggaactgggcaccaccattaagaaatctggggccagctatgcctatatcctggaggcctttggaggattccttgcttt

SEQ ID NO: 29376 - DNA, 7243 bp, Homo sapiens
  source 1..7243: mol_type = unassigned DNA
gcggccgcgggctcccgctaaccgcagcctccactcctctccccgcgcgccgcgcccccgccccgccccgccccgcccggtctcgccggccgagcgtccgttggtccttgagcgcgtccgacagtctgtctgttcgcgatcctgccggagccccgccgccgccggcttggattctgaaaccttccttgtatccctcctgagacatctttgctgcaagatcgaggctgtcctctggtgagaaggtggtgaggcttcccgtcatattccagctctgaacagcaacatggggtgcaaagtcctgctcaacattgggcagcagatgctgcggcggaaggtggtggactgtagccgggaggagacgcggctgtctcgctgcctgaacacttttgatctggtggccctcggggtgggcagcacactgggtgctggtgtctacgtcctggctggagctgtggcccgtgagaatgcaggccctgccattgtcatctccttcctgatcgctgcgctggcctcagtgctggctggcctgtgctatggcgagtttggtgctcgggtccccaagacgggctcagcttacctctacagctatgtcaccgttggagagctctgggccttcatcaccggctggaacttaatcctctcctacatcatcggtacttcaagcgtagcgagggcctggagcgccaccttcgacgagctgataggcagacccatcggggagttctcacggacacacatgactctgaacgcccccggcgtgctggctgaaaaccccgacatattcgcagtgatcataattctcatcttgacaggacttttaactcttggtgtgaaagagtcggccatggtcaacaaaatattcacttgtattaacgtcctggtcctgggcttcataatggtgtcaggatttgtgaaaggatcggttaaaaactggcagctcacggaggaggattttgggaacacatcaggccgtctctgtttgaacaatgacacaaaagaagggaagcccggtgttggtggattcatgcccttcgggttctctggtgtcctgtcgggggcagcgacttgcttctatgccttcgtgggctttgactgcatcgccaccacaggtgaagaggtgaagaacccacagaaggccatccccgtggggatcgtggcgtccctcttgatctgcttcatcgcctactttggggtgtcggctgccctcacgctcatgatgccctacttctgcctggacaataacagccccctgcccgacgcctttaagcacgtgggctgggaaggtgccaagtacgcagtggccgtgggctccctctgcgctctttccgccagtcttctaggttccatgtttcccatgcctcgggttatctatgccatggctgaggatggactgctatttaaattcttagccaacgtcaatgataggaccaaaacaccaataatcgccacattagcctcgggtgccgttgctgctgtgatggccttcctctttgacctgaaggacttggtggacctcatgtccattggcactctcctggcttactcgttggtggctgcctgtgtgttggtcttacggtaccagccagagcagcctaacctggtataccagatggccagtacttccgacgagttagatccagcagaccaaaatgaattggcaagcaccaatgattcccagctgggctttttaccagaggcagagatgttctctttgaaaaccatactctcacccaaaaacatggagccttccaaaatctctgggctaattgtgaacatttcaaccagcctcatagctgttctcatcatcaccttctgcattgtgaccgtgcttggaagggaggctctcaccaaaggggcgctgtgggcagtctttctgctcgcagggtctgccctcctctgtgccgtggtcacgggcgtcatctggaggcagcccgagagcaagaccaagctctcatttaaggttcccttcctgccagtgctccccatcctgagcatcttcgtgaacgtctatctcatgatgcagctggaccagggcacctgggtccggtttgctgtgtggatgctgataggcttcatcatctactttggctatggcctgtggcacagcgaggaggcgtccctggatgccgaccaagcaaggactcctgacggcaacttggaccagtgcaagtgacgcacagccccgccccccggaggtggcagcagccccgagggacgcccccagaggaccgggaggcaccccaccctccccaccagtgcaacagaaaccacctgcgtccacaccctcactgcagccaaaggtgcaattacttgacctgcagccccagcccaccctcggctctgcagccggttctccgggccctggtcacctccagacagctgcctggccggggccactaggctgcggctggccactgtgtctcctcacttctctgaacaaagcagttcctcccctaccagctcagccccgagctgccgcagcctcaggcagaacggaggtcaccttctctccttatcttgggaaccaggccttcctcccggggactgttctgggattgaaattgtgcatactccaaactttcgcagccatcttcccgctcagccccagacacccagcaatcaagccagatgagtaccacaaaacagtgtgtccccagcagctccccaccccagagccaaatgacagtagtgcacttaaaaaggaaaatcaggcctgttgtccttctccggttgcattcagatgggtcattagggccggaccctgcctgccccttggcttctcagggctttgctctgacaccatgacagctgcccggggctgagggcagctggctccactcaaatgaggaagaagggatcactcccattagggcctgctttgcttatgcatgtgtgtgcacatgcatgtaaaccagggaccttcagctcacggcctccaggcctgggccagttcttgctgctcctgccgtctcccccgactggctgtgtcctgagtaactggaacatgagacagtatctgcaggactggccccatggtggccgagtcagaagtctgtttcctgtgagtcgccaccgttcactcagtcttgccctcccatgctttggagccagtctggtggctcctgtaaggttctcaaggctggtggcagctcagtctggggtcaggacatgtcggggtcatgcgtttctggccctgacataagctgtctggcctctctgtgacatgatgaaattgaaatcaatccacagtccatgaaattgtgacactccaccagattaagttagggcataacattaacttggaaatggccatgtcatcacccctgcggctgtcctatagctgagatgcgtgggtcgcaggggaggtgatttctaggcatattgctgtcccttttgtgtatctgtcatccggatgcttcggaccccacgcctctgcaagtgggagagacccgagcatcctccccacccccatagctccagtgcacgccacccccgtcttgcctgggtcggggcctgcggccagcaccatttcacacacactccttgtagatgggagccagaggaaacctgaacgtgggtggagcgttccactgagtctacttcaggagacagaaggcccatgctgatgggggaggaggagggatgtgggcattttggacaccaggggaaatggaaatgctgctttcaaaacttagtttcctttccatttcttcctagtctggcctttgacacaaatctggtagaaagaagcctgataaattgagggcacttgtaccctccctgtgcccccagaaggttcttggagagaagtgcaagaatttgtgaacacggcggtggagggcgggtggatggccatgggctgagcctccgtatcaggcctgctcaccttgctgggagctttattctgatctcattttgaatgttccagagggagcatcataagagcccagagctccgatttccaaagagtgatattgacatttatggagattggtgttgtaacatattttgataaatactaacttattttgttggggttttggttgtctcttgtcttaggacctggtagttatttgcttgatttttttttccgttattttctacataggcaaagagaattcgagggatagacagtctccaagaaaagtgaagtggtgggagagaattgcttttttcttttttttcttttctctagtttttctttctggctgagatttccgtgcaagacagcacccaatagactatttagagttgacatttgacattttaatgggcgccatggctcattttgtagattgagaaggtgcgtctcccctgctccaagtctcatcatgacagcgtgctgacagctgggagtctgtggccttcctcacgcagaggccttaaagctggacacagaagcacgcctaggctgggcagggatgggacccatgccccctccttagaggacgggcttcctggttaggaaaggacacgtgggggtgccttgcataatagttcactggtcaccgtgcttttatgagtagtgtttttgtgcacttgccaggggttttctctctgtgtgagaggggagtgatttaagcaatggtgtctggagtaagccttacaattttaatagactttttcttatcatatccctcatttctttccctgaaataaaaatacacacaagcaaaaaaaaaatgatagtttcacatctcttagttcccttgcccaaacaagaatattcttagttccactggccaggattttcctacatagtcagaacttacacattactagaggcacacccaccaaggagtattgtgtctacttttatctgtgcaccagccacaaatacccacattggaaagacccatttgtgatgggtaaacatcccttcctgtctcccacaacccctgtgactgccctgcatgtgttcatgacctccgaaggcccaaattcatgaagcagcaaacccagcagatctccacccccctgcctcaggacctctgctgaagagggggatgaagtgggtctccagggaggcagtgggggccttgttggcagctggctcgggagccggcttacaggagggcagctctgcagttgggaggggcaccgtccggaggagaccaggcctctacacaccccccactctacttatcatccctgctcacacacccttgtccaaggctttatgcatcggatttatttttccaaatcaagaggacagtgatagatgcattttccccaggctgtctcagaaaggtcgctaaatgtatactgttgtcagaattgctgagatctccccccacttttggtttttgcagcagtaaaaactctttccactgtgacttattttctctctcaggcagccagccacctggtcccttgtgctgactctagcacagtggccaggatccaatacgagtccaggggtgaccgcaggatggtgggggcagcgggcttctccacctaccccagccaccaaggccctgacgcactgcctcctgcaccttcagcacatccctgtgcacagctggaagggtgcatggcccgctcacctttgttcagatgggtggaaacgctgatgataccagctcctccctgccgtgcccctgccacggagcaggcattgtgaactggctggtgtttgcagtcccacgtggcatggcctccagcccaacccacagtggagactggagacagggcaatgagtctggtggggggcacgtggacatgccccataggggccccacccagacttaacaggcaaggtcctgggcattgcgcgacgcaggactcaatgctaaagcaagcctgcctggctctgtgccagggcccctcttctgattcacacatcccatttttacacagacccttccttcttaataaaggctgacagttctgttggcagccaagaacccacaccatgaagacagggagtgaggggcctttgtgcccaactccagcacagctgcgttctggggtgtgtgagaggcatgttcgtgtctgtgcgctggtggtctcgtgagacagttccgaggacggggaaattgcagggtggtgggggcgtgaggcttatatgtggaactgatgcagagttcgcctgcagacggatctggatatacactatgtataattgttacgtgtaatttaaaatatatctgtttgccatcgtcatgagaagattatatgtaaggctctgaagggagagggagatgtacattctgccaggctcctggggaccttatccgagtcatgaaattgattactgttgatccagtggtgcaagaagctacactccatgtgtcatcacgcttatgactcctaatgtatttttaaggcaaaaaatgtcagccgactccatcttcacccctcgattcctcgagtccagcctttctgtgccagtgcttcactgagccacaacgctctcgccatcgggacccggctgggcctggagtctcggggcacagttgccatggagccctcctgggtcattctacaaatgtgctgagtgccagctgaaaaccccacaggagatggagtaccttggccaagcttaaagagaagattttctcagggtatttattagtgtgtccagcagggtcaggaagcaggatggaaagatgcactcagactgttaatttattaacaaggcaaatgattttgtgtttcttgatgacagactattaagtttgggacttattttcccatttgagaagttataatatatatttaagatgataagtttcctgcttaagttgtgcctttcagcttcaatgagtttaaggagcactaagggtaatgataccaatgagggttggtttattatcaaacctgaatagctgtggtttctccagtaaatattttcttctactgaacatggagccattattaagagttgtgtgttttttattatgtacatttgtatatttttttgcttgtttgatgttctatttttctaatagttttcttttagtttcttaaagttgtgatactagatttagattctgatgctaactgcaaatcaggttggtctctgctgggtctctcctgcttttattttactttaaggacaagtgtagttgtcgtccaccacctttcaaaaaatgtgaaactgccctgcctcccctttttgctgacaacactgtgtacattgaccacttcctaccatactttatgttgtaaaatcaaactcttttgtggtacattatctcatgcttctgcaaattcgaataaattctatggcttccatgtg

SEQ ID NO: 29377 - DNA, 547 bp, Homo sapiens
  source 1..547: mol_type = unassigned DNA
gatgtggccagtggtgtggatgtgaatattcatccctgtggaggaaaatagtggggtctctgagatttgattctgaaaccttccttgtatccctcctgagacatctttgctgcaagatcgaggctgtcctctggtgagaaggtggtgaggcttcccgtcatattccagctctgaacagcaacatggggtgcaaagtcctgctcaacattgggcagcagatgctgcggcggaaggtggtggactgtagccgggaggagacgcggctgtctcgctgcctgaacacttttgatctggtggccctcggggtgggcagcacactgggtgctggtgtctacgtcctggctggagctgtggcccgtgagaatgcaggccctgccattgtcatctccttcctgatcgctgcgctggcctcagtgctggctggcctgtgctatggcgagtttggtgctcgggtccccaagacgggctcagcttacctctacagctatgtcaccgttggagagctctgggccttcatcaccggctggaacttaatcctctcctacat

SEQ ID NO: 29378 - DNA, 7560 bp, Homo sapiens
  source 1..7560: mol_type = unassigned DNA
tcccaaaacagaaagagcagatgtctcaccacgaaactagcaactggaatgaagatagaaacaagtggttataactcagacaaactaatttgtcgagggtttattggaacacctgccccaccggtttgcgacagcaagtttctcctgtcgccttcgtcagacgtcagaatgattccttgcagagccgcgctgacctttgcccgatgtctgatccggagaaaaatcgtgaccctggacagtctagaagacaccaaattatgccgctgcttatccaccatggacctcattgccctgggcgttggaagcacccttggggccggggtttatgtcctcgctggggaggtggccaaggcagactcgggccccagcatcgtggtgtccttcctcattgctgccctggcttcagtgatggctggcctctgctatgccgaatttggggcccgtgttcccaagacggggtctgcatatttgtacacctacgtgactgtcggagagctgtgggccttcatcactggctggaatctcattttatcgtatgtgataggtacatcaagtgttgcaagagcctggagtggcacctttgatgaacttcttagcaaacagattggtcagtttttgaggacatacttcagaatgaattacactggtcttgcagaatatcccgatttttttgctgtgtgccttatattacttctagcaggtcttttgtcttttggagtaaaagagtctgcttgggtgaataaagtcttcacagctgttaatattctcgtccttctgtttgtgatggttgctgggtttgtgaaaggaaatgtggcaaactggaagattagtgaagagtttctcaaaaatatatcagcaagtgccagagagccaccttctgaaaacggaacaagtatctatggggctggtggctttatgccttatggctttacgggaacgttggctggtgctgcaacttgcttttatgcctttgtgggatttgactgcattgcaacaactggtgaagaagttcggaatccccagaaagctattcccattggaattgtgacgtctttgcttgtttgctttatggcctattttggggtctctgcagctttaacacttatgatgccgtactacctcctcgatgaaaaaagcccccttcctgtagcgtttgaatatgtgggatggggtcctgccaaatatgtcgtcgcagctggttctctctgcgccttgtcaacaagtcttcttggatccattttcccaatgcctcgtgtaatctatgctatggcggaggatgggttgcttttcaaatgtctagctcaaatcaattccaaaacgaagacaccaataattgctactttatcatcgggtgcagtggcagctttgatggcctttctgtttgacctgaaggcgcttgtggacatgatgtccattggcacactcatggcctactctctggtggcagcctgtgttctcatcctcaggtaccagcctggcttatcttacgaccagcccaaatgttctcctgagaaagatggtctgggatcgtctcccagggtaacctcgaagagtgagtcccaggtcaccatgctgcagagacagggcttcagcatgcggaccctcttctgcccctcccttctgccaacacagcagtcagcttctctcgtgagctttctggtaggattcctagctttcctcgtgttgggcctgagtgtcttgaccacttacggagttcatgccatcaccaggctggaggcctggagcctcgctctcctcgcgctgtttcttgttctcttcgttgccatcgttctcaccatctggaggcagccccagaatcagcaaaaagtagccttcatggttccattcttaccatttttgccagcgttcagcatcttggtgaacatttacttgatggtccagttaagtgcagacacttgggtcagattcagcatttggatggcaattggcttcctgatttacttttcttatggcattagacacagcctggagggtcatctgagagatgaaaacaatgaagaagatgcttatccagacaacgttcatgcagcagcagaagaaaaatctgccattcaagcaaatgaccatcacccaagaaatctcagttcacctttcatattccatgaaaagacaagtgaattctaacacttgcaggagcagagctggtcatcgtcttagcatacatatcctacactgagtaaaccgtaacgggatgtcatcagcatgctgggttgtcatgggtttgctgcatacatagttcaccctaatttatacttactcatctggacagcatctcctcagatggtgaattatgtgcacggggaaacctcctgagtggaagtttcattcatcagtgatgaatagcccccaaacagtgggagtgtgtatgtatgtgtgtatgtatgtatctatgtatatgcttgggaacatgagtgttacaagttagctggtgttttactattattgtgttacatttttccagtgtcgtcattaatcggtggcatatactgcacatactgaaatagagggaaatcactgaatgtaaagaggtttcatctatgccccctgcagttggggaaatactagtagctttaccttgtttgacttcattaatgtcagtttaggggatgccaaaaatgcagttactcatcatggtgtctgtcactggttaggggtaagatgaggggataaggaaagagacttttcaataagttgtgaatgccaacagtgggtttaatgcaaattttttttcctgtgaggtatgacagtttgctcaaacttcagccaacaggggtgtctgcttctgctgcactacacaggccaggagtggcattccatgccactagttggcatccttttgaacttttgtctcctttgcaaacagtggtcctaaaatacgaggtcttcacttgctgtgaatgacgtatccccagtcagggacttaagagaggcactgtgatatacttgggaccctttaaattaaaaagtgaagatagtcaccagggccagaaagctcatggagtggccgtaatgagaatatgtttgaagatcaaagagttagaccaatgcttgaataagtagaccccaagcatccttttctaaaaagtgacttaaaataagccaacagactctcccagaccacacaactagtggaatgattcctcctttttccattacttacttaatcacagtttagtttttttcttaacctcgtcaggcccagagttcacttctttgtttctctgtttcttttgtcttgtcttagagatgagggggctacagcagcatcatgcaaagagggaaagatgaagggatagaagaagagaaaatccccctgttctgataggaacggcctgttccattgttaaatggcaaatggcccaatttaagggctttggatctaatttgcctctgatgtttcctttggaaacatttaggaatatttttctccccctaccccataaattgtgtagcactttttattccatttgctttcaaatgactacactaagcctaataatacaagctccagtgttatacaataacccatcagtgattggggaatcaaacattttggtttaaaaaacatgattatttaaaactggaaactaaaaagaatcaaattgaattaaagctatataaacacagttaacccttgtaaatgagtaaacaaatttttacatgtaagattctctaattgtcatattttactttttaggattccctaatagtggactgtttatttgcagtgtatttgcttctcatgaactatttctcgtacaaatcattaaatagttcattggatgaggctgggtgacatttcccaggacagcatggtgaacattaccaggcatgctagctggcccgtgtaatcccaagacaaggaaaacattcgttttcctcatgggtcttccaagaaatgagctattttattgatgccattaaaaagcaagttgcgatggttttgtatagccaggagtttattgtgattaaacatcaaagaaacaggtagaaagcctgggtttctggctgctagcgttatagcatccatgacacagaactcattacggacattccacaacttccagggtgcacatggtaaaatctgaagcccagaattttctctcaagctgcgtggtttactggagagaaggagttggataagcacaggctcgggtattttggtagggactgtaggcatgctcataaatccttgctgttgtcacagtacgctgaaaacccgtttgattctatacccaatcaagaatagacccttcacacaggaaatgtgaacaattgttatatatgaacactcaaatcttttactgtaacgaaaccaagaaacttgtttagaatgtgataggcagctaaaactgttatgcccactgtgctcaatttgaagcagaatttagtgaaaaattatttttccacattgaaacactttgcagacacaaatatctatgaaaagatgctttgtcagccactgtgcctttttttctgtgaagactcaacggatgtgtgtgtttgtatgtttgttaacagttacatatgtttgtatgagtgtatatatatatctgtgtgtgtgtatctctaacgtcagtgtataagtaagttgggtttatggtgggctttgactatgtcattaggtgggtacaaaacccaactgatgtggagaaaaattgatgtttgatgttgatagatatgcttatacctaatttttagtttttaaactattttaaaatatactatgattttatatgtatatttcctatagactctttaagacgtatttataatgtttctaatatgaaatcactaaactctagtacattatagcaggtgctttgtaatctggaatggagaagaggtaggggcatttggggattcctgtttacttgctgctgccacaccttttccgactgatctgtcctggtaggtgtttattagcaaaagtcagtatcaccagctctttggcacctttctgtttctgcttgtgaattcataatgttttcaactaaattttttttttctttctcagaattacctaaatgttttgtagagttttgactagtaatcaatcaaaattatataaagtcttctccagtaattaagaaatacatatgcaaattcttttgtgattgagtaaaagcagcttaaattacttttcttttctacattaagaaatatattctcaacattttcagtgagaatttcttgtaatggcacctcaaattttatactcttaaaaaaaaacaataatttgtgaattaccaccaaaaggcaatggcagtcctacatttaagaatagagctatgcaaactctgttaaaaactatgaggaaaacttatattagaacttttgatatatactaaaatactgattatcttaatcacattttccccagagataaacattgagagaacgaaagccaaagtgtcatttaagagagatatatatgaaaaagtaacattaatatatagaactttaccatcaccagccgtagttgatagaaaatattagtttcagaattaccctcctttaaaaaataagagactatttgttttcttttaatttctatgaataaaagaaatttttaaaaactttaaaattttaaatattagtcaaaatactttttaagtcctgagtgcttacaggtagttgttaaaaaaattttaaggccaggcatggtggctcgctcacacctataatcctaggatcttgggaggtcgaggcaagctgatcgcttgagcccaggagtttaagaccggcctgagtagcatagcaagaccctgtctctacaaaaaaaacaaaaattagctgggcatggtggcatgcacatgtagtcagagctactgggggtgctgaggtgggaggatcgcttgagcccaggagagtgaggctgcagtgagctgagattacgccactgcactctagcctgggcaacggtgagaccctgcctcaaaaaaaataaaaataaaaataaaacactttaattagaatctatttttacctattttctaaatttatttaaatgcttagcaggaagcataaggaaaagccatcggcctccaatacccatgatgacagagggagcacttgagccttgccttccctcctcttaaatcagggtgtgttccgagattacagaacatcacaccttggcgtgatgaaatcatgccaagattctgactctccctttccggtgatactgctcatgatttctcctaatacgcttcaagcaactgttaccacaaaaaatacagtttccgcagggctttaaaggattgagtttagcatgtatatcatgcgttattaaagttcacgtgattcatgtgaaattaactgtcctttttgctagtgccaaaacagtgccttctctgcacactttacttgtttataaagttctcccacatgtccttaaatatcaagggggaaagtatggatattcgcgtagcaataatgccagcaaaggtcattttcattttttagtcatatagatatgaaaataagttcatatagatatgaaattgcttgactttattgttttggggagattttttttccttacatgattatattaaacactttaaaatagccttccggtttctggattttgagaagcctgatctgttattgttgtggttgttggtgtttgtaatattcattattgtttgtatatacacggtttagtcttactgatttcaaatgcattttgttattgctcaacccaactggtaacactgtttgctgggagcattatacttaactttgattcaccatggttgatgccactgccatgatcgctgggtcttaaagagctttccctagccactgacagccccgtggagatcataatcagggccccaggctggttccaggatcaggcagcctatagagtgtgagcatctatgtgtagctacccttgttgggtgggctcttagactgatggggtaggatatgaagtgaaagacttcaaatgcaagtaaggtagtttgggctccttaattccaaacatcccatgagtatatcaagatgaataaggaccaagggacctctgtgactcatagaagggctggctgaatcctgaagtagcatagtgggacctggtctacaatttatgcacatgcactgacagccttgctgtgccacgtgtctcaccaagacccagttgggaaagagcgtcatattgccaacaggttgggtttctctggcctacacctgattaatgggccctttatctttggtgtcccctaggagtgtccagttgttttattgctgtattttgttattgcagtacttaataaaaattgttgatagggcccaaaaccctacagaaattctatgtctgtaaaaaccaacaaaggcattggacttgtgtgaatgtacagggtttttttagtagtaattttaaatttaaatgttttaagtgatcatcagtgttcctttttacttataaagttggattcttttttagaatttgtaataaataaaaactgctgctttaccactgtaaaatatgctttctgatgtggtgtatttttaaaataaattttaatatgt

SEQ ID NO: 29379 - DNA, 7557 bp, Homo sapiens
  source 1..7557: mol_type = unassigned DNA
tcccaaaacagaaagagcagatgtctcaccacgaaactagcaactggaatgaagatagaaacaagtggttataactcagacaaactaatttgtcgagggtttattggaacacctgccccaccggtttgcgacagcaagtttctcctgtcgccttcgtcagacgtcagaatgattccttgcagagccgcgctgacctttgcccgatgtctgatccggagaaaaatcgtgaccctggacagtctagaagacaccaaattatgccgctgcttatccaccatggacctcattgccctgggcgttggaagcacccttggggccggggtttatgtcctcgctggggaggtggccaaggcagactcgggccccagcatcgtggtgtccttcctcattgctgccctggcttcagtgatggctggcctctgctatgccgaatttggggcccgtgttcccaagacggggtctgcatatttgtacacctacgtgactgtcggagagctgtgggccttcatcactggctggaatctcattttatcgtatgtgataggtacatcaagtgttgcaagagcctggagtggcacctttgatgaacttcttagcaaacagattggtcagtttttgaggacatacttcagaatgaattacactggtcttgcagaatatcccgatttttttgctgtgtgccttatattacttctagcaggtcttttgtcttttggagtaaaagagtctgcttgggtgaataaagtcttcacagctgttaatattctcgtccttctgtttgtgatggttgctgggtttgtgaaaggaaatgtggcaaactggaagattagtgaagagtttctcaaaaatatatcagcaagtgccagagagccaccttctgaaaacggaacaagtatctatggggctggtggctttatgccttatggctttacgggaacgttggctggtgctgcaacttgcttttatgcctttgtgggatttgactgcattgcaacaactggtgaagaagttcggaatccccagaaagctattcccattggaattgtgacgtctttgcttgtttgctttatggcctattttggggtctctgcagctttaacacttatgatgccgtactacctcctcgatgaaaaaagcccccttcctgtagcgtttgaatatgtgggatggggtcctgccaaatatgtcgtcgcagctggttctctctgcgccttgtcaacaagtcttctgggctctatgtttcctttaccccgaattctgtttgccatggcccgggatggcttactgtttagatttcttgccagagtgagtaagaggcagtcaccagttgctgccacgttgactgcaggggtcatttctgctttgatggcctttctgtttgacctgaaggcgcttgtggacatgatgtccattggcacactcatggcctactctctggtggcagcctgtgttctcatcctcaggtaccagcctggcttatcttacgaccagcccaaatgttctcctgagaaagatggtctgggatcgtctcccagggtaacctcgaagagtgagtcccaggtcaccatgctgcagagacagggcttcagcatgcggaccctcttctgcccctcccttctgccaacacagcagtcagcttctctcgtgagctttctggtaggattcctagctttcctcgtgttgggcctgagtgtcttgaccacttacggagttcatgccatcaccaggctggaggcctggagcctcgctctcctcgcgctgtttcttgttctcttcgttgccatcgttctcaccatctggaggcagccccagaatcagcaaaaagtagccttcatggttccattcttaccatttttgccagcgttcagcatcttggtgaacatttacttgatggtccagttaagtgcagacacttgggtcagattcagcatttggatggcaattggcttcctgatttacttttcttatggcattagacacagcctggagggtcatctgagagatgaaaacaatgaagaagatgcttatccagacaacgttcatgcagcagcagaagaaaaatctgccattcaagcaaatgaccatcacccaagaaatctcagttcacctttcatattccatgaaaagacaagtgaattctaacacttgcaggagcagagctggtcatcgtcttagcatacatatcctacactgagtaaaccgtaacgggatgtcatcagcatgctgggttgtcatgggtttgctgcatacatagttcaccctaatttatacttactcatctggacagcatctcctcagatggtgaattatgtgcacggggaaacctcctgagtggaagtttcattcatcagtgatgaatagcccccaaacagtgggagtgtgtatgtatgtgtgtatgtatgtatctatgtatatgcttgggaacatgagtgttacaagttagctggtgttttactattattgtgttacatttttccagtgtcgtcattaatcggtggcatatactgcacatactgaaatagagggaaatcactgaatgtaaagaggtttcatctatgccccctgcagttggggaaatactagtagctttaccttgtttgacttcattaatgtcagtttaggggatgccaaaaatgcagttactcatcatggtgtctgtcactggttaggggtaagatgaggggataaggaaagagacttttcaataagttgtgaatgccaacagtgggtttaatgcaaattttttttcctgtgaggtatgacagtttgctcaaacttcagccaacaggggtgtctgcttctgctgcactacacaggccaggagtggcattccatgccactagttggcatccttttgaacttttgtctcctttgcaaacagtggtcctaaaatacgaggtcttcacttgctgtgaatgacgtatccccagtcagggacttaagagaggcactgtgatatacttgggaccctttaaattaaaaagtgaagatagtcaccagggccagaaagctcatggagtggccgtaatgagaatatgtttgaagatcaaagagttagaccaatgcttgaataagtagaccccaagcatccttttctaaaaagtgacttaaaataagccaacagactctcccagaccacacaactagtggaatgattcctcctttttccattacttacttaatcacagtttagtttttttcttaacctcgtcaggcccagagttcacttctttgtttctctgtttcttttgtcttgtcttagagatgagggggctacagcagcatcatgcaaagagggaaagatgaagggatagaagaagagaaaatccccctgttctgataggaacggcctgttccattgttaaatggcaaatggcccaatttaagggctttggatctaatttgcctctgatgtttcctttggaaacatttaggaatatttttctccccctaccccataaattgtgtagcactttttattccatttgctttcaaatgactacactaagcctaataatacaagctccagtgttatacaataacccatcagtgattggggaatcaaacattttggtttaaaaaacatgattatttaaaactggaaactaaaaagaatcaaattgaattaaagctatataaacacagttaacccttgtaaatgagtaaacaaatttttacatgtaagattctctaattgtcatattttactttttaggattccctaatagtggactgtttatttgcagtgtatttgcttctcatgaactatttctcgtacaaatcattaaatagttcattggatgaggctgggtgacatttcccaggacagcatggtgaacattaccaggcatgctagctggcccgtgtaatcccaagacaaggaaaacattcgttttcctcatgggtcttccaagaaatgagctattttattgatgccattaaaaagcaagttgcgatggttttgtatagccaggagtttattgtgattaaacatcaaagaaacaggtagaaagcctgggtttctggctgctagcgttatagcatccatgacacagaactcattacggacattccacaacttccagggtgcacatggtaaaatctgaagcccagaattttctctcaagctgcgtggtttactggagagaaggagttggataagcacaggctcgggtattttggtagggactgtaggcatgctcataaatccttgctgttgtcacagtacgctgaaaacccgtttgattctatacccaatcaagaatagacccttcacacaggaaatgtgaacaattgttatatatgaacactcaaatcttttactgtaacgaaaccaagaaacttgtttagaatgtgataggcagctaaaactgttatgcccactgtgctcaatttgaagcagaatttagtgaaaaattatttttccacattgaaacactttgcagacacaaatatctatgaaaagatgctttgtcagccactgtgcctttttttctgtgaagactcaacggatgtgtgtgtttgtatgtttgttaacagttacatatgtttgtatgagtgtatatatatatctgtgtgtgtgtatctctaacgtcagtgtataagtaagttgggtttatggtgggctttgactatgtcattaggtgggtacaaaacccaactgatgtggagaaaaattgatgtttgatgttgatagatatgcttatacctaatttttagtttttaaactattttaaaatatactatgattttatatgtatatttcctatagactctttaagacgtatttataatgtttctaatatgaaatcactaaactctagtacattatagcaggtgctttgtaatctggaatggagaagaggtaggggcatttggggattcctgtttacttgctgctgccacaccttttccgactgatctgtcctggtaggtgtttattagcaaaagtcagtatcaccagctctttggcacctttctgtttctgcttgtgaattcataatgttttcaactaaattttttttttctttctcagaattacctaaatgttttgtagagttttgactagtaatcaatcaaaattatataaagtcttctccagtaattaagaaatacatatgcaaattcttttgtgattgagtaaaagcagcttaaattacttttcttttctacattaagaaatatattctcaacattttcagtgagaatttcttgtaatggcacctcaaattttatactcttaaaaaaaaacaataatttgtgaattaccaccaaaaggcaatggcagtcctacatttaagaatagagctatgcaaactctgttaaaaactatgaggaaaacttatattagaacttttgatatatactaaaatactgattatcttaatcacattttccccagagataaacattgagagaacgaaagccaaagtgtcatttaagagagatatatatgaaaaagtaacattaatatatagaactttaccatcaccagccgtagttgatagaaaatattagtttcagaattaccctcctttaaaaaataagagactatttgttttcttttaatttctatgaataaaagaaatttttaaaaactttaaaattttaaatattagtcaaaatactttttaagtcctgagtgcttacaggtagttgttaaaaaaattttaaggccaggcatggtggctcgctcacacctataatcctaggatcttgggaggtcgaggcaagctgatcgcttgagcccaggagtttaagaccggcctgagtagcatagcaagaccctgtctctacaaaaaaaacaaaaattagctgggcatggtggcatgcacatgtagtcagagctactgggggtgctgaggtgggaggatcgcttgagcccaggagagtgaggctgcagtgagctgagattacgccactgcactctagcctgggcaacggtgagaccctgcctcaaaaaaaataaaaataaaaataaaacactttaattagaatctatttttacctattttctaaatttatttaaatgcttagcaggaagcataaggaaaagccatcggcctccaatacccatgatgacagagggagcacttgagccttgccttccctcctcttaaatcagggtgtgttccgagattacagaacatcacaccttggcgtgatgaaatcatgccaagattctgactctccctttccggtgatactgctcatgatttctcctaatacgcttcaagcaactgttaccacaaaaaatacagtttccgcagggctttaaaggattgagtttagcatgtatatcatgcgttattaaagttcacgtgattcatgtgaaattaactgtcctttttgctagtgccaaaacagtgccttctctgcacactttacttgtttataaagttctcccacatgtccttaaatatcaagggggaaagtatggatattcgcgtagcaataatgccagcaaaggtcattttcattttttagtcatatagatatgaaaataagttcatatagatatgaaattgcttgactttattgttttggggagattttttttccttacatgattatattaaacactttaaaatagccttccggtttctggattttgagaagcctgatctgttattgttgtggttgttggtgtttgtaatattcattattgtttgtatatacacggtttagtcttactgatttcaaatgcattttgttattgctcaacccaactggtaacactgtttgctgggagcattatacttaactttgattcaccatggttgatgccactgccatgatcgctgggtcttaaagagctttccctagccactgacagccccgtggagatcataatcagggccccaggctggttccaggatcaggcagcctatagagtgtgagcatctatgtgtagctacccttgttgggtgggctcttagactgatggggtaggatatgaagtgaaagacttcaaatgcaagtaaggtagtttgggctccttaattccaaacatcccatgagtatatcaagatgaataaggaccaagggacctctgtgactcatagaagggctggctgaatcctgaagtagcatagtgggacctggtctacaatttatgcacatgcactgacagccttgctgtgccacgtgtctcaccaagacccagttgggaaagagcgtcatattgccaacaggttgggtttctctggcctacacctgattaatgggccctttatctttggtgtcccctaggagtgtccagttgttttattgctgtattttgttattgcagtacttaataaaaattgttgatagggcccaaaaccctacagaaattctatgtctgtaaaaaccaacaaaggcattggacttgtgtgaatgtacagggtttttttagtagtaattttaaatttaaatgttttaagtgatcatcagtgttcctttttacttataaagttggattcttttttagaatttgtaataaataaaaactgctgctttaccactgtaaaatatgctttctgatgtggtgtatttttaaaataaattttaatatgt

SEQ ID NO: 29380 - DNA, 7638 bp, Homo sapiens
  source 1..7638: mol_type = unassigned DNA
ggcgcgaccccaacccagccccacaggagactctctgaagaccagcaggaaagcagtgagcccttacagtcccaaaacagaaagagcagatgtctcaccacgaaactagcaactggaatgaagatagaaacaagtggttataactcagacaaactaatttgtcgagggtttattggaacacctgccccaccggtttgcgacagcaagtttctcctgtcgccttcgtcagacgtcagaatgattccttgcagagccgcgctgacctttgcccgatgtctgatccggagaaaaatcgtgaccctggacagtctagaagacaccaaattatgccgctgcttatccaccatggacctcattgccctgggcgttggaagcacccttggggccggggtttatgtcctcgctggggaggtggccaaggcagactcgggccccagcatcgtggtgtccttcctcattgctgccctggcttcagtgatggctggcctctgctatgccgaatttggggcccgtgttcccaagacggggtctgcatatttgtacacctacgtgactgtcggagagctgtgggccttcatcactggctggaatctcattttatcgtatgtgataggtacatcaagtgttgcaagagcctggagtggcacctttgatgaacttcttagcaaacagattggtcagtttttgaggacatacttcagaatgaattacactggtcttgcagaatatcccgatttttttgctgtgtgccttatattacttctagcaggtcttttgtcttttggagtaaaagagtctgcttgggtgaataaagtcttcacagctgttaatattctcgtccttctgtttgtgatggttgctgggtttgtgaaaggaaatgtggcaaactggaagattagtgaagagtttctcaaaaatatatcagcaagtgccagagagccaccttctgaaaacggaacaagtatctatggggctggtggctttatgccttatggctttacgggaacgttggctggtgctgcaacttgcttttatgcctttgtgggatttgactgcattgcaacaactggtgaagaagttcggaatccccagaaagctattcccattggaattgtgacgtctttgcttgtttgctttatggcctattttggggtctctgcagctttaacacttatgatgccgtactacctcctcgatgaaaaaagcccccttcctgtagcgtttgaatatgtgggatggggtcctgccaaatatgtcgtcgcagctggttctctctgcgccttgtcaacaagtcttctgggctctatgtttcctttaccccgaattctgtttgccatggcccgggatggcttactgtttagatttcttgccagagtgagtaagaggcagtcaccagttgctgccacgttgactgcaggggtcatttctgctttgatggcctttctgtttgacctgaaggcgcttgtggacatgatgtccattggcacactcatggcctactctctggtggcagcctgtgttctcatcctcaggtaccagcctggcttatcttacgaccagcccaaatgttctcctgagaaagatggtctgggatcgtctcccagggtaacctcgaagagtgagtcccaggtcaccatgctgcagagacagggcttcagcatgcggaccctcttctgcccctcccttctgccaacacagcagtcagcttctctcgtgagctttctggtaggattcctagctttcctcgtgttgggcctgagtgtcttgaccacttacggagttcatgccatcaccaggctggaggcctggagcctcgctctcctcgcgctgtttcttgttctcttcgttgccatcgttctcaccatctggaggcagccccagaatcagcaaaaagtagccttcatggttccattcttaccatttttgccagcgttcagcatcttggtgaacatttacttgatggtccagttaagtgcagacacttgggtcagattcagcatttggatggcaattggcttcctgatttacttttcttatggcattagacacagcctggagggtcatctgagagatgaaaacaatgaagaagatgcttatccagacaacgttcatgcagcagcagaagaaaaatctgccattcaagcaaatgaccatcacccaagaaatctcagttcacctttcatattccatgaaaagacaagtgaattctaacacttgcaggagcagagctggtcatcgtcttagcatacatatcctacactgagtaaaccgtaacgggatgtcatcagcatgctgggttgtcatgggtttgctgcatacatagttcaccctaatttatacttactcatctggacagcatctcctcagatggtgaattatgtgcacggggaaacctcctgagtggaagtttcattcatcagtgatgaatagcccccaaacagtgggagtgtgtatgtatgtgtgtatgtatgtatctatgtatatgcttgggaacatgagtgttacaagttagctggtgttttactattattgtgttacatttttccagtgtcgtcattaatcggtggcatatactgcacatactgaaatagagggaaatcactgaatgtaaagaggtttcatctatgccccctgcagttggggaaatactagtagctttaccttgtttgacttcattaatgtcagtttaggggatgccaaaaatgcagttactcatcatggtgtctgtcactggttaggggtaagatgaggggataaggaaagagacttttcaataagttgtgaatgccaacagtgggtttaatgcaaattttttttcctgtgaggtatgacagtttgctcaaacttcagccaacaggggtgtctgcttctgctgcactacacaggccaggagtggcattccatgccactagttggcatccttttgaacttttgtctcctttgcaaacagtggtcctaaaatacgaggtcttcacttgctgtgaatgacgtatccccagtcagggacttaagagaggcactgtgatatacttgggaccctttaaattaaaaagtgaagatagtcaccagggccagaaagctcatggagtggccgtaatgagaatatgtttgaagatcaaagagttagaccaatgcttgaataagtagaccccaagcatccttttctaaaaagtgacttaaaataagccaacagactctcccagaccacacaactagtggaatgattcctcctttttccattacttacttaatcacagtttagtttttttcttaacctcgtcaggcccagagttcacttctttgtttctctgtttcttttgtcttgtcttagagatgagggggctacagcagcatcatgcaaagagggaaagatgaagggatagaagaagagaaaatccccctgttctgataggaacggcctgttccattgttaaatggcaaatggcccaatttaagggctttggatctaatttgcctctgatgtttcctttggaaacatttaggaatatttttctccccctaccccataaattgtgtagcactttttattccatttgctttcaaatgactacactaagcctaataatacaagctccagtgttatacaataacccatcagtgattggggaatcaaacattttggtttaaaaaacatgattatttaaaactggaaactaaaaagaatcaaattgaattaaagctatataaacacagttaacccttgtaaatgagtaaacaaatttttacatgtaagattctctaattgtcatattttactttttaggattccctaatagtggactgtttatttgcagtgtatttgcttctcatgaactatttctcgtacaaatcattaaatagttcattggatgaggctgggtgacatttcccaggacagcatggtgaacattaccaggcatgctagctggcccgtgtaatcccaagacaaggaaaacattcgttttcctcatgggtcttccaagaaatgagctattttattgatgccattaaaaagcaagttgcgatggttttgtatagccaggagtttattgtgattaaacatcaaagaaacaggtagaaagcctgggtttctggctgctagcgttatagcatccatgacacagaactcattacggacattccacaacttccagggtgcacatggtaaaatctgaagcccagaattttctctcaagctgcgtggtttactggagagaaggagttggataagcacaggctcgggtattttggtagggactgtaggcatgctcataaatccttgctgttgtcacagtacgctgaaaacccgtttgattctatacccaatcaagaatagacccttcacacaggaaatgtgaacaattgttatatatgaacactcaaatcttttactgtaacgaaaccaagaaacttgtttagaatgtgataggcagctaaaactgttatgcccactgtgctcaatttgaagcagaatttagtgaaaaattatttttccacattgaaacactttgcagacacaaatatctatgaaaagatgctttgtcagccactgtgcctttttttctgtgaagactcaacggatgtgtgtgtttgtatgtttgttaacagttacatatgtttgtatgagtgtatatatatatctgtgtgtgtgtatctctaacgtcagtgtataagtaagttgggtttatggtgggctttgactatgtcattaggtgggtacaaaacccaactgatgtggagaaaaattgatgtttgatgttgatagatatgcttatacctaatttttagtttttaaactattttaaaatatactatgattttatatgtatatttcctatagactctttaagacgtatttataatgtttctaatatgaaatcactaaactctagtacattatagcaggtgctttgtaatctggaatggagaagaggtaggggcatttggggattcctgtttacttgctgctgccacaccttttccgactgatctgtcctggtaggtgtttattagcaaaagtcagtatcaccagctctttggcacctttctgtttctgcttgtgaattcataatgttttcaactaaattttttttttctttctcagaattacctaaatgttttgtagagttttgactagtaatcaatcaaaattatataaagtcttctccagtaattaagaaatacatatgcaaattcttttgtgattgagtaaaagcagcttaaattacttttcttttctacattaagaaatatattctcaacattttcagtgagaatttcttgtaatggcacctcaaattttatactcttaaaaaaaaacaataatttgtgaattaccaccaaaaggcaatggcagtcctacatttaagaatagagctatgcaaactctgttaaaaactatgaggaaaacttatattagaacttttgatatatactaaaatactgattatcttaatcacattttccccagagataaacattgagagaacgaaagccaaagtgtcatttaagagagatatatatgaaaaagtaacattaatatatagaactttaccatcaccagccgtagttgatagaaaatattagtttcagaattaccctcctttaaaaaataagagactatttgttttcttttaatttctatgaataaaagaaatttttaaaaactttaaaattttaaatattagtcaaaatactttttaagtcctgagtgcttacaggtagttgttaaaaaaattttaaggccaggcatggtggctcgctcacacctataatcctaggatcttgggaggtcgaggcaagctgatcgcttgagcccaggagtttaagaccggcctgagtagcatagcaagaccctgtctctacaaaaaaaacaaaaattagctgggcatggtggcatgcacatgtagtcagagctactgggggtgctgaggtgggaggatcgcttgagcccaggagagtgaggctgcagtgagctgagattacgccactgcactctagcctgggcaacggtgagaccctgcctcaaaaaaaataaaaataaaaataaaacactttaattagaatctatttttacctattttctaaatttatttaaatgcttagcaggaagcataaggaaaagccatcggcctccaatacccatgatgacagagggagcacttgagccttgccttccctcctcttaaatcagggtgtgttccgagattacagaacatcacaccttggcgtgatgaaatcatgccaagattctgactctccctttccggtgatactgctcatgatttctcctaatacgcttcaagcaactgttaccacaaaaaatacagtttccgcagggctttaaaggattgagtttagcatgtatatcatgcgttattaaagttcacgtgattcatgtgaaattaactgtcctttttgctagtgccaaaacagtgccttctctgcacactttacttgtttataaagttctcccacatgtccttaaatatcaagggggaaagtatggatattcgcgtagcaataatgccagcaaaggtcattttcattttttagtcatatagatatgaaaataagttcatatagatatgaaattgcttgactttattgttttggggagattttttttccttacatgattatattaaacactttaaaatagccttccggtttctggattttgagaagcctgatctgttattgttgtggttgttggtgtttgtaatattcattattgtttgtatatacacggtttagtcttactgatttcaaatgcattttgttattgctcaacccaactggtaacactgtttgctgggagcattatacttaactttgattcaccatggttgatgccactgccatgatcgctgggtcttaaagagctttccctagccactgacagccccgtggagatcataatcagggccccaggctggttccaggatcaggcagcctatagagtgtgagcatctatgtgtagctacccttgttgggtgggctcttagactgatggggtaggatatgaagtgaaagacttcaaatgcaagtaaggtagtttgggctccttaattccaaacatcccatgagtatatcaagatgaataaggaccaagggacctctgtgactcatagaagggctggctgaatcctgaagtagcatagtgggacctggtctacaatttatgcacatgcactgacagccttgctgtgccacgtgtctcaccaagacccagttgggaaagagcgtcatattgccaacaggttgggtttctctggcctacacctgattaatgggccctttatctttggtgtcccctaggagtgtccagttgttttattgctgtattttgttattgcagtacttaataaaaattgttgatagggcccaaaaccctacagaaattctatgtctgtaaaaaccaacaaaggcattggacttgtgtgaatgtacagggtttttttagtagtaattttaaatttaaatgttttaagtgatcatcagtgttcctttttacttataaagttggattcttttttagaatttgtaataaataaaaactgctgctttaccactgtaaaatatgctttctgatgtggtgtatttttaaaataaattttaatatgtaataatatagaa

SEQ ID NO: 29381 - DNA, 7622 bp, Homo sapiens
  source 1..7622: mol_type = unassigned DNA
ctccttctgcagcgcggccggcgggcgctcctcttcgcgggaccagcgaggcggcggccgctgctccagcgtcccccagccgcgggcccccgacgcgctgcagccggcagcccaccgccgccttcttggcgcgaccccaacccagccccacaggagactctctgaagaccagcaggaaagcagtgagcccttacaggtcgccttcgtcagacgtcagaatgattccttgcagagccgcgctgacctttgcccgatgtctgatccggagaaaaatcgtgaccctggacagtctagaagacaccaaattatgccgctgcttatccaccatggacctcattgccctgggcgttggaagcacccttggggccggggtttatgtcctcgctggggaggtggccaaggcagactcgggccccagcatcgtggtgtccttcctcattgctgccctggcttcagtgatggctggcctctgctatgccgaatttggggcccgtgttcccaagacggggtctgcatatttgtacacctacgtgactgtcggagagctgtgggccttcatcactggctggaatctcattttatcgtatgtgataggtacatcaagtgttgcaagagcctggagtggcacctttgatgaacttcttagcaaacagattggtcagtttttgaggacatacttcagaatgaattacactggtcttgcagaatatcccgatttttttgctgtgtgccttatattacttctagcaggtcttttgtcttttggagtaaaagagtctgcttgggtgaataaagtcttcacagctgttaatattctcgtccttctgtttgtgatggttgctgggtttgtgaaaggaaatgtggcaaactggaagattagtgaagagtttctcaaaaatatatcagcaagtgccagagagccaccttctgaaaacggaacaagtatctatggggctggtggctttatgccttatggctttacgggaacgttggctggtgctgcaacttgcttttatgcctttgtgggatttgactgcattgcaacaactggtgaagaagttcggaatccccagaaagctattcccattggaattgtgacgtctttgcttgtttgctttatggcctattttggggtctctgcagctttaacacttatgatgccgtactacctcctcgatgaaaaaagcccccttcctgtagcgtttgaatatgtgggatggggtcctgccaaatatgtcgtcgcagctggttctctctgcgccttgtcaacaagtcttcttggatccattttcccaatgcctcgtgtaatctatgctatggcggaggatgggttgcttttcaaatgtctagctcaaatcaattccaaaacgaagacaccaataattgctactttatcatcgggtgcagtggcagctttgatggcctttctgtttgacctgaaggcgcttgtggacatgatgtccattggcacactcatggcctactctctggtggcagcctgtgttctcatcctcaggtaccagcctggcttatcttacgaccagcccaaatgttctcctgagaaagatggtctgggatcgtctcccagggtaacctcgaagagtgagtcccaggtcaccatgctgcagagacagggcttcagcatgcggaccctcttctgcccctcccttctgccaacacagcagtcagcttctctcgtgagctttctggtaggattcctagctttcctcgtgttgggcctgagtgtcttgaccacttacggagttcatgccatcaccaggctggaggcctggagcctcgctctcctcgcgctgtttcttgttctcttcgttgccatcgttctcaccatctggaggcagccccagaatcagcaaaaagtagccttcatggttccattcttaccatttttgccagcgttcagcatcttggtgaacatttacttgatggtccagttaagtgcagacacttgggtcagattcagcatttggatggcaattggcttcctgatttacttttcttatggcattagacacagcctggagggtcatctgagagatgaaaacaatgaagaagatgcttatccagacaacgttcatgcagcagcagaagaaaaatctgccattcaagcaaatgaccatcacccaagaaatctcagttcacctttcatattccatgaaaagacaagtgaattctaacacttgcaggagcagagctggtcatcgtcttagcatacatatcctacactgagtaaaccgtaacgggatgtcatcagcatgctgggttgtcatgggtttgctgcatacatagttcaccctaatttatacttactcatctggacagcatctcctcagatggtgaattatgtgcacggggaaacctcctgagtggaagtttcattcatcagtgatgaatagcccccaaacagtgggagtgtgtatgtatgtgtgtatgtatgtatctatgtatatgcttgggaacatgagtgttacaagttagctggtgttttactattattgtgttacatttttccagtgtcgtcattaatcggtggcatatactgcacatactgaaatagagggaaatcactgaatgtaaagaggtttcatctatgccccctgcagttggggaaatactagtagctttaccttgtttgacttcattaatgtcagtttaggggatgccaaaaatgcagttactcatcatggtgtctgtcactggttaggggtaagatgaggggataaggaaagagacttttcaataagttgtgaatgccaacagtgggtttaatgcaaattttttttcctgtgaggtatgacagtttgctcaaacttcagccaacaggggtgtctgcttctgctgcactacacaggccaggagtggcattccatgccactagttggcatccttttgaacttttgtctcctttgcaaacagtggtcctaaaatacgaggtcttcacttgctgtgaatgacgtatccccagtcagggacttaagagaggcactgtgatatacttgggaccctttaaattaaaaagtgaagatagtcaccagggccagaaagctcatggagtggccgtaatgagaatatgtttgaagatcaaagagttagaccaatgcttgaataagtagaccccaagcatccttttctaaaaagtgacttaaaataagccaacagactctcccagaccacacaactagtggaatgattcctcctttttccattacttacttaatcacagtttagtttttttcttaacctcgtcaggcccagagttcacttctttgtttctctgtttcttttgtcttgtcttagagatgagggggctacagcagcatcatgcaaagagggaaagatgaagggatagaagaagagaaaatccccctgttctgataggaacggcctgttccattgttaaatggcaaatggcccaatttaagggctttggatctaatttgcctctgatgtttcctttggaaacatttaggaatatttttctccccctaccccataaattgtgtagcactttttattccatttgctttcaaatgactacactaagcctaataatacaagctccagtgttatacaataacccatcagtgattggggaatcaaacattttggtttaaaaaacatgattatttaaaactggaaactaaaaagaatcaaattgaattaaagctatataaacacagttaacccttgtaaatgagtaaacaaatttttacatgtaagattctctaattgtcatattttactttttaggattccctaatagtggactgtttatttgcagtgtatttgcttctcatgaactatttctcgtacaaatcattaaatagttcattggatgaggctgggtgacatttcccaggacagcatggtgaacattaccaggcatgctagctggcccgtgtaatcccaagacaaggaaaacattcgttttcctcatgggtcttccaagaaatgagctattttattgatgccattaaaaagcaagttgcgatggttttgtatagccaggagtttattgtgattaaacatcaaagaaacaggtagaaagcctgggtttctggctgctagcgttatagcatccatgacacagaactcattacggacattccacaacttccagggtgcacatggtaaaatctgaagcccagaattttctctcaagctgcgtggtttactggagagaaggagttggataagcacaggctcgggtattttggtagggactgtaggcatgctcataaatccttgctgttgtcacagtacgctgaaaacccgtttgattctatacccaatcaagaatagacccttcacacaggaaatgtgaacaattgttatatatgaacactcaaatcttttactgtaacgaaaccaagaaacttgtttagaatgtgataggcagctaaaactgttatgcccactgtgctcaatttgaagcagaatttagtgaaaaattatttttccacattgaaacactttgcagacacaaatatctatgaaaagatgctttgtcagccactgtgcctttttttctgtgaagactcaacggatgtgtgtgtttgtatgtttgttaacagttacatatgtttgtatgagtgtatatatatatctgtgtgtgtgtatctctaacgtcagtgtataagtaagttgggtttatggtgggctttgactatgtcattaggtgggtacaaaacccaactgatgtggagaaaaattgatgtttgatgttgatagatatgcttatacctaatttttagtttttaaactattttaaaatatactatgattttatatgtatatttcctatagactctttaagacgtatttataatgtttctaatatgaaatcactaaactctagtacattatagcaggtgctttgtaatctggaatggagaagaggtaggggcatttggggattcctgtttacttgctgctgccacaccttttccgactgatctgtcctggtaggtgtttattagcaaaagtcagtatcaccagctctttggcacctttctgtttctgcttgtgaattcataatgttttcaactaaattttttttttctttctcagaattacctaaatgttttgtagagttttgactagtaatcaatcaaaattatataaagtcttctccagtaattaagaaatacatatgcaaattcttttgtgattgagtaaaagcagcttaaattacttttcttttctacattaagaaatatattctcaacattttcagtgagaatttcttgtaatggcacctcaaattttatactcttaaaaaaaaacaataatttgtgaattaccaccaaaaggcaatggcagtcctacatttaagaatagagctatgcaaactctgttaaaaactatgaggaaaacttatattagaacttttgatatatactaaaatactgattatcttaatcacattttccccagagataaacattgagagaacgaaagccaaagtgtcatttaagagagatatatatgaaaaagtaacattaatatatagaactttaccatcaccagccgtagttgatagaaaatattagtttcagaattaccctcctttaaaaaataagagactatttgttttcttttaatttctatgaataaaagaaatttttaaaaactttaaaattttaaatattagtcaaaatactttttaagtcctgagtgcttacaggtagttgttaaaaaaattttaaggccaggcatggtggctcgctcacacctataatcctaggatcttgggaggtcgaggcaagctgatcgcttgagcccaggagtttaagaccggcctgagtagcatagcaagaccctgtctctacaaaaaaaacaaaaattagctgggcatggtggcatgcacatgtagtcagagctactgggggtgctgaggtgggaggatcgcttgagcccaggagagtgaggctgcagtgagctgagattacgccactgcactctagcctgggcaacggtgagaccctgcctcaaaaaaaataaaaataaaaataaaacactttaattagaatctatttttacctattttctaaatttatttaaatgcttagcaggaagcataaggaaaagccatcggcctccaatacccatgatgacagagggagcacttgagccttgccttccctcctcttaaatcagggtgtgttccgagattacagaacatcacaccttggcgtgatgaaatcatgccaagattctgactctccctttccggtgatactgctcatgatttctcctaatacgcttcaagcaactgttaccacaaaaaatacagtttccgcagggctttaaaggattgagtttagcatgtatatcatgcgttattaaagttcacgtgattcatgtgaaattaactgtcctttttgctagtgccaaaacagtgccttctctgcacactttacttgtttataaagttctcccacatgtccttaaatatcaagggggaaagtatggatattcgcgtagcaataatgccagcaaaggtcattttcattttttagtcatatagatatgaaaataagttcatatagatatgaaattgcttgactttattgttttggggagattttttttccttacatgattatattaaacactttaaaatagccttccggtttctggattttgagaagcctgatctgttattgttgtggttgttggtgtttgtaatattcattattgtttgtatatacacggtttagtcttactgatttcaaatgcattttgttattgctcaacccaactggtaacactgtttgctgggagcattatacttaactttgattcaccatggttgatgccactgccatgatcgctgggtcttaaagagctttccctagccactgacagccccgtggagatcataatcagggccccaggctggttccaggatcaggcagcctatagagtgtgagcatctatgtgtagctacccttgttgggtgggctcttagactgatggggtaggatatgaagtgaaagacttcaaatgcaagtaaggtagtttgggctccttaattccaaacatcccatgagtatatcaagatgaataaggaccaagggacctctgtgactcatagaagggctggctgaatcctgaagtagcatagtgggacctggtctacaatttatgcacatgcactgacagccttgctgtgccacgtgtctcaccaagacccagttgggaaagagcgtcatattgccaacaggttgggtttctctggcctacacctgattaatgggccctttatctttggtgtcccctaggagtgtccagttgttttattgctgtattttgttattgcagtacttaataaaaattgttgatagggcccaaaaccctacagaaattctatgtctgtaaaaaccaacaaaggcattggacttgtgtgaatgtacagggtttttttagtagtaattttaaatttaaatgttttaagtgatcatcagtgttcctttttacttataaagttggattcttttttagaatttgtaataaataaaaactgctgctttaccactgtaaaatatgctttctgatgtggtgtatttttaaaataaattttaatatgtaataatatagaa

SEQ ID NO: 29382 - DNA, 2274 bp, Homo sapiens
  source 1..2274: mol_type = unassigned DNA
cttctgcagcgcggccggcgggcgctcctcttcgcgggaccagcgaggcggcggccgctgctccagcgtcccccagccgcgggcccccgacgcgctgcagccggcagcccaccgccgccttcttggcgcgaccccaacccagccccagtcgccttcgtcagacgtcagaatgattccttgcagagccgcgctgacctttgcccgatgtctgatccggagaaaaatcgtgaccctggacagtctagaagacaccaaattatgccgctgcttatccaccatggacctcattgccctgggcgttggaagcacccttggggccggggtttatgtcctcgctggggaggtggccaaggcagactcgggccccagcatcgtggtgtccttcctcattgctgccctggcttcagtgatggctggcctctgctatgccgaatttggggcccgtgttcccaagacggggtctgcatatttgtacacctacgtgactgtcggagagctgtgggccttcatcactggctggaatctcattttatcgtatgtgataggtacatcaagtgttgcaagagcctggagtggcacctttgatgaacttcttagcaaacagattggtcagtttttgaggacatacttcagaatgaattacactggtcttgcagaatatcccgatttttttgctgtgtgccttatattacttctagcaggtcttttgtcttttggagtaaaagagtctgcttgggtgaataaagtcttcacagctgttaatattctcgtccttctgtttgtgatggttgctgggtttgtgaaaggaaatgtggcaaactggaagattagtgaagagtttctcaaaaatatatcagcaagtgccagagagccaccttctgaaaacggaacaagtatctatggggctggtggctttatgccttatggctttacgggaacgttggctggtgctgcaacttgcttttatgcctttgtgggatttgactgcattgcaacaactggtgaagaagttcggaatccccagaaagctattcccattggaattgtgacgtctttgcttgtttgctttatggcctattttggggtctctgcagctttaacacttatgatgccgtactacctcctcgatgaaaaaagcccccttcctgtagcgtttgaatatgtgggatggggtcctgccaaatatgtcgtcgcagctggttctctctgcgccttgtcaacaagtcttcttggatccattttcccaatgcctcgtgtaatctatgctatggcggaggatgggttgcttttcaaatgtctagctcaaatcaattccaaaacgaagacaccaataattgctactttatcatcgggtgcagtggcagctttgatggcctttctgtttgacctgaaggcgcttgtggacatgatgtccattggcacactcatggcctactctctggtggcagcctgtgttctcatcctcaggtaccagcctggcttatcttacgaccagcccaaatgttctcctgagaaagatggtctgggatcgtctcccagggtaacctcgaagagtgagtcccaggtcaccatgctgcagagacagggcttcagcatgcggaccctcttctgcccctcccttctgccaacacagcagtcagcttctctcgtgagctttctggtaggattcctagctttcctcgtgttgggcctgagtgtcttgaccacttacggagttcatgccatcaccaggctggaggcctggagcctcgctctcctcgcgctgtttcttgttctcttcgttgccatcgttctcaccatctggaggcagccccagaatcagcaaaaagtagccttcatggttccattcttaccatttttgccagcgttcagcatcttggtgaacatttacttgatggtccagttaagtgcagacacttgggtcagattcagcatttggatggcaattggcttcctgatttacttttcttatggcattagacacagcctggagggtcatctgagagatgaaaacaatgaagaagatgcttatccagacaacgttcatgcagcagcagaagaaaaatctgccattcaagcaaatgaccatcacccaagaaatctcagttcacctttcatattccatgaaaagacaagtgaattctaacacttgcaggagcagagctggtcatcgtcttagcatacatatcctacactgagtaaaccgtaacgggatgtcatcagcatgctgggttgtcatgggtttgctgcatacatagttcaccctaatttata

SEQ ID NO: 29383 - DNA, 1752 bp, Homo sapiens
  source 1..1752: mol_type = unassigned DNA
ggcacgggcggtcagctgggccgcagctcctccggctctgcagggtcacggaggaaggtaagtaagccagctcccctagtccaggccgagcttgcacttgcgtcttgtctgctgctgctgaaccaagatttagctgtgcgccctccttgcagtctcctggaaccagcaggaggaaacatgggggatactggcctgagaaagcggagagaggatgagaagtcgatccagagccaagagcctaagaccaccagtctccaaaaggagctgggcctcatcagtggcatctccatcatcgtgggcaccatcattggctctgggatcttcgtttcccccaagtctgtgctcagcaacacggaagctgtggggccctgcctcatcatatgggcggcttgcggggtcctcgcgacgctgggtgccctgtgctttgcggagcttggcacaatgatcaccaagtcagggggagagtatccctacctgatggaggcctacgggcccatccccgcctacctcttctcctgggccagcctgatcgtcattaagcccacgtccttcgccatcatctgcctcagcttctccgagtatgtgtgtgcgcccttctatgtgggctgcaagcctcctcaaatcgttgtgaaatgcctggccgccgccgccatcttgttcatctcgacagtgaactcactgagcgtgcggctgggaagctacgtccagaacatcttcaccgcggccaagctggtgatcgtggccatcatcatcatcagcgggctggtgctcctggcccaaggaaacacaaagaattttgataattctttcgagggcgcccagctgtctgtgggagccatcagcctggcgttttacaatggactctgggcctatgatggatggaatcaactcaattacatcacagaagaacttagaaacccttacagaaacctgcctttggccattatcatcgggatccccctggtgacggcgtgctacatcctcatgaacgtgtcctacttcaccgtgatgactgccaccgaactcctgcagtcccaggcggtggctgtgacatttggtgaccgtgttctctatcctgcttcttggatcgttccactttttgtggcattttcaaccatcggtgctgctaacgggacctgcttcacagcgggcagactcatttacgtggcgggccgggagggtcacatgctcaaagtgctttcttacatcagcgtcaggcgcctcactccagcccccgccatcatcttttatggtatcatagcaacgatttatatcatccctggtgacataaactcgttagtcaattatttcagctttgccgcatggctgttttatggcctgacgattctaggactcatcgtgatgagatttacaaggaaagagctggaaaggcctatcaaggtgcccgtagtcattcccgtcttgatgacactcatctctgtgtttttggttctggctccaatcatcagcaagcccacctgggagtacctctactgtgtgctgtttatattaagcggccttttattttacttcctgtttgtccactacaagtttggatgggctcagaaaatctcaaagccgattaccatgcaccttcagatgctaatggaagtggtcccaccggaggaagaccctgagtaacaagctccgtctcttgtagccaagtcagctgaatttattttcttaagcaatatttgtggttatttcttcctttttttcttacgaataaaatatactcagatgtttaaaata

SEQ ID NO: 29384 - DNA, 1772 bp, Homo sapiens
  source 1..1772: mol_type = unassigned DNA
acaagacatggccatttctagggttggaccgtgcaggcacgggcggtcagctgggccgcagctcctccggctctgcagggtcacggaggaagccagctcccctagtccaggccgagcttgcacttgcgtcttgtctgctgctgctgaaccaagatttagctgtgcgccctccttgcagtctcctggaaccagcaggaggaaacatgggggatactggcctgagaaagcggagagaggatgagaagtcgatccagagccaagagcctaagaccaccagtctccaaaaggagctgggcctcatcagtggcatctccatcatcgtgggcaccatcattggctctgggatcttcgtttcccccaagtctgtgctcagcaacacggaagctgtggggccctgcctcatcatatgggcggcttgcggggtcctcgcgacgctgggtgccctgtgctttgcggagcttggcacaatgatcaccaagtcagggggagagtatccctacctgatggaggcctacgggcccatccccgcctacctcttctcctgggccagcctgatcgtcattaagcccacgtccttcgccatcatctgcctcagcttctccgagtatgtgtgtgcgcccttctatgtgggctgcaagcctcctcaaatcgttgtgaaatgcctggccgccgccgccatcttgttcatctcgacagtgaactcactgagcgtgcggctgggaagctacgtccagaacatcttcaccgcggccaagctggtgatcgtggccatcatcatcatcagcgggctggtgctcctggcccaaggaaacacaaagaattttgataattctttcgagggcgcccagctgtctgtgggagccatcagcctggcgttttacaatggactctgggcctatgatggatggaatcaactcaattacatcacagaagaacttagaaacccttacagaaacctgcctttggccattatcatcgggatccccctggtgacggcgtgctacatcctcatgaacgtgtcctacttcaccgtgatgactgccaccgaactcctgcagtcccaggcggtggctgtgacatttggtgaccgtgttctctatcctgcttcttggatcgttccactttttgtggcattttcaaccatcggtgctgctaacgggacctgcttcacagcgggcagactcatttacgtggcgggccgggagggtcacatgctcaaagtgctttcttacatcagcgtcaggcgcctcactccagcccccgccatcatcttttatggtatcatagcaacgatttatatcatccctggtgacataaactcgttagtcaattatttcagctttgccgcatggctgttttatggcctgacgattctaggactcatcgtgatgagatttacaaggaaagagctggaaaggcctatcaaggtgcccgtagtcattcccgtcttgatgacactcatctctgtgtttttggttctggctccaatcatcagcaagcccacctgggagtacctctactgtgtgctgtttatattaagcggccttttattttacttcctgtttgtccactacaagtttggatgggctcagaaaatctcaaagccgattaccatgcaccttcagatgctaatggaagtggtcccaccggaggaagaccctgagtaacaagctccgtctcttgtagccaagtcagctgaatttattttcttaagcaatatttgtggttatttcttcctttttttcttacgaataaaatatactcagatgttt

SEQ ID NO: 29385 - DNA, 2313 bp, Homo sapiens
  source 1..2313: mol_type = unassigned DNA
gcggaggcagcggctgcggcagcagcaggttccagtagctggctcggtgctcttctcggccacctgccatggcccgggggctgcccaccattgctagcctggcacgcttatgccagaagctgaaccgcctgaagccgctggaggactccaccatggagacgtcactgcggcgctgcctgtccacgctggacctgactcttctgggcgtgggtggcatggtgggctcgggtctctacgtgctcacaggtgccgtggccaaggaggtggctggccctgctgtgctcttgtccttcggtgtggccgctgtggcctccctgctggcagccctatgctatgcagaatttggggcacgtgtgccacgcacgggctctgcctacctgttcacctacgtatccatgggcgagctgtgggccttcctcatcggctggaatgttctcctcgaatacatcatcggtggcgccgccgtggcccgtgcctggagtggctacctggactctatgttcagccacagcatccgcaacttcactgagacccacgtgggttcttggcaggtgcccctcctgggccactacccggacttcctggctgctggcatcatcctcctggcctctgcctttgtctcctgtggagcccgcgtgtcctcctggctcaatcacaccttctcggccatcagcctgcttgtcattctcttcattgtcatcctgggcttcatcctggcccagcctcacaactggagcgctgacgaaggcggctttgcacccttcggcttctccggcgtcatggccggcactgcctcctgcttctatgctttcgtgggcttcgacgtcattgccgcctccagtgaggaggcccagaacccacggcggtctgtgcctctggccatcgccatctcgcttgccattgcagctggtgcctacatccttgtctccaccgtgctaaccctcatggtgccctggcacagcctggaccccgactcagcgcttgcagatgccttctaccagcggggctacaggtgggctggcttcatcgtggcagctggctccatctgcgccatgaacaccgtcctgctcagcctcctcttctccctgccacgcattgtctatgccatggccgccgatgggctcttcttccaggtgtttgcccatgtgcacccccggacacaggtgcctgtggcgggcaccctggcgttcgggctcctcacggccttcctggcactgctgctggacctggagtcgctggttcagttcctgtcccttggcacactcctggcctacacattcgtggccaccagtatcattgtgctgcgcttccagaagtcttccccgcccagctccccaggcccagccagccctggccccctgaccaagcagcagagctccttctcagaccacctacagctggtgggcactgtacacgcctccgtccctgagccaggggagctgaagccagccctgaggccctacctgggcttcttggatgggtacagccctggagcagtggtgacttgggcgcttggcgttatgttggcctcagccatcaccataggctgcgtgcttgtctttgggaactcgaccctgcacctcccacactggggttacatcctgctgctcctgctcaccagtgtcatgtttctgctcagcctccttgtcctgggggctcaccagcaacagtatcgggaagacttatttcagatccccatggttcccctgattccagccctgagcatcgtcctcaacatctgcctcatgctgaaacttagctatctgacctgggtgcgcttctccatctggctgctgatgggacttgcagtgtatttcggctatggcatccggcatagcaaggagaaccagcgggagctgccagggctgaactccacacactacgtggtattccccaggggcagcctggaggagacagtgcaggctatgcagccccccagccaggcaccagcacaggaccctggccatatggagtagctgatcagcccacacttgccccgccctcccacacctgcttgggaggccagagaggccagacaagccgagagccccttctgttgtgggcagcctgggtttgcaggcctgcacaggctggggagtcctcaggaccttaggaccttcatccaggggctgggcttcgggtcttcaggagtgggccttggctggtgctggtgccatggactctgcccagagccttcttgtttatgatcagctccagctacctgggcagttgtggtggggtggatgggaaggcccacagcccaagggatccataataataattgcttggccagccatgtggcctgctggcgta

SEQ ID NO: 29386 - DNA, 2307 bp, Homo sapiens
  source 1..2307: mol_type = unassigned DNA
gcggctgcggcagcagcagcaggttccagtagctggctcggtgctcttctcggccacctgccatggcccgggggctgcccaccattgctagcctggcacgcttatgccagaagctgaaccgcctgaagccgctggaggactccaccatggagacgtcactgcggcgctgcctgtccacgctggacctgactcttctgggcgtgggtggcatggtgggctcgggtctctacgtgctcacaggtgccgtggccaaggaggtggctggccctgctgtgctcttgtccttcggtgtggccgctgtggcctccctgctggcagccctatgctatgcagaatttggggcacgtgtgccacgcacgggctctgcctacctgttcacctacgtatccatgggcgagctgtgggccttcctcatcggctggaatgttctcctcgaatacatcatcggtggcgccgccgtggcccgtgcctggagtggctacctggactctatgttcagccacagcatccgcaacttcactgagacccacgtgggttcttggcaggtgcccctcctgggccactacccggacttcctggctgctggcatcatcctcctggcctctgcctttgtctcctgtggagcccgcgtgtcctcctggctcaatcacaccttctcggccatcagcctgcttgtcattctcttcattgtcatcctgggcttcatcctggcccagcctcacaactggagcgctgacgaaggcggctttgcacccttcggcttctccggcgtcatggccggcactgcctcctgcttctatgctttcgtgggcttcgacgtcattgccgcctccagtgaggaggcccagaacccacggcggtctgtgcctctggccatcgccatctcgcttgccattgcagctggtgcctacatccttgtctccaccgtgctaaccctcatggtgccctggcacagcctggaccccgactcagcgcttgcagatgccttctaccagcggggctacaggtgggctggcttcatcgtggcagctggctccatctgcgccatgaacaccgtcctgctcagcctcctcttctccctgccacgcattgtctatgccatggccgccgatgggctcttcttccaggtgtttgcccatgtgcacccccggacacaggtgcctgtggcgggcaccctggcgttcgggctcctcacggccttcctggcactgctgctggacctggagtcgctggttcagttcctgtcccttggcacactcctggcctacacattcgtggccaccagtatcattgtgctgcgcttccagaagtcttccccgcccagctccccaggcccagccagccctggccccctgaccaagcagcagagctccttctcagaccacctacagctggtgggcactgtacacgcctccgtccctgagccaggggagctgaagccagccctgaggccctacctgggcttcttggatgggtacagccctggagcagtggtgacttgggcgcttggcgttatgttggcctcagccatcaccataggctgcgtgcttgtctttgggaactcgaccctgcacctcccacactggggttacatcctgctgctcctgctcaccagtgtcatgtttctgctcagcctccttgtcctgggggctcaccagcaacagtatcgggaagacttatttcagatccccatggttcccctgattccagccctgagcatcgtcctcaacatctgcctcatgctgaaacttagctatctgacctgggtgcgcttctccatctggctgctgatgggacttgcagtgtatttcggctatggcatccggcatagcaaggagaaccagcgggagctgccagggctgaactccacacactacgtggtattccccaggggcagcctggaggagacagtgcaggctatgcagccccccagccaggcaccagcacaggaccctggccatatggagtagctgatcagcccacacttgccccgccctcccacacctgcttgggaggccagagaggccagacaagccgagagccccttctgttgtgggcagcctgggtttgcaggcctgcacaggctggggagtcctcaggaccttaggaccttcatccaggggctgggcttcgggtcttcaggagtgggccttggctggtgctggtgccatggactctgcccagagccttcttgtttatgatcagctccagctacctgggcagttgtggtggggtggatgggaaggcccacagcccaagggatccataataataattgcttggccagccatgtggcctgctggcgta

SEQ ID NO: 29387 - DNA, 416 bp, Homo sapiens
  source 1..416: mol_type = unassigned DNA
agaaggtgggctgcggactttcagacgtggcccttaacctccccgaactgacctaggctagtcagtcagccggcggtctgaccttctccatctgtgactgagtcacagtcacagggcttccctagaccccggttccagtagctggctcggtgctcttctcggccacctgccatggcccgggggctgcccaccattgctagcctggcacgcttatgccagaagctgaaccgcctgaagccgctggaggactccaccatggagacgtcactgcggcgctgcctgtccacgctggacctgactcttctgggcgtgggtggcatggtgggctcgggtctctacgtgctcacaggtgccgtggccaaggaggtggctggccctgctgtgctcttgtccttcggtgtggccgctgtggcctc

SEQ ID NO: 29388 - DNA, 2922 bp, Homo sapiens
  source 1..2922: mol_type = unassigned DNA
atgtacaacatgcggcgattaagtctttcacccaccttttcaatgggatttcatctgttagttactgtgagtctcttattttcccatgtggaccatgtaattgctgagacagaaatggaaggagaaggaaatgaaactggtgaatgtactggatcatattactgtaagaaaggggtgattttgcccatttgggaaccccaagacccttcttttggggacaaaattgctagagctactgtgtattttgtggccatggtctacatgtttcttggagtctctatcatagctgatcggttcatgtcctctatagaagtcatcacatctcaagaaaaagaaataaccataaagaaacccaatggagagaccaccaagacaactgtgaggatctggaatgaaacagtttctaacctgaccttgatggccctgggatcttctgctcctgagattctcctttcagtaattgaagtgtgtggccataacttcactgcaggagacctcggtcctagcaccatcgtgggaagtgctgcattcaatatgttcatcattattgcactctgtgtttatgtggtgcctgacggagagacaaggaagattaagcatttgcgtgtcttctttgtgacagcagcctggagcatctttgcctacacctggctttacattattttgtctgtcatatctcctggtgttgtggaggtctgggaaggtttgcttactttcttcttctttcccatctgtgttgtgttcgcttgggtagcggataggagacttctgttttacaagtatgtctacaagaggtatcgagctggcaagcagagggggatgattattgaacatgaaggagacaggccatcttctaagactgaaattgaaatggacgggaaagtggtcaattctcatgttgaaaatttcttagatggtgctctggttctggaggtggatgagagggaccaagatgatgaagaagctaggcgagaaatggctaggattctgaaggaacttaagcagaagcatccagataaagaaatagagcaattaatagaattagctaactaccaagtcctaagtcagcagcaaaaaagtagagcattttatcgcattcaagctactcgcctcatgactggagctggcaacattttaaagaggcatgcagctgaccaagcaaggaaggctgtcagcatgcacgaggtcaacactgaagtgactgaaaatgaccctgttagtaagatcttctttgaacaagggacatatcagtgtctggagaactgtggtactgtggcccttaccattatccgcagaggtggtgatttgactaacactgtgtttgttgacttcagaacagaggatggcacagcaaatgctgggtctgattatgaatttactgaaggaactgtggtgtttaagcctggtgatacccagaaggaaatcagagtgggtatcatagatgatgatatctttgaggaggatgaaaatttccttgtgcatctcagcaatgtcaaagtatcttctgaagcttcagaagatggcatactggaagccaatcatgtttctacacttgcttgcctcggatctccctccactgccactgtaactatttttgatgatgaccacgcaggcatttttacttttgaggaacctgtgactcatgtgagtgagagcattggcatcatggaggtgaaagtattgagaacatctggagctcgaggaaatgttatcgttccatataaaaccatcgaagggactgccagaggtggaggggaggattttgaggacacttgtggagagctcgaattccagaatgatgaaattgtcaaaacaatatcagtcaaggtaattgatgatgaggagtatgagaaaaacaagaccttcttccttgagattggagagccccgcctggtggagatgagtgagaagaaagccctgttattgaatgagcttggtggcttcacaataacaggaaaatacctgtttggccaacctgtcttcaggaaggttcatgctagagaacatccgattctctctactgtaatcaccattgcagacgaatatgatgacaagcagccactgaccagcaaagaggaagaggagaggcgcattgcagaaatggggcgccccatcctgggagagcacaccaagttggaagtgatcattgaagaatcctatgaattcaagagtactgtggacaaactcattaagaagacaaacctggcccttgtggttgggactaacagctggagagaacagttcattgaagctatcactgtcagtgctggggaagatgatgacgacgatgaatgtggggaagagaagctgccctcctgtttcgattacgtgatgcactttctgactgtgttctggaaggtcctgtttgccttcgtcccccctactgaatactggaatggctgggcgtgtttcattgtctccatcctcatgattggcctactgacagctttcattggagacctggcttcccactttggctgcaccattggcctgaaagattctgtgactgcagtcgtgttcgtcgcacttggaacatcagtgccagacacatttgccagcaaagtggcagccacccaggaccagtatgcagacgcctccataggtaacgtcacgggcagcaacgcggtgaatgtcttcctgggaatcggtgtggcctggtccatcgctgccatctaccacgcagccaatggggaacagttcaaagtgtcccctggcacactagctttctctgtcactctcttcaccatttttgctttcatcaatgtgggggtgctgctgtatcggcggaggccagaaatcggaggtgagctgggtgggccccggactgccaagctcctcacatcctgcctctttgtgctcctatggctcttgtacattttcttctcctccctggaggcctactgccacataaaaggcttctaa

SEQ ID NO: 29389 - DNA, 6053 bp, Homo sapiens
  source 1..6053: mol_type = unassigned DNA
taggttgtgacagttggaagtgtcatgtacaacatgcggcgattaagtctttcacccaccttttcaatgggatttcatctgttagttactgtgagtctcttattttcccatgtggaccatgtaattgctgagacagaaatggaaggagaaggaaatgaaactggtgaatgtactggatcatattactgtaagaaaggggtgattttgcccatttgggaaccccaagacccttcttttggggacaaaattgctagagctactgtgtattttgtggccatggtctacatgtttcttggagtctctatcatagctgatcggttcatgtcctctatagaagtcatcacatctcaagaaaaagaaataaccataaagaaacccaatggagagaccaccaagacaactgtgaggatctggaatgaaacagtttctaacctgaccttgatggccctgggatcttctgctcctgagattctcctttcagtaattgaagtgtgtggccataacttcactgcaggagacctcggtcctagcaccatcgtgggaagtgctgcattcaatatgttcatcattattgcactctgtgtttatgtggtgcctgacggagagacaaggaagattaagcatttgcgtgtcttctttgtgacagcagcctggagcatctttgcctacacctggctttacattattttgtctgtcatatctcctggtgttgtggaggtctgggaaggtttgcttactttcttcttctttcccatctgtgttgtgttcgcttgggtagcggataggagacttctgttttacaagtatgtctacaagaggtatcgagctggcaagcagagggggatgattattgaacatgaaggagacaggccatcttctaagactgaaattgaaatggacgggaaagtggtcaattctcatgttgaaaatttcttagatggtgctctggttctggaggtggatgagagggaccaagatgatgaagaagctaggcgagaaatggctaggattctgaaggaacttaagcagaagcatccagataaagaaatagagcaattaatagaattagctaactaccaagtcctaagtcagcagcaaaaaagtagagcattttatcgcattcaagctactcgcctcatgactggagctggcaacattttaaagaggcatgcagctgaccaagcaaggaaggctgtcagcatgcacgaggtcaacactgaagtgactgaaaatgaccctgttagtaagatcttctttgaacaagggacatatcagtgtctggagaactgtggtactgtggcccttaccattatccgcagaggtggtgatttgactaacactgtgtttgttgacttcagaacagaggatggcacagcaaatgctgggtctgattatgaatttactgaaggaactgtggtgtttaagcctggtgatacccagaaggaaatcagagtgggtatcatagatgatgatatctttgaggaggatgaaaatttccttgtgcatctcagcaatgtcaaagtatcttctgaagcttcagaagatggcatactggaagccaatcatgtttctacacttgcttgcctcggatctccctccactgccactgtaactatttttgatgatgaccacgcaggcatttttacttttgaggaacctgtgactcatgtgagtgagagcattggcatcatggaggtgaaagtattgagaacatctggagctcgaggaaatgttatcgttccatataaaaccatcgaagggactgccagaggtggaggggaggattttgaggacacttgtggagagctcgaattccagaatgatgaaattgtcaaaacaatatcagtcaaggtaattgatgatgaggagtatgagaaaaacaagaccttcttccttgagattggagagccccgcctggtggagatgagtgagaagaaagccctgttattgaatgagcttggtggcttcacaataacaggaaaatacctgtttggccaacctgtcttcaggaaggttcatgctagagaacatccgattctctctactgtaatcaccattgcagacgaatatgatgacaagcagccactgaccagcaaagaggaagaggagaggcgcattgcagaaatggggcgccccatcctgggagagcacaccaagttggaagtgatcattgaagaatcctatgaattcaagagtactgtggacaaactcattaagaagacaaacctggcccttgtggttgggactaacagctggagagaacagttcattgaagctatcactgtcagtgctggggaagatgatgacgacgatgaatgtggggaagagaagctgccctcctgtttcgattacgtgatgcactttctgactgtgttctggaaggtcctgtttgccttcgtcccccctactgaatactggaatggctgggcgtgtttcattgtctccatcctcatgattggcctactgacagctttcattggagacctggcttcccactttggctgcaccattggcctgaaagattctgtgactgcagtcgtgttcgtcgcacttggaacatcagtgccagacacatttgccagcaaagtggcagccacccaggaccagtatgcagacgcctccataggtaacgtcacgggcagcaacgcggtgaatgtcttcctgggaatcggtgtggcctggtccatcgctgccatctaccacgcagccaatggggaacagttcaaagtgtcccctggcacactagctttctctgtcactctcttcaccatttttgctttcatcaatgtgggggtgctgctgtatcggcggaggccagaaatcggaggtgagctgggtgggccccggactgccaagctcctcacatcctgcctctttgtgctcctatggctcttgtacattttcttctcctccctggaggcctactgccacataaaaggcttctaaaggaactatcagatatagtaaatttatatatatacatatatatacataaaaattatgtataatggacagaggaaactgacatttgtcatgttcacttacctgctgatggaatccagcttcaagagcatactctgtactagggccgaagtaaaaaaccatcacctcccattcccaggggcatcatcatgttcaacaaggcatggaggcagggccatctttgcagctcagtctagaagggctgcactctctccaggttgataaatccttaaggctttgatttgttttgtttttggttttgttttcagtggagctggggaggtagttaatgtttggctttatttttgttattttgttttgttttgtttttttgggagagtcagggttgttgcttttctttgtggaaagtgaaaccatccaaatgtaaatgggttttggtaaaaatttaaatcattagtattccccctcacctcccccaatcactttaaaacttattttggattaagaaaaaatctgggcatggaagaagaaagaagcatgtcttcatcgtattaccaaagttcatgcttatctccggaatgtgagtggaggtgaagctgcctccaagaagaagcataaaagtggaatggagccaggaaatccgatggttctagaaatagtctgatatttaaacatgtgatacctggcagtctcgtttaacaggtacaaggaaaacgtgcctagattcccaggaacgtgcaaaatcctttctttcttatctctttagctctggactgtgattggcaaggtccttcttccagcattcagcccagctaagcccccaggtgccccatcccaaccctgttcctcctgtccacctgccatcccctatgcaaacagtaagaataaccccattcaaaaagcacatcatcgttttccatttgcattaacatgtgtctcagtcccatgttgccgttgcttgggattgtctgtcagttttattttcaaaggcatccatggcttgcacaatcctgttccagtcatgactgaacatttgctccttcttcatgtgccgttcggaaatgttgttgtgatacctgttacacagtgcatggtgaaaaacaaataaaacaaaacaaagagtatctgtatatagtagagtatagtacatactgttctcccatttggcaatgttgattggacattgaagacataagtgagttttcttttcacctgagttgttacttttgtgctgttattgagtttgattaattactagggataaaaggagaaaatggattattgttcacggttctgcacattcatttctaagaagcaataactgtcatgtggggagaagttaaagctattgagaggatagcaggcaaactacaaagatcttcatggaaaattagccatgtggaacacatcagaggcctctaaaaatcacccattaattcaggaaggccaaggagaaaggccttatagagacgttgatatgttggatgtgcctaggctttcagagccaccctttccacaacacccctccctgcaaagtatttatttcacatctgcactgtctggcacagatggtagatagtgctggtttgttcattttatttttttacttaaaaggctattttgagccctgtttctttcactgtccagtctagtcctctttgattatatcagtagttgctgagtaagaaagaagccagggtgaccaacgggcctttaaaagtgttgtctcctctacttatgctgaaagagaaggcaattaaataagactagtacctcccaggaggattggactgggatatttttaaccctttaaaaagaatagctgtttctatgttaaaataccaaagaacatggataaacccaacattccaaagtagtgagtccactaatgagaaaaataatagaatgactttggtcacctctcggagacttctgtgtctataaggaatcccaggctggagacattcctagccctctgtattgattcaaaaatacttaataaattaaagctgttgagacttattttttcttctgtcactcagtaaccatgatccttcctcatttaataaacatttggtgactgaatgagtaattaaatgctggttacccacttaatgtgccaggtagtatgatactttctggggactaagccatgaacaaaacagtctagatccctgccctcagaagggttacagtttatgtgattactattttcatgagtaaaagtgaagaaagccatatggaaagatttttatcttgcaagaaaaaacaattatgaaactcttttaacataaacacactgaaactgtatcaaagcaattgtccaaattgtatttatacccaagaatttctttaactaagagagcataaggcatatgtttggaaaaccaccctctttatctttgaccgacttgcagataaatatatctctccattttaaaccaagaagggcaatcatgttggtgatccagatcactgagaaagcccagtgtatcccatcttttatctttgttggcaatggaacttttctatggcccacactttacaattctttgtcattctaacccatccttcccatccttattttttttttttttgagaattgctaaatggaaagctagcctagaagcaccaagtaaatatattcaaggaatataagttgtttaaacattagaaaaatttttgcactcattttttagctgtattaggaatgtcaataatcctgtagcaaattttcacagagaactttaagaaattcttgcattggtcgatttcaatttgaaagctttttggtttgtttgctttttaaattttcatgttctaggaaactatgattctggttgttcaggattgttattattatagttgtgtaaaattattttattttgtgtgtattgtgcacagcttggggggggggcgggaaatgcactaattgtgctcttccttataaatggtacatattactgacacagacaaataaagtttctaattgtttctgatttaatcactagtgatacagcatattctgtatgaaatgttttctcctttctcattgtcatctacttcattttttgttttcatgttttgaagaaataaaaaccaaaatggta

SEQ ID NO: 29390 - DNA, 3065 bp, Homo sapiens
  source 1..3065: mol_type = unassigned DNA
ctttctggtaaatttagagaaggcatcatactgggatcttttttcacatccagcccatgcggactgagcagccaaagcttgacagagtaggttgtgacagttggaagtgtcatgtacaacatgcggcgattaagtctttcacccaccttttcaatgggatttcatctgttagttactgtgagtctcttattttcccatgtggaccatgtaattgctgagacagaaatggaaggagaaggaaatgaaactggtgaatgtactggatcatattactgtaagaaaggggtgattttgcccatttgggaaccccaagacccttcttttggggacaaaattgctagagctactgtgtattttgtggccatggtctacatgtttcttggagtctctatcatagctgatcggttcatgtcctctatagaagtcatcacatctcaagaaaaagaaataaccataaagaaacccaatggagagaccaccaagacaactgtgaggatctggaatgaaacagtttctaacctgaccttgatggccctgggatcttctgctcctgagattctcctttcagtaattgaagtgtgtggccataacttcactgcaggagacctcggtcctagcaccatcgtgggaagtgctgcattcaatatgttcatcattattgcactctgtgtttatgtggtgcctgacggagagacaaggaagattaagcatttgcgtgtcttctttgtgacagcagcctggagcatctttgcctacacctggctttacattattttgtctgtcatatctcctggtgttgtggaggtctgggaaggtttgcttactttcttcttctttcccatctgtgttgtgttcgcttgggtagcggataggagacttctgttttacaagtatgtctacaagaggtatcgagctggcaagcagagggggatgattattgaacatgaaggagacaggccatcttctaagactgaaattgaaatggacgggaaagtggtcaattctcatgttgaaaatttcttagatggtgctctggttctggaggtggatgagagggaccaagatgatgaagaagctaggcgagaaatggctaggattctgaaggaacttaagcagaagcatccagataaagaaatagagcaattaatagaattagctaactaccaagtcctaagtcagcagcaaaaaagtagagcattttatcgcattcaagctactcgcctcatgactggagctggcaacattttaaagaggcatgcagctgaccaagcaaggaaggctgtcagcatgcacgaggtcaacactgaagtgactgaaaatgaccctgttagtaagatcttctttgaacaagggacatatcagtgtctggagaactgtggtactgtggcccttaccattatccgcagaggtggtgatttgactaacactgtgtttgttgacttcagaacagaggatggcacagcaaatgctgggtctgattatgaatttactgaaggaactgtggtgtttaagcctggtgatacccagaaggaaatcagagtgggtatcatagatgatgatatctttgaggaggatgaaaatttccttgtgcatctcagcaatgtcaaagtatcttctgaagcttcagaagatggcatactggaagccaatcatgtttctacacttgcttgcctcggatctccctccactgccactgtaactatttttgatgatgaccacgcaggcatttttacttttgaggaacctgtgactcatgtgagtgagagcattggcatcatggaggtgaaagtattgagaacatctggagctcgaggaaatgttatcgttccatataaaaccatcgaagggactgccagaggtggaggggaggattttgaggacacttgtggagagctcgaattccagaatgatgaaattgtgaagatcattaccattagaatatttgaccgtgaggaatatgagaaagagtgcagtttctcccttgtgcttgaggaaccaaaatggataagaagaggaatgaaaggtggcttcacaataacagacgaatatgatgacaagcagccactgaccagcaaagaggaagaggagaggcgcattgcagaaatggggcgccccatcctgggagagcacaccaagttggaagtgatcattgaagaatcctatgaattcaagagtactgtggacaaactcattaagaagacaaacctggcccttgtggttgggactaacagctggagagaacagttcattgaagctatcactgtcagtgctggggaagatgatgacgacgatgaatgtggggaagagaagctgccctcctgtttcgattacgtgatgcactttctgactgtgttctggaaggtcctgtttgccttcgtcccccctactgaatactggaatggctgggcgtgtttcattgtctccatcctcatgattggcctactgacagctttcattggagacctggcttcccactttggctgcaccattggcctgaaagattctgtgactgcagtcgtgttcgtcgcacttggaacatcagtgccagacacatttgccagcaaagtggcagccacccaggaccagtatgcagacgcctccataggtaacgtcacgggcagcaacgcggtgaatgtcttcctgggaatcggtgtggcctggtccatcgctgccatctaccacgcagccaatggggaacagttcaaagtgtcccctggcacactagctttctctgtcactctcttcaccatttttgctttcatcaatgtgggggtgctgctgtatcggcggaggccagaaatcggaggtgagctgggtgggccccggactgccaagctcctcacatcctgcctctttgtgctcctatggctcttgtacattttcttctcctccctggaggcctactgccacataaaaggcttctaaaggaactatcagatatagtaaatttatatatatacatatatatacataaaaattatgtataatggacagaggaaactgacatttgtcatgttcacttacctgctgatggaatccagcttcaagagcatactctgtactag

SEQ ID NO: 29391 - DNA, 3178 bp, Homo sapiens
  source 1..3178: mol_type = unassigned DNA
aagcttgacagaggttgtgacagttggaagtgtcatgtacaacatgcggcgattaagtctttcacccaccttttcaatgggatttcatctgttagttactgtgagtctcttattttcccatgtggaccatgtaattgctgagacagaaatggaaggagaaggaaatgaaactggtgaatgtactggatcatattactgtaagaaaggggtgattttgcccatttgggaaccccaagacccttcttttggggacaaaattgctagagctactgtgtattttgtggccatggtctacatgtttcttggagtctctatcatagctgatcggttcatgtcctctatagaagtcatcacatctcaagaaaaagaaataaccataaagaaacccaatggagagaccaccaagacaactgtgaggatctggaatgaaacagtttctaacctgaccttgatggccctgggatcttctgctcctgagattctcctttcagtaattgaagtgtgtggccataacttcactgcaggagacctcggtcctagcaccatcgtgggaagtgctgcattcaatatgttcatcattattgcactctgtgtttatgtggtgcctgacggagagacaaggaagattaagcatttgcgtgtcttctttgtgacagcagcctggagcatctttgcctacacctggctttacattattttgtctgtcatatctcctggtgttgtggaggtctgggaaggtttgcttactttcttcttctttcccatctgtgttgtgttcgcttgggtagcggataggagacttctgttttacaagtatgtctacaagaggtatcgagctggcaagcagagggggatgattattgaacatgaaggagacaggccatcttctaagactgaaattgaaatggacgggaaagtggtcaattctcatgttgaaaatttcttagatggtgctctggttctggaggtggatgagagggaccaagatgatgaagaagctaggcgagaaatggctaggattctgaaggaacttaagcagaagcatccagataaagaaatagagcaattaatagaattagctaactaccaagtcctaagtcagcagcaaaaaagtagagcattttatcgcattcaagctactcgcctcatgactggagctggcaacattttaaagaggcatgcagctgaccaagcaaggaaggctgtcagcatgcacgaggtcaacactgaagtgactgaaaatgaccctgttagtaagatcttctttgaacaagggacatatcagtgtctggagaactgtggtactgtggcccttaccattatccgcagaggtggtgatttgactaacactgtgtttgttgacttcagaacagaggatggcacagcaaatgctgggtctgattatgaatttactgaaggaactgtggtgtttaagcctggtgatacccagaaggaaatcagagtgggtatcatagatgatgatatctttgaggaggatgaaaatttccttgtgcatctcagcaatgtcaaagtatcttctgaagcttcagaagatggcatactggaagccaatcatgtttctacacttgcttgcctcggatctccctccactgccactgtaactatttttgatgatgaccacgcaggcatttttacttttgaggaacctgtgactcatgtgagtgagagcattggcatcatggaggtgaaagtattgagaacatctggagctcgaggaaatgttatcgttccatataaaaccatcgaagggactgccagaggtggaggggaggattttgaggacacttgtggagagctcgaattccagaatgatgaaattgtcaaaacaatatcagtcaaggtaattgatgatgaggagtatgagaaaaacaagaccttcttccttgagattggagagccccgcctggtggagatgagtgagaagaaagccctgttattgaatgagcttggtggcttcacaataacaggaaaatacctgtttggccaacctgtcttcaggaaggttcatgctagagaacatccgattctctctactgtaatcaccattgcagacgaatatgatgacaagcagccactgaccagcaaagaggaagaggagaggcgcattgcagaaatggggcgccccatcctgggagagcacaccaagttggaagtgatcattgaagaatcctatgaattcaagagtactgtggacaaactcattaagaagacaaacctggcccttgtggttgggactaacagctggagagaacagttcattgaagctatcactgtcagtgctggggaagatgatgacgacgatgaatgtggggaagagaagctgccctcctgtttcgattacgtgatgcactttctgactgtgttctggaaggtcctgtttgccttcgtcccccctactgaatactggaatggctgggcgtgtttcattgtctccatcctcatgattggcctactgacagctttcattggagacctggcttcccactttggctgcaccattggcctgaaagattctgtgactgcagtcgtgttcgtcgcacttggaacatcagtgccagacacatttgccagcaaagtggcagccacccaggaccagtatgcagacgcctccataggtaacgtcacgggcagcaacgcggtgaatgtcttcctgggaatcggtgtggcctggtccatcgctgccatctaccacgcagccaatggggaacagttcaaagtgtcccctggcacactagctttctctgtcactctcttcaccatttttgctttcatcaatgtgggggtgctgctgtatcggcggaggccagaaatcggaggtgagctgggtgggccccggactgccaagctcctcacatcctgcctctttgtgctcctatggctcttgtacattttcttctcctccctggaggcctactgccacataaaaggcttctaaaggaactatcagatatagtaaatttatatatatacatatatatacataaaaattatgtataatggacagaggaaactgacatttgtcatgttcacttacctgctgatggaatccagcttcaagagcatactctgtactagggccgaagtaaaaaaccatcacctcccattcccaggggcatcatcatgttcaacaaggcatggaggcagggccatctttgca

SEQ ID NO: 29392 - DNA, 2965 bp, Homo sapiens
  source 1..2965: mol_type = unassigned DNA
tcttggttgctctcaccatgtgatacaccagctccacctttgccttctgctgtgactgtaagtttcctgaggcctctccagaagcagattctagcaccatgctgctcgcacagccttcaaaacttaggttgtgacagttggaagtgtcatgtacaacatgcggcgattaagtctttcacccaccttttcaatgggatttcatctgttagttactgtgagtctcttattttcccatgtggaccatgtaattgctgagacagaaatggaaggagaaggaaatgaaactggtgaatgtactggatcatattactgtaagaaaggggtgattttgcccatttgggaaccccaagacccttcttttggggacaaaattgctagagctactgtgtattttgtggccatggtctacatgtttcttggagtctctatcatagctgatcggttcatgtcctctatagaagtcatcacatctcaagaaaaagaaataaccataaagaaacccaatggagagaccaccaagacaactgtgaggatctggaatgaaacagtttctaacctgaccttgatggccctgggatcttctgctcctgagattctcctttcagtaattgaagtgtgtggccataacttcactgcaggagacctcggtcctagcaccatcgtgggaagtgctgcattcaatatgttcatcattattgcactctgtgtttatgtggtgcctgacggagagacaaggaagattaagcatttgcgtgtcttctttgtgacagcagcctggagcatctttgcctacacctggctttacattattttgtctgtcatatctcctggtgttgtggaggtctgggaaggtttgcttactttcttcttctttcccatctgtgttgtgttcgcttgggtagcggataggagacttctgttttacaagtatgtctacaagaggtatcgagctggcaagcagagggggatgattattgaacatgaaggagacaggccatcttctaagactgaaattgaaatggacgggaaagtggtcaattctcatgttgaaaatttcttagatggtgctctggttctggaggtggatgagagggaccaagatgatgaagaagctaggcgagaaatggctaggattctgaaggaacttaagcagaagcatccagataaagaaatagagcaattaatagaattagctaactaccaagtcctaagtcagcagcaaaaaagtagagcattttatcgcattcaagctactcgcctcatgactggagctggcaacattttaaagaggcatgcagctgaccaagcaaggaaggctgtcagcatgcacgaggtcaacactgaagtgactgaaaatgaccctgttagtaagatcttctttgaacaagggacatatcagtgtctggagaactgtggtactgtggcccttaccattatccgcagaggtggtgatttgactaacactgtgtttgttgacttcagaacagaggatggcacagcaaatgctgggtctgattatgaatttactgaaggaactgtggtgtttaagcctggtgatacccagaaggaaatcagagtgggtatcatagatgatgatatctttgaggaggatgaaaatttccttgtgcatctcagcaatgtcaaagtatcttctgaagcttcagaagatggcatactggaagccaatcatgtttctacacttgcttgcctcggatctccctccactgccactgtaactatttttgatgatgaccacgcaggcatttttacttttgaggaacctgtgactcatgtgagtgagagcattggcatcatggaggtgaaagtattgagaacatctggagctcgaggaaatgttatcgttccatataaaaccatcgaagggactgccagaggtggaggggaggattttgaggacacttgtggagagctcgaattccagaatgatgaaattgtgaagatcattaccattagaatatttgaccgtgaggaatatgagaaagagtgcagtttctcccttgtgcttgaggaaccaaaatggataagaagaggaatgaaaggtggcttcacaataacagacgaatatgatgacaagcagccactgaccagcaaagaggaagaggagaggcgcattgcagaaatggggcgccccatcctgggagagcacaccaagttggaagtgatcattgaagaatcctatgaattcaagagtactgtggacaaactcattaagaagacaaacctggcccttgtggttgggactaacagctggagagaacagttcattgaagctatcactgtcagtgctggggaagatgatgacgacgatgaatgtggggaagagaagctgccctcctgtttcgattacgtgatgcactttctgactgtgttctggaaggtcctgtttgccttcgtcccccctactgaatactggaatggctgggcgtgtttcattgtctccatcctcatgattggcctactgacagctttcattggagacctggcttcccactttggctgcaccattggcctgaaagattctgtgactgcagtcgtgttcgtcgcacttggaacatcagtgccagacacatttgccagcaaagtggcagccacccaggaccagtatgcagacgcctccataggtaacgtcacgggcagcaacgcggtgaatgtcttcctgggaatcggtgtggcctggtccatcgctgccatctaccacgcagccaatggggaacagttcaaagtgtcccctggcacactagctttctctgtcactctcttcaccatttttgctttcatcaatgtgggggtgctgctgtatcggcggaggccagaaatcggaggtgagctgggtgggccccggactgccaagctcctcacatcctgcctctttgtgctcctatggctcttgtacattttcttctcctccctggaggcctactgccacataaaaggcttctaaagg

SEQ ID NO: 29393 - DNA, 3139 bp, Homo sapiens
  source 1..3139: mol_type = unassigned DNA
taggttgtgacagttggaagtgtcatgtacaacatgcggcgattaagtctttcacccaccttttcaatgggatttcatctgttagttactgtgagtctcttattttcccatgtggaccatgtaattgctgagacagaaatggaaggagaaggaaatgaaactggtgaatgtactggatcatattactgtaagaaaggggtgattttgcccatttgggaaccccaagacccttcttttggggacaaaattgctagagctactgtgtattttgtggccatggtctacatgtttcttggagtctctatcatagctgatcggttcatgtcctctatagaagtcatcacatctcaagaaaaagaaataaccataaagaaacccaatggagagaccaccaagacaactgtgaggatctggaatgaaacagtttctaacctgaccttgatggccctgggatcttctgctcctgagattctcctttcagtaattgaagtgtgtggccataacttcactgcaggagacctcggtcctagcaccatcgtgggaagtgctgcattcaatatgttcatcattattgcactctgtgtttatgtggtgcctgacggagagacaaggaagattaagcatttgcgtgtcttctttgtgacagcagcctggagcatctttgcctacacctggctttacattattttgtctgtcatatctcctggtgttgtggaggtctgggaaggtttgcttactttcttcttctttcccatctgtgttgtgttcgcttgggtagcggataggagacttctgttttacaagtatgtctacaagaggtatcgagctggcaagcagagggggatgattattgaacatgaaggagacaggccatcttctaagactgaaattgaaatggacgggaaagtggtcaattctcatgttgaaaatttcttagatggtgctctggttctggaggtggatgagagggaccaagatgatgaagaagctaggcgagaaatggctaggattctgaaggaacttaagcagaagcatccagataaagaaatagagcaattaatagaattagctaactaccaagtcctaagtcagcagcaaaaaagtagagcattttatcgcattcaagctactcgcctcatgactggagctggcaacattttaaagaggcatgcagctgaccaagcaaggaaggctgtcagcatgcacgaggtcaacactgaagtgactgaaaatgaccctgttagtaagatcttctttgaacaagggacatatcagtgtctggagaactgtggtactgtggcccttaccattatccgcagaggtggtgatttgactaacactgtgtttgttgacttcagaacagaggatggcacagcaaatgctgggtctgattatgaatttactgaaggaactgtggtgtttaagcctggtgatacccagaaggaaatcagagtgggtatcatagatgatgatatctttgaggaggatgaaaatttccttgtgcatctcagcaatgtcaaagtatcttctgaagcttcagaagatggcatactggaagccaatcatgtttctacacttgcttgcctcggatctccctccactgccactgtaactatttttgatgatgaccacgcaggcatttttacttttgaggaacctgtgactcatgtgagtgagagcattggcatcatggaggtgaaagtattgagaacatctggagctcgaggaaatgttatcgttccatataaaaccatcgaagggactgccagaggtggaggggaggattttgaggacacttgtggagagctcgaattccagaatgatgaaattgtcaaaacaatatcagtcaaggtaattgatgatgaggagtatgagaaaaacaagaccttcttccttgagattggagagccccgcctggtggagatgagtgagaagaaagccctgttattgaatgagcttggtggcttcacaataacaggccaacctgtcttcaggaaggttcatgctagagaacatccgattctctctactgtaatcaccattgcagacgaatatgatgacaagcagccactgaccagcaaagaggaagaggagaggcgcattgcagaaatggggcgccccatcctgggagagcacaccaagttggaagtgatcattgaagaatcctatgaattcaagagtactgtggacaaactcattaagaagacaaacctggcccttgtggttgggactaacagctggagagaacagttcattgaagctatcactgtcagtgctggggaagatgatgacgacgatgaatgtggggaagagaagctgccctcctgtttcgattacgtgatgcactttctgactgtgttctggaaggtcctgtttgccttcgtcccccctactgaatactggaatggctgggcgtgtttcattgtctccatcctcatgattggcctactgacagctttcattggagacctggcttcccactttggctgcaccattggcctgaaagattctgtgactgcagtcgtgttcgtcgcacttggaacatcagtgccagacacatttgccagcaaagtggcagccacccaggaccagtatgcagacgcctccataggtaacgtcacgggcagcaacgcggtgaatgtcttcctgggaatcggtgtggcctggtccatcgctgccatctaccacgcagccaatggggaacagttcaaagtgtcccctggcacactagctttctctgtcactctcttcaccatttttgctttcatcaatgtgggggtgctgctgtatcggcggaggccagaaatcggaggtgagctgggtgggccccggactgccaagctcctcacatcctgcctctttgtgctcctatggctcttgtacattttcttctcctccctggaggcctactgccacataaaaggcttctaaaggaactatcagatatagtaaatttatatatatacatatatatacataaaaattatgtataatggacagaggaaactgacatttgtcatgttcacttacctgctgatggaatccagcttcaagagcatactctgtactagggccgaagtaaaaaaccatcacctcccattcccaggggcatcatcatgttcaacaaggcatggaggca

SEQ ID NO: 29394 - DNA, 2814 bp, Homo sapiens
  source 1..2814: mol_type = unassigned DNA
atgtacaacatgcggcgattaagtctttcacccaccttttcaatgggatttcatctgttagttactgtgagtctcttattttcccatgtggaccatgtaattgctgagacagaaatggaaggagaaggaaatgaaactggtgaatgtactggatcatattactgtaagaaaggggtgattttgcccatttgggaaccccaagacccttcttttggggacaaaattgctagagctactgtgtattttgtggccatggtctacatgtttcttggagtctctatcatagctgatcggttcatgtcctctatagaagtcatcacatctcaagaaaaagaaataaccataaagaaacccaatggagagaccaccaagacaactgtgaggatctggaatgaaacagtttctaacctgaccttgatggccctgggatcttctgctcctgagattctcctttcagtaattgaagtgtgtggccataacttcactgcaggagacctcggtcctagcaccatcgtgggaagtgctgcattcaatatgttcatcattattgcactctgtgtttatgtggtgcctgacggagagacaaggaagattaagcatttgcgtgtcttctttgtgacagcagcctggagcatctttgcctacacctggctttacattattttgtctgtcatatctcctggtgttgtggaggtctgggaaggtttgcttactttcttcttctttcccatctgtgttgtgttcgcttgggtagcggataggagacttctgttttacaagtatgtctacaagaggtatcgagctggcaagcagagggggatgattattgaacatgaaggagacaggccatcttctaagactgaaattgaaatggacgggaaagtggtcaattctcatgttgaaaatttcttagatggtgctctggttctggaggtggatgagagggaccaagatgatgaagaagctaggcgagaaatggctaggattctgaaggaacttaagcagaagcatccagataaagaaatagagcaattaatagaattagctaactaccaagtcctaagtcagcagcaaaaaagtagagcattttatcgcattcaagctactcgcctcatgactggagctggcaacattttaaagaggcatgcagctgaccaagcaaggaaggctgtcagcatgcacgaggtcaacactgaagtgactgaaaatgaccctgttagtaagatcttctttgaacaagggacatatcagtgtctggagaactgtggtactgtggcccttaccattatccgcagaggtggtgatttgactaacactgtgtttgttgacttcagaacagaggatggcacagcaaatgctgggtctgattatgaatttactgaaggaactgtggtgtttaagcctggtgatacccagaaggaaatcagagtgggtatcatagatgatgatatctttgaggaggatgaaaatttccttgtgcatctcagcaatgtcaaagtatcttctgaagcttcagaagatggcatactggaagccaatcatgtttctacacttgcttgcctcggatctccctccactgccactgtaactatttttgatgatgaccacgcaggcatttttacttttgaggaacctgtgactcatgtgagtgagagcattggcatcatggaggtgaaagtattgagaacatctggagctcgaggaaatgttatcgttccatataaaaccatcgaagggactgccagaggtggaggggaggattttgaggacacttgtggagagctcgaattccagaatgatgaaattgtgaagatcattaccattagaatatttgaccgtgaggaatatgagaaagagtgcagtttctcccttgtgcttgaggaaccaaaatggataagaagaggaatgaaaggtggcttcacaataacagacgaatatgatgacaagcagccactgaccagcaaagaggaagaggagaggcgcattgcagaaatggggcgccccatcctgggagagcacaccaagttggaagtgatcattgaagaatcctatgaattcaagagtactgtggacaaactcattaagaagacaaacctggcccttgtggttgggactaacagctggagagaacagttcattgaagctatcactgtcagtgctggggaagatgatgacgacgatgaatgtggggaagagaagctgccctcctgtttcgattacgtgatgcactttctgactgtgttctggaaggtcctgtttgccttcgtcccccctactgaatactggaatggctgggcgtgtttcattgtctccatcctcatgattggcctactgacagctttcattggagacctggcttcccactttggctgcaccattggcctgaaagattctgtgactgcagtcgtgttcgtcgcacttggaacatcagtgccagacacatttgccagcaaagtggcagccacccaggaccagtatgcagacgcctccataggtaacgtcacgggcagcaacgcggtgaatgtcttcctgggaatcggtgtggcctggtccatcgctgccatctaccacgcagccaatggggaacagttcaaagtgtcccctggcacactagctttctctgtcactctcttcaccatttttgctttcatcaatgtgggggtgctgctgtatcggcggaggccagaaatcggaggtgagctgggtgggccccggactgccaagctcctcacatcctgcctctttgtgctcctatggctcttgtacattttcttctcctccctggaggcctactgccacataaaaggcttctaa

SEQ ID NO: 29395 - DNA, 6111 bp, Homo sapiens
  source 1..6111: mol_type = unassigned DNA
ggcgctgcacggtagtcagcccgccgccgccgcctgctttgtgcttcccacagaagatgggagcgacctcttcctgatcgggagctgtttaaaaggagggagtgcgccgtattttctactagcgtggaggaacggaggaagaatccattcacactccccaaaccagtaggttgtgacagttggaagtgtcatgtacaacatgcggcgattaagtctttcacccaccttttcaatgggatttcatctgttagttactgtgagtctcttattttcccatgtggaccatgtaattgctgagacagaaatggaaggagaaggaaatgaaactggtgaatgtactggatcatattactgtaagaaaggggtgattttgcccatttgggaaccccaagacccttcttttggggacaaaattgctagagctactgtgtattttgtggccatggtctacatgtttcttggagtctctatcatagctgatcggttcatgtcctctatagaagtcatcacatctcaagaaaaagaaataaccataaagaaacccaatggagagaccaccaagacaactgtgaggatctggaatgaaacagtttctaacctgaccttgatggccctgggatcttctgctcctgagattctcctttcagtaattgaagtgtgtggccataacttcactgcaggagacctcggtcctagcaccatcgtgggaagtgctgcattcaatatgttcatcattattgcactctgtgtttatgtggtgcctgacggagagacaaggaagattaagcatttgcgtgtcttctttgtgacagcagcctggagcatctttgcctacacctggctttacattattttgtctgtcatatctcctggtgttgtggaggtctgggaaggtttgcttactttcttcttctttcccatctgtgttgtgttcgcttgggtagcggataggagacttctgttttacaagtatgtctacaagaggtatcgagctggcaagcagagggggatgattattgaacatgaaggagacaggccatcttctaagactgaaattgaaatggacgggaaagtggtcaattctcatgttgaaaatttcttagatggtgctctggttctggaggtggatgagagggaccaagatgatgaagaagctaggcgagaaatggctaggattctgaaggaacttaagcagaagcatccagataaagaaatagagcaattaatagaattagctaactaccaagtcctaagtcagcagcaaaaaagtagagcattttatcgcattcaagctactcgcctcatgactggagctggcaacattttaaagaggcatgcagctgaccaagcaaggaaggctgtcagcatgcacgaggtcaacactgaagtgactgaaaatgaccctgttagtaagatcttctttgaacaagggacatatcagtgtctggagaactgtggtactgtggcccttaccattatccgcagaggtggtgatttgactaacactgtgtttgttgacttcagaacagaggatggcacagcaaatgctgggtctgattatgaatttactgaaggaactgtggtgtttaagcctggtgatacccagaaggaaatcagagtgggtatcatagatgatgatatctttgaggaggatgaaaatttccttgtgcatctcagcaatgtcaaagtatcttctgaagcttcagaagatggcatactggaagccaatcatgtttctacacttgcttgcctcggatctccctccactgccactgtaactatttttgatgatgaccacgcaggcatttttacttttgaggaacctgtgactcatgtgagtgagagcattggcatcatggaggtgaaagtattgagaacatctggagctcgaggaaatgttatcgttccatataaaaccatcgaagggactgccagaggtggaggggaggattttgaggacacttgtggagagctcgaattccagaatgatgaaattgtgaagatcattaccattagaatatttgaccgtgaggaatatgagaaagagtgcagtttctcccttgtgcttgaggaaccaaaatggataagaagaggaatgaaaggtggcttcacaataacagacgaatatgatgacaagcagccactgaccagcaaagaggaagaggagaggcgcattgcagaaatggggcgccccatcctgggagagcacaccaagttggaagtgatcattgaagaatcctatgaattcaagagtactgtggacaaactcattaagaagacaaacctggcccttgtggttgggactaacagctggagagaacagttcattgaagctatcactgtcagtgctggggaagatgatgacgacgatgaatgtggggaagagaagctgccctcctgtttcgattacgtgatgcactttctgactgtgttctggaaggtcctgtttgccttcgtcccccctactgaatactggaatggctgggcgtgtttcattgtctccatcctcatgattggcctactgacagctttcattggagacctggcttcccactttggctgcaccattggcctgaaagattctgtgactgcagtcgtgttcgtcgcacttggaacatcagtgccagacacatttgccagcaaagtggcagccacccaggaccagtatgcagacgcctccataggtaacgtcacgggcagcaacgcggtgaatgtcttcctgggaatcggtgtggcctggtccatcgctgccatctaccacgcagccaatggggaacagttcaaagtgtcccctggcacactagctttctctgtcactctcttcaccatttttgctttcatcaatgtgggggtgctgctgtatcggcggaggccagaaatcggaggtgagctgggtgggccccggactgccaagctcctcacatcctgcctctttgtgctcctatggctcttgtacattttcttctcctccctggaggcctactgccacataaaaggcttctaaaggaactatcagatatagtaaatttatatatatacatatatatacataaaaattatgtataatggacagaggaaactgacatttgtcatgttcacttacctgctgatggaatccagcttcaagagcatactctgtactagggccgaagtaaaaaaccatcacctcccattcccaggggcatcatcatgttcaacaaggcatggaggcagggccatctttgcagctcagtctagaagggctgcactctctccaggttgataaatccttaaggctttgatttgttttgtttttggttttgttttcagtggagctggggaggtagttaatgtttggctttatttttgttattttgttttgttttgtttttttgggagagtcagggttgttgcttttctttgtggaaagtgaaaccatccaaatgtaaatgggttttggtaaaaatttaaatcattagtattccccctcacctcccccaatcactttaaaacttattttggattaagaaaaaatctgggcatggaagaagaaagaagcatgtcttcatcgtattaccaaagttcatgcttatctccggaatgtgagtggaggtgaagctgcctccaagaagaagcataaaagtggaatggagccaggaaatccgatggttctagaaatagtctgatatttaaacatgtgatacctggcagtctcgtttaacaggtacaaggaaaacgtgcctagattcccaggaacgtgcaaaatcctttctttcttatctctttagctctggactgtgattggcaaggtccttcttccagcattcagcccagctaagcccccaggtgccccatcccaaccctgttcctcctgtccacctgccatcccctatgcaaacagtaagaataaccccattcaaaaagcacatcatcgttttccatttgcattaacatgtgtctcagtcccatgttgccgttgcttgggattgtctgtcagttttattttcaaaggcatccatggcttgcacaatcctgttccagtcatgactgaacatttgctccttcttcatgtgccgttcggaaatgttgttgtgatacctgttacacagtgcatggtgaaaaacaaataaaacaaaacaaagagtatctgtatatagtagagtatagtacatactgttctcccatttggcaatgttgattggacattgaagacataagtgagttttcttttcacctgagttgttacttttgtgctgttattgagtttgattaattactagggataaaaggagaaaatggattattgttcacggttctgcacattcatttctaagaagcaataactgtcatgtggggagaagttaaagctattgagaggatagcaggcaaactacaaagatcttcatggaaaattagccatgtggaacacatcagaggcctctaaaaatcacccattaattcaggaaggccaaggagaaaggccttatagagacgttgatatgttggatgtgcctaggctttcagagccaccctttccacaacacccctccctgcaaagtatttatttcacatctgcactgtctggcacagatggtagatagtgctggtttgttcattttatttttttacttaaaaggctattttgagccctgtttctttcactgtccagtctagtcctctttgattatatcagtagttgctgagtaagaaagaagccagggtgaccaacgggcctttaaaagtgttgtctcctctacttatgctgaaagagaaggcaattaaataagactagtacctcccaggaggattggactgggatatttttaaccctttaaaaagaatagctgtttctatgttaaaataccaaagaacatggataaacccaacattccaaagtagtgagtccactaatgagaaaaataatagaatgactttggtcacctctcggagacttctgtgtctataaggaatcccaggctggagacattcctagccctctgtattgattcaaaaatacttaataaattaaagctgttgagacttattttttcttctgtcactcagtaaccatgatccttcctcatttaataaacatttggtgactgaatgagtaattaaatgctggttacccacttaatgtgccaggtagtatgatactttctggggactaagccatgaacaaaacagtctagatccctgccctcagaagggttacagtttatgtgattactattttcatgagtaaaagtgaagaaagccatatggaaagatttttatcttgcaagaaaaaacaattatgaaactcttttaacataaacacactgaaactgtatcaaagcaattgtccaaattgtatttatacccaagaatttctttaactaagagagcataaggcatatgtttggaaaaccaccctctttatctttgaccgacttgcagataaatatatctctccattttaaaccaagaagggcaatcatgttggtgatccagatcactgagaaagcccagtgtatcccatcttttatctttgttggcaatggaacttttctatggcccacactttacaattctttgtcattctaacccatccttcccatccttattttttttttttttgagaattgctaaatggaaagctagcctagaagcaccaagtaaatatattcaaggaatataagttgtttaaacattagaaaaatttttgcactcattttttagctgtattaggaatgtcaataatcctgtagcaaattttcacagagaactttaagaaattcttgcattggtcgatttcaatttgaaagctttttggtttgtttgctttttaaattttcatgttctaggaaactatgattctggttgttcaggattgttattattatagttgtgtaaaattattttattttgtgtgtattgtgcacagcttggggggggggcgggaaatgcactaattgtgctcttccttataaatggtacatattactgacacagacaaataaagtttctaattgtttctgatttaatcactagtgatacagcatattctgtatgaaatgttttctcctttctcattgtcatctacttcattttttgttttcatgttttgaagaaataaaaaccaaaatggta

SEQ ID NO: 29396 - DNA, 3434 bp, Homo sapiens
  source 1..3434: mol_type = unassigned DNA
atgcggcgattaagtctttcacccaccttttcaatgggatttcatctgttagttactgtgagtctcttattttcccatgtggaccatgtaattgctgagacagaaatggaaggagaaggaaatgaaactggtgaatgtactggatcatattactgtaagaaaggggtgattttgcccatttgggaaccccaagacccttcttttggggacaaaattgctagagctactgtgtattttgtggccatggtctacatgtttcttggagtctctatcatagctgatcggttcatgtcctctatagaagtcatcacatctcaagaaaaagaaataaccataaagaaacccaatggagagaccaccaagacaactgtgaggatctggaatgaaacagtttctaacctgaccttgatggccctgggatcttctgctcctgagattctcctttcagtaattgaagtgtgtggccataacttcactgcaggagacctcggtcctagcaccatcgtgggaagtgctgcattcaatatgttcatcattattgcactctgtgtttatgtggtgcctgacggagagacaaggaagattaagcatttgcgtgtcttctttgtgacagcagcctggagcatctttgcctacacctggctttacattattttgtctgtcatatctcctggtgttgtggaggtctgggaaggtttgcttactttcttcttctttcccatctgtgttgtgttcgcttgggtagcggataggagacttctgttttacaagtatgtctacaagaggtatcgagctggcaagcagagggggatgattattgaacatgaaggagacaggccatcttctaagactgaaattgaaatggacgggaaagtggtcaattctcatgttgaaaatttcttagatggtgctctggttctggaggtggatgagagggaccaagatgatgaagaagctaggcgagaaatggctaggattctgaaggaacttaagcagaagcatccagataaagaaatagagcaattaatagaattagctaactaccaagtcctaagtcagcagcaaaaaagtagagcattttatcgcattcaagctactcgcctcatgactggagctggcaacattttaaagaggcatgcagctgaccaagcaaggaaggctgtcagcatgcacgaggtcaacactgaagtgactgaaaatgaccctgttagtaagatcttctttgaacaagggacatatcagtgtctggagaactgtggtactgtggcccttaccattatccgcagaggtggtgatttgactaacactgtgtttgttgacttcagaacagaggatggcacagcaaatgctgggtctgattatgaatttactgaaggaactgtggtgtttaagcctggtgatacccagaaggaaatcagagtgggtatcatagatgatgatatctttgaggaggatgaaaatttccttgtgcatctcagcaatgtcaaagtatcttctgaagcttcagaagatggcatactggaagccaatcatgtttctacacttgcttgcctcggatctccctccactgccactgtaactatttttgatgatgaccacgcaggcatttttacttttgaggaacctgtgactcatgtgagtgagagcattggcatcatggaggtgaaagtattgagaacatctggagctcgaggaaatgttatcgttccatataaaaccatcgaagggactgccagaggtggaggggaggattttgaggacacttgtggagagctcgaattccagaatgatgaaattgtcaaaacaatatcagtcaaggtaattgatgatgaggagtatgagaaaaacaagaccttcttccttgagattggagagccccgcctggtggagatgagtgagaagaaaggaagatcattaccattagaatatttgaccgtgaggaatatgagaaagagtgcagtttctcccttgtgcttgaggaaccaaaatggataagaagaggaatgaaaggtggcttcacaataacagacgaatatgatgacaagcagccactgaccagcaaagaggaagaggagaggcgcattgcagaaatggggcgccccatcctgggagagcacaccaagttggaagtgatcattgaagaatcctatgaattcaagagtactgtggacaaactcattaagaagacaaacctggcccttgtggttgggactaacagctggagagaacagttcattgaagctatcactgtcagtgctggggaagatgatgacgacgatgaatgtggggaagagaagctgccctcctgtttcgattacgtgatgcactttctgactgtgttctggaaggtcctgtttgccttcgtcccccctactgaatactggaatggctgggcgtgtttcattgtctccatcctcatgattggcctactgacagctttcattggagacctggcttcccactttggctgcaccattggcctgaaagattctgtgactgcagtcgtgttcgtcgcacttggaacatcagtgccagacacatttgccagcaaagtggcagccacccaggaccagtatgcagacgcctccataggtaacgtcacgggcagcaacgcggtgaatgtcttcctgggaatcggtgtggcctggtccatcgctgccatctaccacgcagccaatggggaacagttcaaagtgtcccctggcacactagctttctctgtcactctcttcaccatttttgctttcatcaatgtgggggtgctgctgtatcggcggaggccagaaatcggaggtgagctgggtgggccccggactgccaagctcctcacatcctgcctctttgtgctcctatggctcttgtacattttcttctcctccctggaggcctactgccacataaaaggcttctaaaggaactatcagatatagtaaatttatatatatacatatatatacataaaaattatgtataatggacagaggaaactgacatttgtcatgttcacttacctgctgatggaatccagcttcaagagcatactctgtactagggccgaagtaaaaaaccatcacctcccattcccaggggcatcatcatgttcaacaaggcatggaggcagggccatctttgcagctcagtctagaagggctgcactctctccaggttgataaatccttaaggctttgatttgttttgtttttggttttgttttcagtggagctggggaggtagttaatgtttggctttatttttgttattttgttttgttttgtttttttgggagagtcagggttgttgcttttctttgtggaaagtgaaaccatccaaatgtaaatgggttttggtaaaaatttaaatcattagtattccccctcacctcccccaatcactttaaaacttattttggattaagaaaaaatctgggcatggaa

SEQ ID NO: 29397 - DNA, 2898 bp, Homo sapiens
  source 1..2898: mol_type = unassigned DNA
atgtacaacatgcggcgattaagtctttcacccaccttttcaatgggatttcatctgttagttactgtgagtctcttattttcccatgtggaccatgtaattgctgagacagaaatggaaggagaaggaaatgaaactggtgaatgtactggatcatattactgtaagaaaggggtgattttgcccatttgggaaccccaagacccttcttttggggacaaaattgctagagctactgtgtattttgtggccatggtctacatgtttcttggagtctctatcatagctgatcggttcatgtcctctatagaagtcatcacatctcaagaaaaagaaataaccataaagaaacccaatggagagaccaccaagacaactgtgaggatctggaatgaaacagtttctaacctgaccttgatggccctgggatcttctgctcctgagattctcctttcagtaattgaagtgtgtggccataacttcactgcaggagacctcggtcctagcaccatcgtgggaagtgctgcattcaatatgttcatcattattgcactctgtgtttatgtggtgcctgacggagagacaaggaagattaagcatttgcgtgtcttctttgtgacagcagcctggagcatctttgcctacacctggctttacattattttgtctgtcatatctcctggtgttgtggaggtctgggaaggtttgcttactttcttcttctttcccatctgtgttgtgttcgcttgggtagcggataggagacttctgttttacaagtatgtctacaagaggtatcgagctggcaagcagagggggatgattattgaacatgaaggagacaggccatcttctaagactgaaattgaaatggacgggaaagtggtcaattctcatgttgaaaatttcttagatggtgctctggttctggaggtggatgagagggaccaagatgatgaagaagctaggcgagaaatggctaggattctgaaggaacttaagcagaagcatccagataaagaaatagagcaattaatagaattagctaactaccaagtcctaagtcagcagcaaaaaagtagagcattttatcgcattcaagctactcgcctcatgactggagctggcaacattttaaagaggcatgcagctgaccaagcaaggaaggctgtcagcatgcacgaggtcaacactgaagtgactgaaaatgaccctgttagtaagatcttctttgaacaagggacatatcagtgtctggagaactgtggtactgtggcccttaccattatccgcagaggtggtgatttgactaacactgtgtttgttgacttcagaacagaggatggcacagcaaatgctgggtctgattatgaatttactgaaggaactgtggtgtttaagcctggtgatacccagaaggaaatcagagtgggtatcatagatgatgatatctttgaggaggatgaaaatttccttgtgcatctcagcaatgtcaaagtatcttctgaagcttcagaagatggcatactggaagccaatcatgtttctacacttgcttgcctcggatctccctccactgccactgtaactatttttgatgatgaccacgcaggcatttttacttttgaggaacctgtgactcatgtgagtgagagcattggcatcatggaggtgaaagtattgagaacatctggagctcgaggaaatgttatcgttccatataaaaccatcgaagggactgccagaggtggaggggaggattttgaggacacttgtggagagctcgaattccagaatgatgaaattgtgaagatcattaccattagaatatttgaccgtgaggaatatgagaaagagtgcagtttctcccttgtgcttgaggaaccaaaatggataagaagaggaatgaaaggtggcttcacaataacaggaaaatacctgtttggccaacctgtcttcaggaaggttcatgctagagaacatccgattctctctactgtaatcaccattgcagacgaatatgatgacaagcagccactgaccagcaaagaggaagaggagaggcgcattgcagaaatggggcgccccatcctgggagagcacaccaagttggaagtgatcattgaagaatcctatgaattcaagagtactgtggacaaactcattaagaagacaaacctggcccttgtggttgggactaacagctggagagaacagttcattgaagctatcactgtcagtgctggggaagatgatgacgacgatgaatgtggggaagagaagctgccctcctgtttcgattacgtgatgcactttctgactgtgttctggaaggtcctgtttgccttcgtcccccctactgaatactggaatggctgggcgtgtttcattgtctccatcctcatgattggcctactgacagctttcattggagacctggcttcccactttggctgcaccattggcctgaaagattctgtgactgcagtcgtgttcgtcgcacttggaacatcagtgccagacacatttgccagcaaagtggcagccacccaggaccagtatgcagacgcctccataggtaacgtcacgggcagcaacgcggtgaatgtcttcctgggaatcggtgtggcctggtccatcgctgccatctaccacgcagccaatggggaacagttcaaagtgtcccctggcacactagctttctctgtcactctcttcaccatttttgctttcatcaatgtgggggtgctgctgtatcggcggaggccagaaatcggaggtgagctgggtgggccccggactgccaagctcctcacatcctgcctctttgtgctcctatggctcttgtacattttcttctcctccctggaggcctactgccacataaaaggcttctaa

SEQ ID NO: 29398 - DNA, 583 bp, Homo sapiens
  source 1..583: mol_type = unassigned DNA
agcgacctcttcctgatcgggagctgtttaaaaggagggagtgcgccgtattttctactagcgtggaggaacggaggaagaatccattcacactccccaaaccagggatgtcatggtctagaacacctatgctgaagtacaaggctgagcaagaaagatcactccactgcaactgagcaaagtgctgaaggagttgaaaggaagaagagaacattggacgtggtttcacggaggaggaagcattttaatttattcagaaagagtgaaaaggattttgaaagcaaataaggctagccacttttgaaacatgtcaaagagccccagcttatttacgacaagtaggttgtgacagttggaagtgtcatgtacaacatgcggcgattaagtctttcacccaccttttcaatgggatttcatctgttagttactgtgagtctcttattttcccatgtggaccatgtaattgctgagacagaaatggaaggagaaggaaatgaaactggtgaatgtactggatcatattactgtaagaaaggggtgattttgcccatttgggaaccccaagacccttcttttggggaca

SEQ ID NO: 29399 - DNA, 561 bp, Homo sapiens
  source 1..561: mol_type = unassigned DNA
ctttctggtaaatttagagaaggcatcatactgggatcttttttcacatccagcccatgcggactgagcagccaaagcttgacagaggtccctccttctcccaccttccccaagtagctgctcctgacccccccacacaccttggcaaacgacaccagtggccgatagcaactggtgttttaaaaatactaatttggagccccatttgagacctacaacgggagagtctgcatcagattcggcctcagattctacagcatctgactacattcccagtaggttgtgacagttggaagtgtcatgtacaacatgcggcgattaagtctttcacccaccttttcaatgggatttcatctgttagttactgtgagtctcttattttcccatgtggaccatgtaattgctgagacagaaatggaaggagaaggaaatgaaactggtgaatgtactggatcatattactgtaagaaaggggtgattttgcccatttgggaaccccaagacccttcttttggggacaaaattgctagagctactgtgtattttgtggccatggtctac

SEQ ID NO: 29400 - DNA, 563 bp, Homo sapiens
  source 1..563: mol_type = unassigned DNA
atcagtcgtggtgactgccctggttgcactgtaagtatggggggacgtctccacgaaaaaaaactaactttctgccttgtgctctgcaggtccctccttctcccaccttccccaagtagctgctcctgacccccccacacaccttggcaaacgacaccagtggccgatagcaactggtgttttaaaaatactaatttggagccccatttgagacctacaacgggagagtctgcatcagattcggcctcagattctacagcatctgactacattcccagtaggttgtgacagttggaagtgtcatgtacaacatgcggcgattaagtctttcacccaccttttcaatgggatttcatctgttagttactgtgagtctcttattttcccatgtggaccatgtaattgctgagacagaaatggaaggagaaggaaatgaaactggtgaatgtactggatcatattactgtaagaaaggggtgattttgcccatttgggaaccccaagacccttcttttggggacaaaattgctagagctactgtgtattttgtggccatggtctac

SEQ ID NO: 29401 - DNA, 2883 bp, Homo sapiens
  source 1..2883: mol_type = unassigned DNA
atgtacaacatgcggcgattaagtctttcacccaccttttcaatgggatttcatctgttagttactgtgagtctcttattttcccatgtggaccatgtaattgctgagacagaaatggaaggagaaggaaatgaaactggtgaatgtactggatcatattactgtaagaaaggggtgattttgcccatttgggaaccccaagacccttcttttggggacaaaattgctagagctactgtgtattttgtggccatggtctacatgtttcttggagtctctatcatagctgatcggttcatgtcctctatagaagtcatcacatctcaagaaaaagaaataaccataaagaaacccaatggagagaccaccaagacaactgtgaggatctggaatgaaacagtttctaacctgaccttgatggccctgggatcttctgctcctgagattctcctttcagtaattgaagtgtgtggccataacttcactgcaggagacctcggtcctagcaccatcgtgggaagtgctgcattcaatatgttcatcattattgcactctgtgtttatgtggtgcctgacggagagacaaggaagattaagcatttgcgtgtcttctttgtgacagcagcctggagcatctttgcctacacctggctttacattattttgtctgtcatatctcctggtgttgtggaggtctgggaaggtttgcttactttcttcttctttcccatctgtgttgtgttcgcttgggtagcggataggagacttctgttttacaagtatgtctacaagaggtatcgagctggcaagcagagggggatgattattgaacatgaaggagacaggccatcttctaagactgaaattgaaatggacgggaaagtggtcaattctcatgttgaaaatttcttagatggtgctctggttctggaggtggatgagagggaccaagatgatgaagaagctaggcgagaaatggctaggattctgaaggaacttaagcagaagcatccagataaagaaatagagcaattaatagaattagctaactaccaagtcctaagtcagcagcaaaaaagtagagcattttatcgcattcaagctactcgcctcatgactggagctggcaacattttaaagaggcatgcagctgaccaagcaaggaaggctgtcagcatgcacgaggtcaacactgaagtgactgaaaatgaccctgttagtaagatcttctttgaacaagggacatatcagtgtctggagaactgtggtactgtggcccttaccattatccgcagaggtggtgatttgactaacactgtgtttgttgacttcagaacagaggatggcacagcaaatgctgggtctgattatgaatttactgaaggaactgtggtgtttaagcctggtgatacccagaaggaaatcagagtgggtatcatagatgatgatatctttgaggaggatgaaaatttccttgtgcatctcagcaatgtcaaagtatcttctgaagcttcagaagatggcatactggaagccaatcatgtttctacacttgcttgcctcggatctccctccactgccactgtaactatttttgatgatgaccacgcaggcatttttacttttgaggaacctgtgactcatgtgagtgagagcattggcatcatggaggtgaaagtattgagaacatctggagctcgaggaaatgttatcgttccatataaaaccatcgaagggactgccagaggtggaggggaggattttgaggacacttgtggagagctcgaattccagaatgatgaaattgtgaagatcattaccattagaatatttgaccgtgaggaatatgagaaagagtgcagtttctcccttgtgcttgaggaaccaaaatggataagaagaggaatgaaagaaggattctggttatctagccaacctgtcttcaggaaggttcatgctagagaacatccgattctctctactgtaatcaccattgcagacgaatatgatgacaagcagccactgaccagcaaagaggaagaggagaggcgcattgcagaaatggggcgccccatcctgggagagcacaccaagttggaagtgatcattgaagaatcctatgaattcaagagtactgtggacaaactcattaagaagacaaacctggcccttgtggttgggactaacagctggagagaacagttcattgaagctatcactgtcagtgctggggaagatgatgacgacgatgaatgtggggaagagaagctgccctcctgtttcgattacgtgatgcactttctgactgtgttctggaaggtcctgtttgccttcgtcccccctactgaatactggaatggctgggcgtgtttcattgtctccatcctcatgattggcctactgacagctttcattggagacctggcttcccactttggctgcaccattggcctgaaagattctgtgactgcagtcgtgttcgtcgcacttggaacatcagtgccagacacatttgccagcaaagtggcagccacccaggaccagtatgcagacgcctccataggtaacgtcacgggcagcaacgcggtgaatgtcttcctgggaatcggtgtggcctggtccatcgctgccatctaccacgcagccaatggggaacagttcaaagtgtcccctggcacactagctttctctgtcactctcttcaccatttttgctttcatcaatgtgggggtgctgctgtatcggcggaggccagaaatcggaggtgagctgggtgggccccggactgccaagctcctcacatcctgcctctttgtgctcctatggctcttgtacattttcttctcctccctggaggcctactgccacataaaaggcttctaa

SEQ ID NO: 29402 - DNA, 2814 bp, Homo sapiens
  source 1..2814: mol_type = unassigned DNA
atgtacaacatgcggcgattaagtctttcacccaccttttcaatgggatttcatctgttagttactgtgagtctcttattttcccatgtggaccatgtaattgctgagacagaaatggaaggagaaggaaatgaaactggtgaatgtactggatcatattactgtaagaaaggggtgattttgcccatttgggaaccccaagacccttcttttggggacaaaattgctagagctactgtgtattttgtggccatggtctacatgtttcttggagtctctatcatagctgatcggttcatgtcctctatagaagtcatcacatctcaagaaaaagaaataaccataaagaaacccaatggagagaccaccaagacaactgtgaggatctggaatgaaacagtttctaacctgaccttgatggccctgggatcttctgctcctgagattctcctttcagtaattgaagtgtgtggccataacttcactgcaggagacctcggtcctagcaccatcgtgggaagtgctgcattcaatatgttcatcattattgcactctgtgtttatgtggtgcctgacggagagacaaggaagattaagcatttgcgtgtcttctttgtgacagcagcctggagcatctttgcctacacctggctttacattattttgtctgtcatatctcctggtgttgtggaggtctgggaaggtttgcttactttcttcttctttcccatctgtgttgtgttcgcttgggtagcggataggagacttctgttttacaagtatgtctacaagaggtatcgagctggcaagcagagggggatgattattgaacatgaaggagacaggccatcttctaagactgaaattgaaatggacgggaaagtggtcaattctcatgttgaaaatttcttagatggtgctctggttctggaggtggatgagagggaccaagatgatgaagaagctaggcgagaaatggctaggattctgaaggaacttaagcagaagcatccagataaagaaatagagcaattaatagaattagctaactaccaagtcctaagtcagcagcaaaaaagtagagcattttatcgcattcaagctactcgcctcatgactggagctggcaacattttaaagaggcatgcagctgaccaagcaaggaaggctgtcagcatgcacgaggtcaacactgaagtgactgaaaatgaccctgttagtaagatcttctttgaacaagggacatatcagtgtctggagaactgtggtactgtggcccttaccattatccgcagaggtggtgatttgactaacactgtgtttgttgacttcagaacagaggatggcacagcaaatgctgggtctgattatgaatttactgaaggaactgtggtgtttaagcctggtgatacccagaaggaaatcagagtgggtatcatagatgatgatatctttgaggaggatgaaaatttccttgtgcatctcagcaatgtcaaagtatcttctgaagcttcagaagatggcatactggaagccaatcatgtttctacacttgcttgcctcggatctccctccactgccactgtaactatttttgatgatgaccacgcaggcatttttacttttgaggaacctgtgactcatgtgagtgagagcattggcatcatggaggtgaaagtattgagaacatctggagctcgaggaaatgttatcgttccatataaaaccatcgaagggactgccagaggtggaggggaggattttgaggacacttgtggagagctcgaattccagaatgatgaaattgtgaagatcattaccattagaatatttgaccgtgaggaatatgagaaagagtgcagtttctcccttgtgcttgaggaaccaaaatggataagaagaggaatgaaagaaggattctgtttcacagacgaatatgatgacaagcagccactgaccagcaaagaggaagaggagaggcgcattgcagaaatggggcgccccatcctgggagagcacaccaagttggaagtgatcattgaagaatcctatgaattcaagagtactgtggacaaactcattaagaagacaaacctggcccttgtggttgggactaacagctggagagaacagttcattgaagctatcactgtcagtgctggggaagatgatgacgacgatgaatgtggggaagagaagctgccctcctgtttcgattacgtgatgcactttctgactgtgttctggaaggtcctgtttgccttcgtcccccctactgaatactggaatggctgggcgtgtttcattgtctccatcctcatgattggcctactgacagctttcattggagacctggcttcccactttggctgcaccattggcctgaaagattctgtgactgcagtcgtgttcgtcgcacttggaacatcagtgccagacacatttgccagcaaagtggcagccacccaggaccagtatgcagacgcctccataggtaacgtcacgggcagcaacgcggtgaatgtcttcctgggaatcggtgtggcctggtccatcgctgccatctaccacgcagccaatggggaacagttcaaagtgtcccctggcacactagctttctctgtcactctcttcaccatttttgctttcatcaatgtgggggtgctgctgtatcggcggaggccagaaatcggaggtgagctgggtgggccccggactgccaagctcctcacatcctgcctctttgtgctcctatggctcttgtacattttcttctcctccctggaggcctactgccacataaaaggcttctaa

SEQ ID NO: 29403 - DNA, 4597 bp, Homo sapiens
  source 1..4597: mol_type = unassigned DNA
ctttctggtaaatttagagaaggcatcatactgggatcttttttcacatccagcccatgcggactgagcagccaaagcttgacagagtaggttgtgacagttggaagtgtcatgtacaacatgcggcgattaagtctttcacccaccttttcaatgggatttcatctgttagttactgtgagtctcttattttcccatgtggaccatgtaattgctgagacagaaatggaaggagaaggaaatgaaactggtgaatgtactggatcatattactgtaagaaaggggtgattttgcccatttgggaaccccaagacccttcttttggggacaaaattgctagagctactgtgtattttgtggccatggtctacatgtttcttggagtctctatcatagctgatcggttcatgtcctctatagaagtcatcacatctcaagaaaaagaaataaccataaagaaacccaatggagagaccaccaagacaactgtgaggatctggaatgaaacagtttctaacctgacctgatggccctgggatcttctgctcctgagattctcctttcagtaattgaagtgtgtggccataacttcactgcaggagacctcggtcctagcaccatcgtgggaagtgctgcattcaatatgttcatcattattgcactctgtgtttatgtggtgcctgacggagagacaaggaagattaagcatttgcgtgtcttctttgtgacagcagcctggagcatctttgcctacacctggctttacattattttgtctgtcatatctcctggtgttgtggaggtctgggaaggtttgcttactttcttcttctttcccatctgtgttgtgttcgcttgggtagcggataggagacttctgttttacaagtatgtctacaagaggtatcgagctggcaagcagagggggatgattattgaacatgaaggagacaggccatcttctaagactgaaattgaaatggacgggaaagtggtcaattctcatgttgaaaatttcttagatggtgctctggttctggaggtggatgagagggaccaagatgatgaagaagctaggcgagaaatggctaggattctgaaggaacttaagcagaagcatccagataaagaaatagagcaattaatagaattagctaactaccaagtcctaagtcagcagcaaaaaagtagagcattttatcgcattcaagctactcgcctcatgactggagctggcaacattttaaagaggcatgcagctgaccaagcaaggaaggctgtcagcatgcacgaggtcaacactgaagtgactgaaaatgaccctgttagtaagatcttctttgaacaagggacatatcagtgtctggagaactgtggtactgtggcccttaccattatccgcagaggtggtgatttgactaacactgtgtttgttgacttcagaacagaggatggcacagcaaatgctgggtctgattatgaatttactgaaggaactatgatatatattaaatttatatatatacatatatatacataaaaattatgtataatggacagaggaaactgacatttgtcatgttcacttacctgctgatggaatccagcttcaagagcatactctgtactagggccgaagtaaaaaaccatcacctcccattcccaggggcatcatcatgttcaacaaggcatggaggcagggccatctttgcagctcagtctagaagggctgcactctctccaggttgataaatccttaaggctttgatttgttttgtttttggttttgttttcagtggagctggggaggtagttaatgtttggctttatttttgttattttgttttgttttgtttttttgggagagtcagggttgttgcttttctttgtggaaagtgaaaccatccaaatgtaaatgggttttggtaaaaatttaaatcattagtattccccctcacctcccccaatcactttaaaacttattttggattaagaaaaaatctgggcatggaagaagaaagaagcatgtcttcatcgtattaccaaagttcatgcttatctccggaatgtgagtggaggtgaagctgcctccaagaagaagcataaaagtggaatggagccaggaaatccgatggttctagaaatagtctgatatttaaacatgtgatacctggcagtctcgtttaacaggtacaaggaaaacgtgcctagattcccaggaacgtgcaaaatcctttctttcttatctctttagctctggactgtgattggcaaggtccttcttccagcattcagcccagctaagcccccaggtgccccatcccaaccctgttcctcctgtccacctgccatcccctatgcaaacagtaagaataaccccattcaaaaagcacatcatcgttttccatttgcattaacatgtgtctcagtcccatgttgccgttgcttgggattgtctgtcagttttattttcaaaggcatccatggcttgcacaatcctgttccagtcatgactgaacatttgctccttcttcatgtgccgttcggaaatgttgttgtgatacctgttacacagtgcatggtgaaaaacaaataaaacaaaacaaagagtatctgtatatagtagagtatagtacatactgttctcccatttggcaatgttgattggacattgaagacataagtgagttttcttttcacctgagttgttacttttgtgctgttattgagtttgattaattactagggataaaaggagaaaatggattattgttcacggttctgcacattcatttctaagaagcaataactgtcatgtggggagaagttaaagctattgagaggatagcaggcaaactacaaagatcttcatggaaaattagccatgtggaacacatcagaggcctctaaaaatcacccattaattcaggaaggccaaggagaaaggccttatagagacgttgatatgttggatgtgcctaggctttcagagccaccctttccacaacacccctccctgcaaagtatttatttcacatctgcactgtctggcacagatggtagatagtgctggtttgttcattttatttttttacttaaaaggctattttgagccctgtttctttcactgtccagtctagtcctctttgattatatcagtagttgctgagtaagaaagaagccagggtgaccaacgggcctttaaaagtgttgtctcctctacttatgctgaaagagaaggcaattaaataagactagtacctcccaggaggattggactgggatatttttaaccctttaaaaagaatagctgtttctatgttaaaataccaaagaacatggataaacccaacattccaaagtagtgagtccactaatgagaaaaataatagaatgactttggtcacctctcggagacttctgtgtctataaggaatcccaggctggagacattcctagccctctgtattgattcaaaaatacttaataaattaaagctgttgagacttattttttcttctgtcactcagtaaccatgatccttcctcatttaataaacatttggtgactgaatgagtaattaaatgctggttacccacttaatgtgccaggtagtatgatactttctggggactaagccatgaacaaaacagtctagatccctgccctcagaagggttacagtttatgtgattactattttcatgagtaaaagtgaagaaagccatatggaaagatttttatcttgcaagaaaaaacaattatgaaactcttttaacataaacacactgaaactgtatcaaagcaattgtccaaattgtatttatacccaagaatttctttaactaagagagcataaggcatatgtttggaaaaccaccctctttatctttgaccgacttgcagataaatatatctctccattttaaaccaagaagggcaatcatgttggtgatccagatcactgagaaagcccagtgtatcccatcttttatctttgttggcaatggaacttttctatggcccacactttacaattctttgtcattctaacccatccttcccatccttattttttttttttttgagaattgctaaatggaaagctagcctagaagcaccaagtaaatatattcaaggaatataagttgtttaaacattagaaaaatttttgcactcattttttagctgtattaggaatgtcaataatcctgtagcaaattttcacagagaactttaagaaattcttgcattggtcgatttcaatttgaaagctttttggtttgtttgctttttaaattttcatgttctaggaaactatgattctggttgttcaggattgttattattatagttgtgtaaaattattttattttgtgtgtattgtgcacagcttggggggggggcgggaaatgcactaattgtgctcttccttataaatggtacatattactgacacagacaaataaagtttctaattgtttctgatttaatcactagtgatacagcatattctgtatgaaatgttttctcctttctcattgtcatctacttcattttttgttttcatgttttgaagaaataaaaaccaaaatgg

SEQ ID NO: 29404 - DNA, 6038 bp, Homo sapiens
  source 1..6038: mol_type = unassigned DNA
taggttgtgacagttggaagtgtcatgtacaacatgcggcgattaagtctttcacccaccttttcaatgggatttcatctgttagttactgtgagtctcttattttcccatgtggaccatgtaattgctgagacagaaatggaaggagaaggaaatgaaactggtgaatgtactggatcatattactgtaagaaaggggtgattttgcccatttgggaaccccaagacccttcttttggggacaaaattgctagagctactgtgtattttgtggccatggtctacatgtttcttggagtctctatcatagctgatcggttcatgtcctctatagaagtcatcacatctcaagaaaaagaaataaccataaagaaacccaatggagagaccaccaagacaactgtgaggatctggaatgaaacagtttctaacctgaccttgatggccctgggatcttctgctcctgagattctcctttcagtaattgaagtgtgtggccataacttcactgcaggagacctcggtcctagcaccatcgtgggaagtgctgcattcaatatgttcatcattattgcactctgtgtttatgtggtgcctgacggagagacaaggaagattaagcatttgcgtgtcttctttgtgacagcagcctggagcatctttgcctacacctggctttacattattttgtctgtcatatctcctggtgttgtggaggtctgggaaggtttgcttactttcttcttctttcccatctgtgttgtgttcgcttgggtagcggataggagacttctgttttacaagtatgtctacaagaggtatcgagctggcaagcagagggggatgattattgaacatgaaggagacaggccatcttctaagactgaaattgaaatggacgggaaagtggtcaattctcatgttgaaaatttcttagatggtgctctggttctggaggtggatgagagggaccaagatgatgaagaagctaggcgagaaatggctaggattctgaaggaacttaagcagaagcatccagataaagaaatagagcaattaatagaattagctaactaccaagtcctaagtcagcagcaaaaaagtagagcattttatcgcattcaagctactcgcctcatgactggagctggcaacattttaaagaggcatgcagctgaccaagcaaggaaggctgtcagcatgcacgaggtcaacactgaagtgactgaaaatgaccctgttagtaagatcttctttgaacaagggacatatcagtgtctggagaactgtggtactgtggcccttaccattatccgcagaggtggtgatttgactaacactgtgtttgttgacttcagaacagaggatggcacagcaaatgctgggtctgattatgaatttactgaaggaactgtggtgtttaagcctggtgatacccagaaggaaatcagagtgggtatcatagatgatgatatctttgaggaggatgaaaatttccttgtgcatctcagcaatgtcaaagtatcttctgaagcttcagaagatggcatactggaagccaatcatgtttctacacttgcttgcctcggatctccctccactgccactgtaactatttttgatgatgaccacgcaggcatttttacttttgaggaacctgtgactcatgtgagtgagagcattggcatcatggaggtgaaagtattgagaacatctggagctcgaggaaatgttatcgttccatataaaaccatcgaagggactgccagaggtggaggggaggattttgaggacacttgtggagagctcgaattccagaatgatgaaattgtcaaaacaatatcagtcaaggtaattgatgatgaggagtatgagaaaaacaagaccttcttccttgagattggagagccccgcctggtggagatgagtgagaagaaagccctgttattgaatgagcttggtggcttcacaataacaggccaacctgtcttcaggaaggttcatgctagagaacatccgattctctctactgtaatcaccattgcagacgaatatgatgacaagcagccactgaccagcaaagaggaagaggagaggcgcattgcagaaatggggcgccccatcctgggagagcacaccaagttggaagtgatcattgaagaatcctatgaattcaagagtactgtggacaaactcattaagaagacaaacctggcccttgtggttgggactaacagctggagagaacagttcattgaagctatcactgtcagtgctggggaagatgatgacgacgatgaatgtggggaagagaagctgccctcctgtttcgattacgtgatgcactttctgactgtgttctggaaggtcctgtttgccttcgtcccccctactgaatactggaatggctgggcgtgtttcattgtctccatcctcatgattggcctactgacagctttcattggagacctggcttcccactttggctgcaccattggcctgaaagattctgtgactgcagtcgtgttcgtcgcacttggaacatcagtgccagacacatttgccagcaaagtggcagccacccaggaccagtatgcagacgcctccataggtaacgtcacgggcagcaacgcggtgaatgtcttcctgggaatcggtgtggcctggtccatcgctgccatctaccacgcagccaatggggaacagttcaaagtgtcccctggcacactagctttctctgtcactctcttcaccatttttgctttcatcaatgtgggggtgctgctgtatcggcggaggccagaaatcggaggtgagctgggtgggccccggactgccaagctcctcacatcctgcctctttgtgctcctatggctcttgtacattttcttctcctccctggaggcctactgccacataaaaggcttctaaaggaactatcagatatagtaaatttatatatatacatatatatacataaaaattatgtataatggacagaggaaactgacatttgtcatgttcacttacctgctgatggaatccagcttcaagagcatactctgtactagggccgaagtaaaaaaccatcacctcccattcccaggggcatcatcatgttcaacaaggcatggaggcagggccatctttgcagctcagtctagaagggctgcactctctccaggttgataaatccttaaggctttgatttgttttgtttttggttttgttttcagtggagctggggaggtagttaatgtttggctttatttttgttattttgttttgttttgtttttttgggagagtcagggttgttgcttttctttgtggaaagtgaaaccatccaaatgtaaatgggttttggtaaaaatttaaatcattagtattccccctcacctcccccaatcactttaaaacttattttggattaagaaaaaatctgggcatggaagaagaaagaagcatgtcttcatcgtattaccaaagttcatgcttatctccggaatgtgagtggaggtgaagctgcctccaagaagaagcataaaagtggaatggagccaggaaatccgatggttctagaaatagtctgatatttaaacatgtgatacctggcagtctcgtttaacaggtacaaggaaaacgtgcctagattcccaggaacgtgcaaaatcctttctttcttatctctttagctctggactgtgattggcaaggtccttcttccagcattcagcccagctaagcccccaggtgccccatcccaaccctgttcctcctgtccacctgccatcccctatgcaaacagtaagaataaccccattcaaaaagcacatcatcgttttccatttgcattaacatgtgtctcagtcccatgttgccgttgcttgggattgtctgtcagttttattttcaaaggcatccatggcttgcacaatcctgttccagtcatgactgaacatttgctccttcttcatgtgccgttcggaaatgttgttgtgatacctgttacacagtgcatggtgaaaaacaaataaaacaaaacaaagagtatctgtatatagtagagtatagtacatactgttctcccatttggcaatgttgattggacattgaagacataagtgagttttcttttcacctgagttgttacttttgtgctgttattgagtttgattaattactagggataaaaggagaaaatggattattgttcacggttctgcacattcatttctaagaagcaataactgtcatgtggggagaagttaaagctattgagaggatagcaggcaaactacaaagatcttcatggaaaattagccatgtggaacacatcagaggcctctaaaaatcacccattaattcaggaaggccaaggagaaaggccttatagagacgttgatatgttggatgtgcctaggctttcagagccaccctttccacaacacccctccctgcaaagtatttatttcacatctgcactgtctggcacagatggtagatagtgctggtttgttcattttatttttttacttaaaaggctattttgagccctgtttctttcactgtccagtctagtcctctttgattatatcagtagttgctgagtaagaaagaagccagggtgaccaacgggcctttaaaagtgttgtctcctctacttatgctgaaagagaaggcaattaaataagactagtacctcccaggaggattggactgggatatttttaaccctttaaaaagaatagctgtttctatgttaaaataccaaagaacatggataaacccaacattccaaagtagtgagtccactaatgagaaaaataatagaatgactttggtcacctctcggagacttctgtgtctataaggaatcccaggctggagacattcctagccctctgtattgattcaaaaatacttaataaattaaagctgttgagacttattttttcttctgtcactcagtaaccatgatccttcctcatttaataaacatttggtgactgaatgagtaattaaatgctggttacccacttaatgtgccaggtagtatgatactttctggggactaagccatgaacaaaacagtctagatccctgccctcagaagggttacagtttatgtgattactattttcatgagtaaaagtgaagaaagccatatggaaagatttttatcttgcaagaaaaaacaattatgaaactcttttaacataaacacactgaaactgtatcaaagcaattgtccaaattgtatttatacccaagaatttctttaactaagagagcataaggcatatgtttggaaaaccaccctctttatctttgaccgacttgcagataaatatatctctccattttaaaccaagaagggcaatcatgttggtgatccagatcactgagaaagcccagtgtatcccatcttttatctttgttggcaatggaacttttctatggcccacactttacaattctttgtcattctaacccatccttcccatccttattttttttttttttgagaattgctaaatggaaagctagcctagaagcaccaagtaaatatattcaaggaatataagttgtttaaacattagaaaaatttttgcactcattttttagctgtattaggaatgtcaataatcctgtagcaaattttcacagagaactttaagaaattcttgcattggtcgatttcaatttgaaagctttttggtttgtttgctttttaaattttcatgttctaggaaactatgattctggttgttcaggattgttattattatagttgtgtaaaattattttattttgtgtgtattgtgcacagcttggggggggggcgggaaatgcactaattgtgctcttccttataaatggtacatattactgacacagacaaataaagtttctaattgtttctgatttaatcactagtgatacagcatattctgtatgaaatgttttctcctttctcattgtcatctacttcattttttgttttcatgttttgaagaaataaaaaccaaaatggta

SEQ ID NO: 29405 - DNA, 5111 bp, Homo sapiens
  source 1..5111: mol_type = unassigned DNA
accgccttccctctgcccgcctccgcctcctccccctctctccggctcctccccctccctcgctccctcgccgcctccccctcccccgtgtccctcccctctcctcttctcctccctctatcccctctccctcccctcctccccggctctccctctcagtctcaggcttttctctctctcaatctctctctctctttcgggcggagtcgcccaccactgccagcccagcgctggggggacctgctccaggctgtagccgcaggaccccaccaccccccatggctcccctggccttggtgggggtcacactcctcctggcggctcccccatgctccggggcagccaccccaaccccctccctgccgcctcccccggccaatgacagcgacaccagcacagggggctgccaggggtcctaccgctgccagccgggggtgctgctgcccgtgtgggagcccgacgacccgtcgctgggtgacaaggcggcacgggcagtggtgtactttgtggccatggtctacatgtttctgggagtgtccatcatcgccgaccgtttcatggcggccatcgaggtcatcacgtcaaaagagaaggagatcaccatcaccaaggccaacggtgagaccagcgtgggcaccgttcgcatctggaatgagacggtgtccaacctcacgctcatggccctgggctcctccgcacctgagatcctgctgtcagtcatcgaagtctgcggccacaacttccaggcgggtgagctgggcccaggcaccatcgtgggcagcgctgccttcaacatgtttgtggtcatcgccgtgtgcatctacgtcatcccagccggcgagagccgcaagatcaagcacctgagagtcttctttgtcactgcctcttggagcatcttcgcctatgtctggctttatctcatccttgctgttttttcccccggtgtggtccaggtgtgggaggcgctgctgaccctggtcttcttcccggtgtgcgtggtattcgcctggatggccgacaagcggctgctcttctacaagtacgtgtacaagcgctaccgcaccgacccacgcagcggcatcatcataggcgccgagggcgaccccccgaagagcatcgagctggacggcacgttcgtgggcgccgaggccccaggtgagctgggcggcctgggcccgggccccgccgaggcgcgcgagctggacgccagccgccgcgaggtcatccagatcctcaaggacctcaagcagaagcacccggacaaggatctggagcagctggtgggcatcgccaactactacgcgctgctgcaccagcagaagagccgcgccttctaccgcatccaggccacgcggctgatgaccggcgccgggaacgtgctgcgcagacacgcggcggacgcctcgcgcagggcggcgccggccgagggcgcgggcgaggacgaagacgacggcgccagccgcatcttcttcgagcctagcctctaccactgcctggagaactgcggctccgtgctgctgtccgtcacgtgccagggcggcgagggcaacagcaccttctacgtggactaccgcactgaggacggctctgccaaggcgggctccgactacgagtacagcgagggcacgctggtgttcaaaccaggcgagacgcagaaggagctgcgcatcggcatcatcgacgacgacatcttcgaggaggacgagcatttcttcgtgcggctgctgaacctgcgcgtgggcgacgcgcagggcatgttcgagccggacggcggcgggcggcccaaggggcggctggtggcgccgctgctggccaccgtcaccatcctggacgacgaccacgcaggcatcttctccttccaggaccgcctgctgcacgtgagcgagtgcatgggcaccgtggacgtgcgcgtcgtgcgcagctcgggcgcgcgcggcaccgtgcgccttccctaccgcacggtggacggcacggcgcgcggcggcggcgtgcactacgaggacgcgtgcggagagctggagtttggcgacgacgagaccatgaaaactcttcaggtgaagatagttgatgacgaggaatatgagaaaaaggataatttcttcattgagctgggccagccccagtggcttaagcgagggatttcagctctgctactcaatcaaggggatggggacaggaagctaacagccgaggaggaggaggctcggaggatagcagagatgggcaagccagttcttggggagaactgccggctggaggtcatcatcgaggagtcatatgattttaagaacacggtggataaactcatcaagaaaacgaacttggccttggtaattgggacccattcatggagggagcagtttttagaggcaattacggtgagcgcaggggacgaggaggaggaggaggacgggtcccgggaggagcggctgccgtcgtgctttgactacgtgatgcacttcctgacggtgttctggaaggtgctcttcgcctgtgtgccccccaccgagtactgccacggctgggcctgctttggtgtctccatcctggtcatcggcctgctcaccgccctcattggggacctcgcctcccacttcggctgcaccgttggcctcaaggactctgtcaatgctgttgtcttcgttgccctgggcacctccatccctgacacgttcgccagcaaggtggcggcgctgcaggaccagtgcgccgacgcgtccatcggcaacgtgaccggctccaacgcggtgaacgtgttccttggcctgggcgtcgcctggtctgtggccgccgtgtactgggcggtgcagggccgccccttcgaggtgcgcactggcacgctggccttctccgtcacgctcttcaccgtcttcgccttcgtgggcattgccgtgctgctgtaccggcgccggccgcacatcggcggcgagctgggcggcccgcgcggacccaagctcgccaccaccgcgctcttcctgggcctctggctcctgtacatcctcttcgccagcctggaggcgtactgccacatccggggcttctagggcctcgcgcagagactcgtccccaccgcccgcccggggctagggactcggctgcacctgctcttggaccctggtctccttttccccccagactcggcctcctctcctgggactcggcctcccttctccgccccctcccctggctttgattgccctgttctgtgtccccagtagctcagccttccctcttcctctcgggagcctccccggttcctcccctgcggtgaccccaactccagcccatcctgttggtgaccgtctatatccctggggaaatttccaccccagtcccctccccagggaaccacccccagtaaccatcctggggagtttaaggtctctctccttggtcacccagcctggctttgcccccaaagtctcccttcccctagtgaccccccccccacttcaccccatgtcccagagcctcagaacccaccctccctgggggaccctcgaaggaggctgtcagaggccgtctcagctcccagcccttccccccagccctcagggagctccgctcagccccggcggggaggagcgggtgggtgtgcgcgcaaggaggccgcacaccgttccttccaatccctccactcgggttcttgggaggacactcattctccaggctcggagacgaggggagaagtttggggtttcagtcccagggcttagccggaggaagcacattttgaacctgcaacttcagacattccagctcccccactcgccctccactacctctgagagcccagccacgccttggagggaggggcttgtgtgtgtatatagtgtgtttgggggaggggggacgcgggagggtgcatgtcttgggaaaagggggtgacagacaacttttgagagggcagcagactccctcagccatgagaaccagctttggggaggaggccgggaatcaaagcgagtccagttgatctcccctgacaatctggaaggttccttttgccctcagtgccagccaatccgggcaggaccctcgaagaggagaccgagggtcccagaggaccaatgctacaagccagcaaatgctgccacatctctgcctgatggggggtggggatgggtggggggatgggactgggccaagggatctgggtgggcatttttaactttggaggccttccatctgtcggtaggccatctgcattttcttactgttgatgtttcctgcccaaaggacacatttgggcagtgccacccactccttgggcccctaggatgacccaactacccccataactttctgcttcccacaggttttcagcattctatcgtcctgttgtgctcagccccaacatcccagacccgttacccactacccttctctcccccagctcatcatcagtcgctgtctcttttctgtgatttctgtaaaagttgccataaaactttgaaattctgcctgaaaaacagtcccgtgggaagctgggattcaggaggagggggctaataaggtctctgactgagatttgggcaactgttaaaccaagtaatctgggtttttgcggcccgcggtcgtctgcgggacacacccacatatagcagcagcgccggggtccagccgccaagctcttccactcgccacgcccccatcagtaatgagcttccactagccacgcccccatccgtcagcctagctcttccactagccacacccccatccatcagtcatgggcttccacaagccacgcacctccactctccatgcccccattcgtcagtcgtgggtttccactaaccacgcccccattcatcagccaagctcctccacttgctacgcccgcatccgtcaattacgggtttccactaaccacgcccccattcatcagcctagctcttccactaatcacacccccacttatcagtcgtgcttcagccacgccttcctgcttcagtcaggggcttccactagccacgcccccatgcatgagccacaaactgtttctctttatgggcatcctgggaacacaaaagagagacgttcatttgcctgagccaaagagctggggttgatggggtttcctaaataaagcaagtaattttctcaga

SEQ ID NO: 29406 - DNA, 5190 bp, Homo sapiens
  source 1..5190: mol_type = unassigned DNA
accgccttccctctgcccgcctccgcctcctccccctctctccggctcctccccctccctcgctccctcgccgcctccccctcccccgtgtccctcccctctcctcttctcctccctctatcccctctccctcccctcctccccggctctccctctcagtctcaggcttttctctctctcaatctctctctctctttcgggcggagtcgcccaccactgccagcccagcgctggggggacctgctccaggctgtagccgcaggaccccaccaccccccatggctcccctggccttggtgggggtcacactcctcctggcggctcccccatgctccggggcagccaccccaaccccctccctgccgcctcccccggccaatgacagcgacaccagcacagggggctgccaggggtcctaccgctgccagccgggggtgctgctgcccgtgtgggagcccgacgacccgtcgctgggtgacaaggcggcacgggcagtggtgtactttgtggccatggtctacatgtttctgggagtgtccatcatcgccgaccgtttcatggcggccatcgaggtcatcacgtcaaaagagaaggagatcaccatcaccaaggccaacggtgagaccagcgtgggcaccgttcgcatctggaatgagacggtgtccaacctcacgctcatggccctgggctcctccgcacctgagatcctgctgtcagtcatcgaagtctgcggccacaacttccaggcgggtgagctgggcccaggcaccatcgtgggcagcgctgccttcaacatgtttgtggtcatcgccgtgtgcatctacgtcatcccagccggcgagagccgcaagatcaagcacctgagagtcttctttgtcactgcctcttggagcatcttcgcctatgtctggctttatctcatccttgctgttttttcccccggtgtggtccaggtgtgggaggcgctgctgaccctggtcttcttcccggtgtgcgtggtattcgcctggatggccgacaagcggctgctcttctacaagtacgtgtacaagcgctaccgcaccgacccacgcagcggcatcatcataggcgccgagggcgaccccccgaagagcatcgagctggacggcacgttcgtgggcgccgaggccccaggtgagctgggcggcctgggcccgggccccgccgaggcgcgcgagctggacgccagccgccgcgaggtcatccagatcctcaaggacctcaagcagaagcacccggacaaggatctggagcagctggtgggcatcgccaactactacgcgctgctgcaccagcagaagagccgcgccttctaccgcatccaggccacgcggctgatgaccggcgccgggaacgtgctgcgcagacacgcggcggacgcctcgcgcagggcggcgccggccgagggcgcgggcgaggacgaagacgacggcgccagccgcatcttcttcgagcctagcctctaccactgcctggagaactgcggctccgtgctgctgtccgtcacgtgccagggcggcgagggcaacagcaccttctacgtggactaccgcactgaggacggctctgccaaggcgggctccgactacgagtacagcgagggcacgctggtgttcaaaccaggcgagacgcagaaggagctgcgcatcggcatcatcgacgacgacatcttcgaggaggacgagcatttcttcgtgcggctgctgaacctgcgcgtgggcgacgcgcagggcatgttcgagccggacggcggcgggcggcccaaggggcggctggtggcgccgctgctggccaccgtcaccatcctggacgacgaccacgcaggcatcttctccttccaggaccgcctgctgcacgtgagcgagtgcatgggcaccgtggacgtgcgcgtcgtgcgcagctcgggcgcgcgcggcaccgtgcgccttccctaccgcacggtggacggcacggcgcgcggcggcggcgtgcactacgaggacgcgtgcggagagctggagtttggcgacgacgagaccatgaaaactcttcaggtgaagatagttgatgacgaggaatatgagaaaaaggataatttcttcattgagctgggccagccccagtggcttaagcgagggatttcagctctgctactcaatcaaggggatggggacaggaagctaacagccgaggaggaggaggctcggaggatagcagagatgggcaagccagttcttggggagaactgccggctggaggtcatcatcgaggagtcatatgattttaagaacacggtggataaactcatcaagaaaacgaacttggccttggtaattgggacccattcatggagggagcagtttttagaggcaattacggtgagcgcaggggacgaggaggaggaggaggacgggtcccgggaggagcggctgccgtcgtgctttgactacgtgatgcacttcctgacggtgttctggaaggtgctcttcgcctgtgtgccccccaccgagtactgccacggctgggcctgctttggtgtctccatcctggtcatcggcctgctcaccgccctcattggggacctcgcctcccacttcggctgcaccgttggcctcaaggactctgtcaatgctgttgtcttcgttgccctgggcacctccatccctggtaacaccctgggagactttggtggggtaggatctcagatgagccaggcaggggcaacacaggatcctgccaaaatgagacacgttcgccagcaaggtggcggcgctgcaggaccagtgcgccgacgcgtccatcggcaacgtgaccggctccaacgcggtgaacgtgttccttggcctgggcgtcgcctggtctgtggccgccgtgtactgggcggtgcagggccgccccttcgaggtgcgcactggcacgctggccttctccgtcacgctcttcaccgtcttcgccttcgtgggcattgccgtgctgctgtaccggcgccggccgcacatcggcggcgagctgggcggcccgcgcggacccaagctcgccaccaccgcgctcttcctgggcctctggctcctgtacatcctcttcgccagcctggaggcgtactgccacatccggggcttctagggcctcgcgcagagactcgtccccaccgcccgcccggggctagggactcggctgcacctgctcttggaccctggtctccttttccccccagactcggcctcctctcctgggactcggcctcccttctccgccccctcccctggctttgattgccctgttctgtgtccccagtagctcagccttccctcttcctctcgggagcctccccggttcctcccctgcggtgaccccaactccagcccatcctgttggtgaccgtctatatccctggggaaatttccaccccagtcccctccccagggaaccacccccagtaaccatcctggggagtttaaggtctctctccttggtcacccagcctggctttgcccccaaagtctcccttcccctagtgaccccccccccacttcaccccatgtcccagagcctcagaacccaccctccctgggggaccctcgaaggaggctgtcagaggccgtctcagctcccagcccttccccccagccctcagggagctccgctcagccccggcggggaggagcgggtgggtgtgcgcgcaaggaggccgcacaccgttccttccaatccctccactcgggttcttgggaggacactcattctccaggctcggagacgaggggagaagtttggggtttcagtcccagggcttagccggaggaagcacattttgaacctgcaacttcagacattccagctcccccactcgccctccactacctctgagagcccagccacgccttggagggaggggcttgtgtgtgtatatagtgtgtttgggggaggggggacgcgggagggtgcatgtcttgggaaaagggggtgacagacaacttttgagagggcagcagactccctcagccatgagaaccagctttggggaggaggccgggaatcaaagcgagtccagttgatctcccctgacaatctggaaggttccttttgccctcagtgccagccaatccgggcaggaccctcgaagaggagaccgagggtcccagaggaccaatgctacaagccagcaaatgctgccacatctctgcctgatggggggtggggatgggtggggggatgggactgggccaagggatctgggtgggcatttttaactttggaggccttccatctgtcggtaggccatctgcattttcttactgttgatgtttcctgcccaaaggacacatttgggcagtgccacccactccttgggcccctaggatgacccaactacccccataactttctgcttcccacaggttttcagcattctatcgtcctgttgtgctcagccccaacatcccagacccgttacccactacccttctctcccccagctcatcatcagtcgctgtctcttttctgtgatttctgtaaaagttgccataaaactttgaaattctgcctgaaaaacagtcccgtgggaagctgggattcaggaggagggggctaataaggtctctgactgagatttgggcaactgttaaaccaagtaatctgggtttttgcggcccgcggtcgtctgcgggacacacccacatatagcagcagcgccggggtccagccgccaagctcttccactcgccacgcccccatcagtaatgagcttccactagccacgcccccatccgtcagcctagctcttccactagccacacccccatccatcagtcatgggcttccacaagccacgcacctccactctccatgcccccattcgtcagtcgtgggtttccactaaccacgcccccattcatcagccaagctcctccacttgctacgcccgcatccgtcaattacgggtttccactaaccacgcccccattcatcagcctagctcttccactaatcacacccccacttatcagtcgtgcttcagccacgccttcctgcttcagtcaggggcttccactagccacgcccccatgcatgagccacaaactgtttctctttatgggcatcctgggaacacaaaagagagacgttcatttgcctgagccaaagagctggggttgatggggtttcctaaataaagcaagtaattttctcaga

SEQ ID NO: 29407 - DNA, 1606 bp, Homo sapiens
  source 1..1606: mol_type = unassigned DNA
ctctctctttcgggcggagtcgcccaccactgccagcccagcgctggggggacctgctccaggctgtagccgcaggaccgcctgctgcacgtgagcgagtgcatgggcaccgtggacgtgcgcgtcgtgcgcagctcgggcgcgcgcggcaccgtgcgccttccctaccgcacggtggacggcacggcgcgcggcggcggcgtgcactacgaggacgcgtgcggagagctggagtttggcgacgacgagaccatgaaaactcttcaggtgaagatagttgatgacgaggaatatgagaaaaaggataatttcttcattgagctgggccagccccagtggcttaagcgagggatttcagctctgctactcaatcaaggggatggggacaggaagctaacagccgaggaggaggaggctcggaggatagcagagatgggcaagccagttcttggggagaactgccggctggaggtcatcatcgaggagtcatatgattttaagaacacggtggataaactcatcaagaaaacgaacttggccttggtaattgggacccattcatggagggagcagtttttagaggcaattacggtgagcgcaggggacgaggaggaggaggaggacgggtcccgggaggagcggctgccgtcgtgctttgactacgtgatgcacttcctgacggtgttctggaaggtgctcttcgcctgtgtgccccccaccgagtactgccacggctgggcctgctttggtgtctccatcctggtcatcggcctgctcaccgccctcattggggacctcgcctcccacttcggctgcaccgttggcctcaaggactctgtcaatgctgttgtcttcgttgccctgggcacctccatccctgacacgttcgccagcaaggtggcggcgctgcaggaccagtgcgccgacgcgtccatcggcaacgtgaccggctccaacgcggtgaacgtgttccttggcctgggcgtcgcctggtctgtggccgccgtgtactgggcggtgcagggccgccccttcgaggtgcgcactggcacgctggccttctccgtcacgctcttcaccgtcttcgccttcgtgggcattgccgtgctgctgtaccggcgccggccgcacatcggcggcgagctgggcggcccgcgcggacccaagctcgccaccaccgcgctcttcctgggcctctggctcctgtacatcctcttcgccagcctggaggcgtactgccacatccggggcttctagggcctcgcgcagagactcgtccccaccgcccgcccggggctagggactcggctgcacctgctcttggaccctggtctccttttccccccagactcggcctcctctcctgggactcggcctcccttctccgccccctcccctggctttgattgccctgttctgtgtccccagtagctcagccttccctcttcctctcgggagcctccccggttcctcccctgcggtgaccccaactccagcccatcctgttggtgaccgtctatatccctggggaaatttccaccccagtcccctccccagggaaccacccccagtaaccatcctggggagtttaaggtctctctccttg

SEQ ID NO: 29408 - DNA, 2445 bp, Homo sapiens
  source 1..2445: mol_type = unassigned DNA
tcaatctctctctctctttcgggcggagtcgcccaccactgccagcccagcgctggggggacctgctccaggctgtagccgcaggtgtgggaggcgctgctgaccctggtcttcttcccggtgtgcgtggtattcgcctggatggccgacaagcggctgctcttctacaagtacgtgtacaagcgctaccgcaccgacccacgcagcggcatcatcataggcgccgagggcgaccccccgaagagcatcgagctggacggcacgttcgtgggcgccgaggccccaggtgagctgggcggcctgggcccgggccccgccgaggcgcgcgagctggacgccagccgccgcgaggtcatccagatcctcaaggacctcaagcagaagcacccggacaaggatctggagcagctggtgggcatcgccaactactacgcgctgctgcaccagcagaagagccgcgccttctaccgcatccaggccacgcggctgatgaccggcgccgggaacgtgctgcgcagacacgcggcggacgcctcgcgcagggcggcgccggccgagggcgcgggcgaggacgaagacgacggcgccagccgcatcttcttcgagcctagcctctaccactgcctggagaactgcggctccgtgctgctgtccgtcacgtgccagggcggcgagggcaacagcaccttctacgtggactaccgcactgaggacggctctgccaaggcgggctccgactacgagtacagcgagggcacgctggtgttcaaaccaggcgagacgcagaaggagctgcgcatcggcatcatcgacgacgacatcttcgaggaggacgagcatttcttcgtgcggctgctgaacctgcgcgtgggcgacgcgcagggcatgttcgagccggacggcggcgggcggcccaaggggcggctggtggcgccgctgctggccaccgtcaccatcctggacgacgaccacgcaggcatcttctccttccaggaccgcctgctgcacgtgagcgagtgcatgggcaccgtggacgtgcgcgtcgtgcgcagctcgggcgcgcgcggcaccgtgcgccttccctaccgcacggtggacggcacggcgcgcggcggcggcgtgcactacgaggacgcgtgcggagagctggagtttggcgacgacgagaccatgaaaactcttcaggtgaagatagttgatgacgaggaatatgagaaaaaggataatttcttcattgagctgggccagccccagtggcttaagcgagggatttcagctctgctactcaatcaaggggatggggacaggaagctaacagccgaggaggaggaggctcggaggatagcagagatgggcaagccagttcttggggagaactgccggctggaggtcatcatcgaggagtcatatgattttaagaacacggtggataaactcatcaagaaaacgaacttggccttggtaattgggacccattcatggagggagcagtttttagaggcaattacggtgagcgcaggggacgaggaggaggaggaggacgggtcccgggaggagcggctgccgtcgtgctttgactacgtgatgcacttcctgacggtgttctggaaggtgctcttcgcctgtgtgccccccaccgagtactgccacggctgggcctgctttggtgtctccatcctggtcatcggcctgctcaccgccctcattggggacctcgcctcccacttcggctgcaccgttggcctcaaggactctgtcaatgctgttgtcttcgttgccctgggcacctccatccctgacacgttcgccagcaaggtggcggcgctgcaggaccagtgcgccgacgcgtccatcggcaacgtgaccggctccaacgcggtgaacgtgttccttggcctgggcgtcgcctggtctgtggccgccgtgtactgggcggtgcagggccgccccttcgaggtgcgcactggcacgctggccttctccgtcacgctcttcaccgtcttcgccttcgtgggcattgccgtgctgctgtaccggcgccggccgcacatcggcggcgagctgggcggcccgcgcggacccaagctcgccaccaccgcgctcttcctgggcctctggctcctgtacatcctcttcgccagcctggaggcgtactgccacatccggggcttctagggcctcgcgcagagactcgtccccaccgcccgcccggggctagggactcggctgcacctgctcttggaccctggtctccttttccccccagactcggcctcctctcctgggactcggcctcccttctccgccccctcccctggctttgattgccctgttctgtgtccccagtagctcagccttccctcttcctctcgggagcctccccggttcctcccctgcggtgaccccaactccagcccatcctgttggtgaccgtctatatccctg

SEQ ID NO: 29409 - DNA, 4516 bp, Homo sapiens
  source 1..4516: mol_type = unassigned DNA
cggcgcgcctggacccctgcccctctctgggtggagaagctcccggccgcttcccggtttcactccttctcagcctgggctcccagccccctctctccttttcctggactggctctcacccccttcggtccccttcctttagctcaggctccctaccccttcctttagcccacagcccagagtcccagctcctcagtcactttcctcagccaaaggtcccagccttccttcttcctttcctttgcactatccctatcctgccccttcctctatccctagggctcagtttcccacatccgtcctcccccttcccaggcccggagttccagaccttttggtctcctttcgtggtcgttcctgggtccttgccccctttccccactttggagttccagattgcaaacccagcctccctccacccccagaaaattgcttccatggaaatgcctctctaaaacatgaacttttcctagagactacgccagtctctcttcccacttgctgaccctttgctacctatgtgcccggttttactctcatttgggtaaggtcgaggctggctctggaagcagcaccatggttctgcggtctggcatctgtggcctctctccacatcggatcttcccttccttactcgtggtggttgctttggtggggctgctgcctgttctcaggagccatggcctccagctcagcccaactgccagcaccattcgaagctcagagccaccacgagaacgctcgattggggatgtcaccaccgctccaccggaggtcaccccagagagccgccctgttaatcattccgtcactgatcatggcatgaagccgcgcaaggcctttccagtcctgggcatcgactacacacacgtgcgcacccccttcgagatctccctctggatccttctggcctgcctcatgaagataggtttccatgtgatccccactatctcaagcatcgtcccggagagctgcctgctgatcgtggtggggctgctggtggggggcctgatcaagggtgtaggcgagacaccccccttcctgcagtccgacgtcttcttcctcttcctgctgccgcccatcatcctggatgcgggctacttcctgccactgcggcagttcacagaaaacctgggcaccatcctgatctttgccgtggtgggcacgctgtggaacgccttcttcctgggcggcctcatgtacgccgtgtgcctggtgggcggtgagcagatcaacaacatcggcctcctggacaacctgctcttcggcagcatcatctcggccgtggaccccgtggcggttctggctgtctttgaggaaattcacatcaatgagctgctgcacatccttgtttttggggagtccttgctcaatgacgccgtcactgtggtcctgtatcacctctttgaggagtttgccaactacgaacacgtgggcatcgtggacatcttcctcggcttcctgagcttcttcgtggtggccctgggcggggtgcttgtgggcgtggtctacggggtcatcgcagccttcacctcccgatttacctcccacatccgggtcatcgagccgctcttcgtcttcctctacagctacatggcctacttgtcagccgagctcttccacctgtcaggcatcatggcgctcatagcctcaggagtggtgatgcgcccctatgtggaggccaacatctcccacaagtcccacaccaccatcaaatacttcctgaagatgtggagcagcgtcagcgagaccctcatcttcatcttcctcggcgtctccacggtggccggctcccaccactggaactggaccttcgtcatcagcaccctgctcttctgcctcatcgcccgcgtgctgggggtgctgggcctgacctggttcatcaacaagttccgtatcgtgaagctgacccccaaggaccagttcatcatcgcctatgggggcctgcgaggggccatcgccttctctctgggctacctcctggacaagaagcacttccccatgtgtgacctgttcctcactgccatcatcactgtcatcttcttcaccgtctttgtgcagggcatgaccattcggcccctggtagacctgttggctgtgaagaaaaagcaagagacgaagcgctccatcaacgaagagatccacacacagttcctggaccaccttctgacaggcatcgaagacatctgtggccactacggtcaccaccactggaaggacaagctcaaccggtttaataagaaatatgtgaagaagtgtctgatagctggcgagcgctccaaggagccccagctcattgccttctaccacaagatggagatgaagcaggccatcgagctggtggagagcgggggcatgggcaagatcccctctgccgtctccaccgtctccatgcagaacatccaccccaagtccctgccttccgagcgcatcctgccagcactgtccaaggacaaggaggaggagatccgcaaaatcctgaggaacaacttgcagaagaccaggcagcggctgcggtcctacaacagacacacgctggtggcagacccctacgaggaagcctggaaccagatgctgctccggaggcagaaggcccggcagctggagcagaagatcaacaactacctgacggtgccagcccacaagctggactcacccaccatgtctcgggcccgcatcggctcagacccactggcctatgagccgaaggaggacctgcctgtcatcaccatcgacccggcttccccgcagtcacccgagtctgtggacctggtgaatgaagagctgaagggcaaagtcttagggttgagccgggatcctgcaaaggtggctgaggaggacgaggacgacgatgggggcatcatgatgcggagcaaggagacttcgtccccaggaaccgacgatgtcttcacccccgcgcccagtgacagccccagctcccagaggatacagcgctgcctcagtgacccaggcccacaccctgagcctggggagggagaaccgttcttccccaaggggcagtaacaccagggccagcaggcagcgcctgtcccctcacagactcttccaccagagcaggggctgctgggggctccccttgcccttcctgacccggattggccctgcccctccccctaccgcatggcagctgggcccacagcccccaccccagcacagctcctcccctgccgcctcccgggaagcatcctccccaccagagctgcctccccaatccatttggcagaactgctggggctggtgaggccggccctgcccctccctagatccaggcttctcccggacctggactagggcctcggaggctcctccctctgcctcatcctcctcctcattcagaccaatcttagtttctaaccaaagagtctctggctcagctgtggtcccacccaggaagggagggagctgaggcctcccttgagtaggccctgctttatcaggggacaaaccaggggtaccaggcacatggctgggggagggactgctgacccaccaaggtctcacactcctcctgccagctctgtcaccctggccaccacccaacctgtccttactcagagctgcgggctgagggcatctctgagtgtctctgcctggagcaggggtggtttctacggtgacagtgacgtgactcagagcttttcgaactgtgctcccacggggaccactgggcccctcaggggaagctgctaggggaaggactggccgtggctccagaatgtgctgcctttttaagttttgtttgttcacactcctatatatgattgtttgcacagagggcgctcctgtttttaaaacattttgaaaacccctggctgaacagtgctctgcctctaactccctcctcacactccagaattacccttcctcatctgtgcctgtctgtccaacccctcccccacgtctctctgcctgctgggctcttaactgttgctcgaagactgtgacatcagaagtaactcccactcctaatcaagagtctctccagcctcacagatgctggcctcttggcacctgcctagctcttgggcctgacctccagtcctgctggcctgctcttacttcccccaccctgggtttggcccctggaacctttcccttgtgtgtaccacaccctgcctgctgtggagcccattgtggaggcggtgggggggagaaggcctcccctgaggatcccctgtcccctggggctggtggattgggcagaatcctgggcccccagagacctttgcccacacacactccttccccttgtccctggggcactcccccaggattgtgcaatagtcagagtgtccctttttgcaggggactgggccatgggtcctcggcccatctgtccatcctcctctccatgcaagtgctgtttgggcaggagtcaccatgcaagggtgacatcgacaaccacgtaccaagccaccgcagctgctgccactctgctgcctgtacagaagaaactgaatctttttcatattctaataaatcaatgtgagttttt

SEQ ID NO: 29410 - DNA, 696 bp, Homo sapiens
  source 1..696: mol_type = unassigned DNA
atctgacttaggcttttaaagggatccttctggctgctttgttgaaacaataatctgggtggggaaaatggcactgcttggaccagagtgggcaatggaggtggtcagaaatggatggattctggaaatattttgaagattgaattgacactatttgtggaggattgatatgacagaaaggagccaaggatgactcaagtttttggccagagattattcgaaagcccttatgagactgcagatgtggacgtgaaatcgttttgtcgaggctggctctggaagcagcaccatggttctgcggtctggcatctgtggcctctctccacatcggatcttcccttccttactcgtggtggttgctttggtggggctgctgcctgttctcaggagccatggcctccagctcagcccaactgccagcaccattcgaagctcagagccaccacgagaacgctcgattggggatgtcaccaccgctccaccggaggtcaccccagagagccgccctgttaatcattccgtcactgatcatggcatgaagccgcgcaaggcctttccagtcctgggcatcgactacacacacgtgcgcacccccttcgagatctccctctggatccttctggcctgcctcatgaagatagggtttccatgtgatccccactatctcaagcatcgtcccggagagctgcctgctga

SEQ ID NO: 29411 - DNA, 2183 bp, Homo sapiens
  source 1..2183: mol_type = unassigned DNA
caggcccggagttccagaccttttggtctcctttcgtggtcgttcctgggtccttgccccctttccccactttggagttccagattgcaaacccagcctccctccacccccagaaaattgcttccatggaaatgcctctctaaaacatgaacttttcctagagactacgccagtctctcttcccacttgctgaccctttgctacctatgtgcccggttttactctcatttgggtaaggtcgaggctggctctggaagcagcaccatggttctgcggtctggcatctgtggcctctctccacatcggatcttcccttccttactcgtggtggttgctttggtggggctgctgcctgttctcaggagccatggcctccagctcagcccaactgccagcaccattcgaagctcagagccaccacgagaacgctcgattggggatgtcaccaccgctccaccggaggtcaccccagagagccgccctgttaatcattccgtcactgatcatggcatgaagccgcgcaaggcctttccagtcctgggcatcgactacacacacgtgcgcacccccttcgagatctccctctggatccttctggcctgcctcatgaagataggtttccatgtgatccccactatctcaagcatcgtcccggagagctgcctgctgatcgtggtggggctgctggtggggggcctgatcaagggtgtaggcgagacaccccccttcctgcagtccgacgtcttcttcctcttcctgctgccgcccatcatcctggatgcgggctacttcctgccactgcggcagttcacagaaaacctgggcaccatcctgatctttgccgtggtgggcacgctgtggaacgccttcttcctgggcggcctcatgtacgccgtgtgcctggtgggcggtgagcagatcaacaacatcggcctcctggacaacctgctcttcggcagcatcatctcggccgtggaccccgtggcggttctggctgtctttgaggaaattcacatcaatgagctgctgcacatccttgtttttggggagtccttgctcaatgacgccgtcactgtggtcctgtatcacctctttgaggagtttgccaactacgaacacgtgggcatcgtggacatcttcctcggcttcctgagcttcttcgtggtggccctgggcggggtgcttgtgggcgtggtctacggggtcatcgcagccttcacctcccgatttacctcccacatccgggtcatcgagccgctcttcgtcttcctctacagctacatggcctacttgtcagccgagctcttccacctgtcaggcatcatggcgctcatagcctcaggagtggtgatgcgcccctatgtggaggccaacatctcccacaagtcccacaccaccatcaaatacttcctgaagatgtggagcagcgtcagcgagaccctcatcttcatcttcctcggcgtctccacggtggccggctcccaccactggaactggaccttcgtcatcagcaccctgctcttctgcctcatcgcccgcgtgctgggggtgctgggcctgacctggttcatcaacaagttccgtatcgtgaagctgacccccaaggaccagttcatcatcgcctatgggggcctgcgaggggccatcgccttctctctgggctacctcctggacaagaagcacttccccatgtgtgacctgttcctcactgccatcatcactgtcatcttcttcaccgtctttgtgcaggtgctgggccagggcagggcaggcccttgccttggggaccctcacaggctgttcccgtggaaagagaggaaagcgtgtgatttgaaatgcgattctagtcccagctccaccactaacttgctgtgtgaccttgggcgagccactccccctttctgggcctcagtttcttcaatcgtaaagtgagaattgtgatgagtcattgcagagtgactgatcagaatgtaaaggaaccagaatgctgcccaacttaatttggaactcatagagcattaagagaagtgggtactggccgggcacggtgactcaacgcctgtaatcccagcactttgggaggctgagggggtggatcacctgaggtcaggagtttgagaccagcctgactaacatggtgaaaccccgtctctactaaaaatacaaaattagtgggcatggtg

SEQ ID NO: 29412 - DNA, 3165 bp, Homo sapiens
  source 1..3165: mol_type = unassigned DNA
ttttttaccttgattttgcagttgtatgtgctaatgattttccaagcccattttcattgaaggcaacattggggagggggcctccctccagagccagcctgcctgggtttaaatcatggctttactgcttctctgggatcttagaaagctgcttatcctctctgagcctcagtttctgcatctgttaaatagagacaatggaaggacctccctcttagtgttgcggatattggagagctgattgatgctagaacacttccaagcacgtgtgttggtcacatggcaggtgtgcagttccatctgctgctgctgttattactcggtcctcctcacagtcctggtggggaggcagtgcagaggtagttttccctgtgtgtggggcctgacttccatggggttgcagagcaagtctgtggtgcagtccacatctgaacccaggctgtctgctgcctggcccaggccagatgaccagtgtgggggtcatttggcagtgaaacctctgaccgtgtctccaggaagaagcaggccttaaggacctgtctttagataagtgctgggaggtgggagagttctcacacccttgggtcctgggagagagcagagcagagagggcatcctagccttgggggcctggggtgagggagggaggctctgtggcctccctgcctgggtagcagaactggagtgcctgacacctgcctgccccccagggcatgaccattcggcccctggtagacctgttggctgtgaagaaaaagcaagagacgaagcgctccatcaacgaagagatccacacacagttcctggaccaccttctgacaggcatcgaagacatctgtggccactacggtcaccaccactggaaggacaagctcaaccggtttaataagaaatatgtgaagaagtgtctgatagctggcgagcgctccaaggagccccagctcattgccttctaccacaagatggagatgaagcaggccatcgagctggtggagagcgggggcatgggcaagatcccctctgccgtctccaccgtctccatgcagaacatccaccccaagtccctgccttccgagcgcatcctgccagcactgtccaaggacaaggaggaggagatccgcaaaatcctgaggaacaacttgcagaagaccaggcagcggctgcggtcctacaacagacacacgctggtggcagacccctacgaggaagcctggaaccagatgctgctccggaggcagaaggcccggcagctggagcagaagatcaacaactacctgacggtgccagcccacaagctggactcacccaccatgtctcgggcccgcatcggctcagacccactggcctatgagccgaaggaggacctgcctgtcatcaccatcgacccggcttccccgcagtcacccgagtctgtggacctggtgaatgaagagctgaagggcaaagtcttagggttgagccgggatcctgcaaaggtggctgaggaggacgaggacgacgatgggggcatcatgatgcggagcaaggagacttcgtccccaggaaccgacgatgtcttcacccccgcgcccagtgacagccccagctcccagaggatacagcgctgcctcagtgacccaggcccacaccctgagcctggggagggagaaccgttcttccccaaggggcagtaacaccagggccagcaggcagcgcctgtcccctcacagactcttccaccagagcaggggctgctgggggctccccttgcccttcctgacccggattggccctgcccctccccctaccgcatggcagctgggcccacagcccccaccccagcacagctcctcccctgccgcctcccgggaagcatcctccccaccagagctgcctccccaatccatttggcagaactgctggggctggtgaggccggccctgcccctccctagatccaggcttctcccggacctggactagggcctcggaggctcctccctctgcctcatcctcctcctcattcagaccaatcttagtttctaaccaaagagtctctggctcagctgtggtcccacccaggaagggagggagctgaggcctcccttgagtaggccctgctttatcaggggacaaaccaggggtaccaggcacatggctgggggagggactgctgacccaccaaggtctcacactcctcctgccagctctgtcaccctggccaccacccaacctgtccttactcagagctgcgggctgagggcatctctgagtgtctctgcctggagcaggggtggtttctacggtgacagtgacgtgactcagagcttttcgaactgtgctcccacggggaccactgggcccctcaggggaagctgctaggggaaggactggccgtggctccagaatgtgctgcctttttaagttttgtttgttcacactcctatatatgattgtttgcacagagggcgctcctgtttttaaaacattttgaaaacccctggctgaacagtgctctgcctctaactccctcctcacactccagaattacccttcctcatctgtgcctgtctgtccaacccctcccccacgtctctctgcctgctgggctcttaactgttgctcgaagactgtgacatcagaagtaactcccactcctaatcaagagtctctccagcctcacagatgctggcctcttggcacctgcctagctcttgggcctgacctccagtcctgctggcctgctcttacttcccccaccctgggtttggcccctggaacctttcccttgtgtgtaccacaccctgcctgctgtggagcccattgtggaggcggtgggggggagaaggcctcccctgaggatcccctgtcccctggggctggtggattgggcagaatcctgggcccccagagacctttgcccacacacactccttccccttgtccctggggcactcccccaggattgtgcaatagtcagagtgtccctttttgcaggggactgggccatgggtcctcggcccatctgtccatcctcctctccatgcaagtgctgtttgggcaggagtcaccatgcaagggtgacatcgacaaccacgtaccaagccaccgcagctgctgccactctgctgcctgtacagaagaaactgaatctttttcatattctaataaatcaatgtgagttttt

SEQ ID NO: 29413 - DNA, 887 bp, Homo sapiens
  source 1..887: mol_type = unassigned DNA
gtagggaaggcgccccacagcgaggcttgacttggccctgggcccctttcagttcctggaccaccttctgacaggcatcgaagacatctgtggccactacggtcaccaccactggaaggacaagctcaaccggtttaataagaaatatgtgaagaagtgtctgatagctggcgagcgctccaaggagccccagctcattgccttctaccacaagatggagatgaagcaggccatcgagctggtggagagcgggggcatgggcaagatcccctctgccgtctccaccgtctccatgcagaacatccaccccaagtccctgccttccgagcgcatcctgccagcactgtccaaggacaaggaggaggagatccgcaaaatcctgaggaacaacttgcagaagaccaggcagcggctgcggtcctacaacagacacacgctggtggcagacccctacgaggaagcctggaaccagatgctgctccggaggcagaaggcccggcagctggagcagaagatcaacaactacctgacggtgccagcccacaagctggactcacccaccatgtctcgggcccgcatcggctcagacccactggcctatgagccgaaggaggacctgcctgtcatcaccatcgacccggcttccccgcagtcacccgagtctgtggacctggtgaatgaagagctgaagggcaaagtcttagggttgagccgggatcctgcaaaggtggctgaggaggacgaggacgacgatgggggcatcatgatgcggagcaaggagacttcgtccccaggaaccgacgatgtcttcacccccgcgcccagtgacagccccagctcccagaggatacagcgctgcctcagtgacccaggcccacaccctgagc

SEQ ID NO: 29414 - DNA, 2355 bp, Homo sapiens
  source 1..2355: mol_type = unassigned DNA
attgcttccatggaaatgcctctctaaaacatgaacttttcctagagactacgccagtctctcttcccacttgctgaccctttgctacctatgtgcccggttttactctcatttgggtaaggtcgaggctggctctggaagcagcaccatggttctgcggtctggcatctgtggcctctctccacatcggatcttcccttccttactcgtggtggttgctttggtggggctgctgcctgttctcaggagccatggcctccagctcagcccaactgccagcaccattcgaagctcagagccaccacgagaacgctcgattggggatgtcaccaccgctccaccggaggtcaccccagagagccgccctgttaatcattccgtcactgatcatggcatgaagccgcgcaaggcctttccagtcctgggcatcgactacacacacgtgcgcacccccttcgagatctccctctggatccttctggcctgcctcatgaagataggtcctgtatcacctctttgaggagtttgccaactacgaacacgtgggcatcgtggacatcttcctcggcttcctgagcttcttcgtggtggccctgggcggggtgcttgtgggcgtggtctacggggtcatcgcagccttcacctcccgatttacctcccacatccgggtcatcgagccgctcttcgtcttcctctacagctacatggcctacttgtcagccgagctcttccacctgtcaggcatcatggcgctcatagcctcaggagtggtgatgcgcccctatgtggaggccaacatctcccacaagtcccacaccaccatcaaatacttcctgaagatgtggagcagcgtcagcgagaccctcatcttcatcttcctcggcgtctccacggtggccggctcccaccactggaactggaccttcgtcatcagcaccctgctcttctgcctcatcgcccgcgtgctgggggtgctgggcctgacctggttcatcaacaagttccgtatcgtgaagctgacccccaaggaccagttcatcatcgcctatgggggcctgcgaggggccatcgccttctctctgggctacctcctggacaagaagcacttccccatgtgtgacctgttcctcactgccatcatcactgtcatcttcttcaccgtctttgtgcagggcatgaccattcggcccctggtagacctgttggctgtgaagaaaaagcaagagacgaagcgctccatcaacgaagagatccacacacagttcctggaccaccttctgacaggcatcgaagacatctgtggccactacggtcaccaccactggaaggacaagctcaaccggtttaataagaaatatgtgaagaagtgtctgatagctggcgagcgctccaaggagccccagctcattgccttctaccacaagatggagatgaagcaggccatcgagctggtggagagcgggggcatgggcaagatcccctctgccgtctccaccgtctccatgcagaacatccaccccaagtccctgccttccgagcgcatcctgccagcactgtccaaggacaaggaggaggagatccgcaaaatcctgaggaacaacttgcagaagaccaggcagcggctgcggtcctacaacagacacacgctggtggcagacccctacgaggaagcctggaaccagatgctgctccggaggcagaaggcccggcagctggagcagaagatcaacaactacctgacggtgccagcccacaagctggactcacccaccatgtctcgggcccgcatcggctcagacccactggcctatgagccgaaggaggacctgcctgtcatcaccatcgacccggcttccccgcagtcacccgagtctgtggacctggtgaatgaagagctgaagggcaaagtcttagggttgagccgggatcctgcaaaggtggctgaggaggacgaggacgacgatgggggcatcatgatgcggagcaaggagacttcgtccccaggaaccgacgatgtcttcacccccgcgcccagtgacagccccagctcccagaggatacagcgctgcctcagtgacccaggcccacaccctgagcctggggagggagaaccgttcttccccaaggggcagtaacaccagggccagcaggcagcgcctgtcccctcacagactcttccaccagagcaggggctgctgggggctccccttgcccttcctgacccggattggccctgcccctccccctaccgcatggcagctgggcccacagcccccaccccagcacagctcctcccctgccgcctcccgggaagcatcctccccaccagagctgcctccccaatccatttggcag

SEQ ID NO: 29415 - DNA, 5410 bp, Homo sapiens
  source 1..5410: mol_type = unassigned DNA
ccggtgccgcagcagcggcgggtggctgtcgctgccctgccctgcacggggcagggcggagcgggctgagcagcccgggcgcgatgcgttgagcgctcggagggccaaccgccggtccccttggcggcaaccggcggcacccatggaaccactgggcaactggaggagcctgcgggcgccactgcctccgatgctgttgctgctgctcctgcaggtggcggggcccgtgggcgccctggcggagaccttgctgaacgcgccgagggccatgggcaccagttccagcccgcctagccctgcgagcgtggtggctcccggaacgacgctgttcgaggagagccggctgcctgtgtttacgctggattacccccacgtgcagatccccttcgagatcaccctttggatcctgctggcctccctggccaagattggcttccatctgtatcacaagttgcccacaatagtgcctgagagctgccttcttataatggttggacttctactaggtgggattatttttggtgttgatgagaagtctccccctgcaatgaagactgatgtatttttcttgtacctcctcccacccatcgtgctggatgccggctatttcatgcccactcgcccattctttgagaacattggcacgattttctggtatgctgtggtagggacactttggaattccattggcattggggtgtctttgtttggtatctgccagatcgaagcattcggcctcagcgacatcactttgctccagaacctgctctttggcagcttaatctcagctgtcgatcctgtggctgtgcttgctgtctttgagaacattcacgtcaatgagcagctctacatcctggtctttggagagtccctgctgaatgatgcagtaacagtggtcctgtacaacttgttcaagtcgttttgccagatgaaaaccattgagaccattgatgtgtttgcaggaatcgccaacttctttgttgtgggaatcggtggggtgctgattggcatcttcttgggctttatagcggcatttactactcgattcacccataatatccgagtgatcgagccactgtttgttttcctgtacagttatttgtcctacatcacagctgaaatgtttcacctctcaggcatcatggcaatcactgcttgtgcaatgactatgaataagtacgtagaagaaaatgtatctcagaaatcctacacgaccatcaagtacttcatgaagatgctgagcagtgtcagcgaaaccttgatcttcatcttcatgggtgtgtctaccgtgggcaagaaccacgagtggaactgggccttcgtctgcttcaccctggccttctgcctcatgtggcgagccctgggtgtttttgtcctgactcaggtcattaataggttccggaccattcccctgacctttaaggaccagttcatcattgcctatggaggacttcgaggtgccatctgttttgcgttagtgtttctccttcctgctgctgtgtttcctcggaaaaaattgtttattacggctgccattgttgtcatattctttactgtcttcattctgggaataactattcgaccactggtggagtttcttgatgtcaagaggtccaataagaaacaacaagctgtcagtgaagaaatctattgtcggttgtttgatcatgtgaagactggaattgaagatgtttgtggacattggggtcacaacttttggagagacaagtttaagaagtttgatgataaatatctgcggaagcttttgattcgggaaaaccaaccaaagtcaagtattgtatctttatataaaaagcttgaaataaaacatgccattgagatggcagagactgggatgataagtactgtccctacatttgcatctctaaatgattgtcgtgaagaaaaaataaggaaggtcacgtccagtgaaactgatgaaattcgagaactcttatcaagaaatctctatcaaatccgtcagcgaactttatcctacaacagacacagtctgacagccgacacaagtgagagacaagccaaggagattctgattcgccggcgacacagtttgcgagaaagcattaggaaggacagcagcttgaatcgagaacacagggcttccacttcaacctcccgatatttatccttacctaaaaatacgaagcttccagaaaagctacaaaagaggaggactatttctattgcagatggcaatagcagcgactcagacgcagatgccgggaccaccgtgctcaatttgcagcccagagccaggcgcttcttgccagaacagttctccaagaaatccccccagtcctataaaatggaatggaagaatgaggtagatgttgattctggccgagatatgcccagcacccccccaacaccccacagcagagaaaagggcacccagacgtcaggcttactacagcagccccttctctctaaagaccagtctggctcagagagggaagacagtttgactgaaggcatcccgcccaagccgccaccacggctggtctggagggcatcggaacctggaagccggaaagcccgatttgggagtgagaagccttaagagaagcagcgaaagcagatctgagtgtctgacccaggacagctgtggtttgtcactctgaaacctgatgcaacagtggaatccatgtaaaactctctgtgcatctaaatacttctggagggcgacagattcatgccacggataaatgaggcaaatccgaagaaaaggaaaatcgaataaaaaatagtcccacaaaataccttttgtgactaatgggtagcaatcgtattatttgctggcctgaagagaaaaaatggtaatgtgtgcctttattgaacttgaatgacagaacttgaaatttttaacacatccttcttggtgaagattttaatatattacttatatgcttcaaattttatttatgaaaaaatatgtatatctgtaatcagttgttaagtgaatggcactaaaagtatcgagaacagctttctttcccaggggtgaaggatggcgctcgggggtgactcctaagctcagcgtggaagcttttccctgtcctgacccgatggagcagccggtaagtgaagagcacagctggaagcagagacaccttatgactcaaactgggcaaacaatcggaacgtcatgcagaaggaatggcctgactcctgcagtgcagattggaggccccagaactcctatgaactactgagagtctactggtttttaacttgttcctctgtctactgtgtgtttgggggtgacatctaaattccatttcttcttcttgtttaaatggtgcagagagaaaggttgcccagacatccaccagcttactgtgttgacagatttgggagcagcttttgatgaagttccacccatgagggtccatgtggcaagtagggccacagggcagcacctggttacaacttgctggtgggttttatgttgtgcaatactaggaggaggaggcaggtgatctatgctgatctatgatcacctgcttcagtagaatttttctgtagagtgttgtttgaattttgagcctccaggttagaggctccaagcagacaaagaagaaagtttgtagacacaatattctaacattgcacaagttgatgagatatcaagttttgaatattattcaggaagcactttggagaatgtgggagtcctactgttttgcactagtctgtaatttgttacctctccccattcgataatatagtaactcagaattttcatataaaattgaattctactcattagagtactttttaaaagtacagcagaaagaaaagaagtggaacataagcattcaagattaatatttgattctctatctcttaactgtagattttattggcctgttttttttttctaaataattctttaaaacttgactggaacatgcctctgcatttctgagtgtagaaattaaatgaagccactcacagtcctttgatttcccactgaagataccccaaaggatgcaagtgcctacagtattatcaggaggagaacatgaaaatattaagacaaaaatcctcagcagttgttctccaccccttctccacctccaccagcaaggagaagtcaatctacacttttttctcatgttctaaagtcttagaatactgctggattgttgagcatgagacagagcaaaggttagatacacaaggtacaagttcataggagcacaattccttgattcagggaaagtagcacagaatgcaatttgaaaactacaggcttaggactctgtgccaaaaatctctattttaaatgaaaatatttatataaaaatacatttattctgcttaacacaaattaaaactgacataaaattttatgataataacatgattcaagaaatgtgatgtagatttttgagaatgccaaaaatcaggtttcagaaaagctacagtatgaaatctgaaaagcaacagaaattgaaagtgaccttaaagaataaatttcctaatttttcccagtttcctatgtttataactattataaagagtttaactttctggaactgaaggagaaaacatgaaaatgtttatattgcttcttgttaagcaggtagaccaaattccgctttcagtaattcatccatacagaatttggatgactatgtataaaggaaaacttaaatcttaattattatcagtttaaattttttttgtttgttgaatgacaaaggcaataaaaataaatttgactttagctttttttctatactttcctctttttgtaattcttaaattctagtcactagtcattatgagagtattgactaaatattttcacaatctaaatattgtcacaatctaaatttctgtagtagagagagccgtagccctttgtaaaggctttcgttcgtccaaacaacacttgatccaaccaaagttccaatgtgactgtggatctttgataggtctttggtgttggttgtaacaaaatttgatttgaactacctataaatgaaaagtcggggtttattactttatatgtaatgctgagaggagactgttgggaacagttatgtcaatgagcaaactagaaattggcttcaaagtctaatacttttaaaagcatgtgttttgtgtatatgctcacaaaatgtctgtgaagagatttctttcagcttttgctcagctttatggtggggtgtactgttttatctgggcggtgagggtattgatttacataaaaactgtagacaaacacagtacgagtctcagcacgttttgcatttattgtactgcccaaattgtttttatgttaaaagtcacgtttcataatctgcaatatttttgtcaaagtgcacactgtactttcttcttaaaaacgtgattaaagagatcactttgtccggatgaa

SEQ ID NO: 29416 - DNA, 2584 bp, Homo sapiens
  source 1..2584: mol_type = unassigned DNA
gcaggcggcaatgtggggactcggggcccggggccccgaccgggggctgctgctggcgctggcgctgggcgggctggcgcgggccgggggcgtcgaggtggagcccggcggcgcgcacggcgagagcgggggcttccaggtggtcaccttcgagtgggcccacgtgcaggatccctacgtcatcgcgctctggatcctcgtggccagcttggccaagatcgggttccacctgtcccacaaggtcaccagcgtggttcccgagagcgccctgctcatcgtgctgggcctggtgctgggcggcatcgtctgggcggccgaccacatcgcgtccttcacactgacgcccaccgtcttcttcttctacctgctgccccccatcgtgctggacgccggctacttcatgcccaaccgcctcttcttcggcaacctggggaccatcctgttgtacgccgtcgtgggtaccgtgtggaacgcggccaccaccgggctgtccctctacggcgtcttcctcagtgggctcatgggcgacctgcagattgggctgctggacttcctcctgtttggcagcctcatggcggctgtggacccggtggccgtcctggccgtgtttgaggaggtccatgtcaacgaggtcctgttcatcatcgtcttcggggagtcgctgctgaacgacgcagtcaccgtggttctgtacaatgtgtttgaatctttcgtggcgctgggaggtgacaacgtgactggcgtggactgcgtgaagggcatagtgtccttcttcgtggtgagcctggggggcacgctggtgggggtggtcttcgccttcctgctgtcgctggtgacgcgcttcaccaagcatgtgcgtatcatcgagcccggcttcgtgttcatcatctcctacctgtcctacctgacgtccgagatgctgtcgctgtcggccatcctcgccatcaccttctgtggcatctgctgtcagaagtatgtgaaggccaacatctcggagcagtcggccaccaccgtgcgctacaccatgaagatgctggccagcagcgccgagaccatcatcttcatgttcctgggtatctcggccgtgaacccgttcatctggacctggaacacggccttcgtgctcctgacgctggtcttcatctccgtgtaccgggccatcggtgtggtcctgcagacctggcttctgaaccgctaccgcatggtgcagctggagcccattgaccaggtggtcctgtcctacgggggcctgcgcggggccgtggcctttgccctggtggtgcttctggatggagacaaggtcaaggagaagaacctgttcgtcagcaccaccatcatcgtagtgttcttcaccgtcatcttccagggcctgaccatcaagcctctggtgcagtggctgaaggtgaagaggagcgagcaccgggaacctcggctcaacgagaagctgcacgggcgcgctttcgaccacatcctctcggccatcgaggacatatccggacagatcgggcacaattatctcagagacaagtggtcccacttcgacaggaagttcctcagcagggtcctcatgagacggtcggcccagaagtctcgagaccggatcctgaatgtcttccacgagctgaacctgaaggatgccatcagctacgtggctgagggagagcgccgcgggtccctggccttcatccgctcccccagcaccgacaacgtggtcaacgtggacttcacgccacgatcgtccaccgtggaggcctctgtctcctacctcctgagagaaaatgtcagcgctgtctgcctggacatgcagtctctggagcagcgacggcggagcatccgggacgcggaggacatggtcacgcaccacacgctacagcagtacctgtacaagccgcggcaggagtacaagcatctgtacagccgacacgagctcacgcccacggaggacgagaaacaggaccgggaaatcttccacaggaccatgcggaagcgcctggagtccttcaagtcgaccaagctggggctcaaccagaacaagaaggcggccaagctgtacaagcgggagcgtgcccagaagcggagaaacagcagcatccccaatgggaagctgcccatggagagccctgcgcagaatttcaccatcaaggagaaagacttggaactttcagacaccgaggagccccccaactatgatgaggagatgagtggggggatcgagttcctggctagtgtcaccaaggacacagcgtccgactcccctgcaggaattgacaaccctgtgttttctccggacgaggccctggaccgcagcctcctggccaggctgccgccctggctgtctcccggggagacggtggtcccctcgcagagggcccgcacgcagattccctactctcccggcaccttctgccgcctgatgcccttccgcctcagcagcaagtccgtggactccttcctgcaggcagacggccccgaggagcggccccccgccgccctccccgagtccacacacatgtgacaccggctccgacacgccgctaaccggccgctcgtccccgcgccacggtccgcccaccgccgccgccgc

SEQ ID NO: 29417 - DNA, 2003 bp, Homo sapiens
  source 1..2003: mol_type = unassigned DNA
gctcagacgccgcgcggggcggggattggtctgtggtcctctctcggctcctcgcggctcgcggcggccgacggttcctgggacacctgcttgcttggcccgtccggcggctcagggcttctctgctgcgctcccggttcgctggacgggaagaagggctgggccgtcccgtcccgtccccatcggaaccccaagtcgcgccgctgacccgtcgcagggcgagatgagcgcggacgcagcggccggggcgcccctgccccggctctgctgcctggagaagggtccgaacggctacggcttccacctgcacggggagaagggcaagttgggccagtacatccggctggtggagcccggctcgccggccgagaaggcggggctgctggcgggggaccggctggtggaggtgaacggcgaaaacgtggagaaggagacccaccagcaggtggtgagccgcatccgcgccgcactcaacgccgtgcgcctgctggtggtcgaccccgagacggacgagcagctgcagaagctcggcgtccaggtccgagaggagctgctgcgcgcccaggaagcgccggggcaggccgagccgccggccgccgccgaggtgcagggggctggcaacgaaaatgagcctcgcgaggccgacaagagccacccggagcagcgcgagcttcggcctcggctctgtaccatgaagaagggccccagtggctatggcttcaacctgcacagcgacaagtccaagccaggccagttcatccggtcagtggacccagactccccggctgaggcttcagggctccgggcccaggatcgcattgtggaggtgaacggggtctgcatggaggggaagcagcatggggacgtggtgtccgccatcagggctggcggggacgagaccaagctgctggtggtggacagggaaactgacgagttcttcaagaaatgcagagtgatcccatctcaggagcacctgaatggtcccctgcctgtgcccttcaccaatggggagatacagaaggagaacagtcgtgaagccctggcagaggcagccttggagagccccaggccagccctggtgagatccgcctccagtgacaccagcgaggagctgaattcccaagacagccccccaaaacaggactccacagcgccctcgtctacctcctcctccgaccccatcctagacttcaacatctccctggccatggccaaagagagggcccaccagaaacgcagcagcaaacgggccccgcagatggactggagcaagaaaaacgaactcttcagcaacctctgagcgccctgctgccacccagtgactggcagggccgagccagcattccaccccacctttttccttctccccaattactcccctgaatcaatgtacaaatcagcacccacatcccctttcttgacaaatgatttttctagagaactatgttcttccctgactttagggaaggtgaatgtgttcccgtcctcccgcagtcagaaaggagactctgcctccctcctcctcactgagtgcctcatcctaccgggtgtccctttgccaccctgcctgggacatcgctggaacctgcaccatgccaggatcatgggaccaggcgagagggcaccctcccttcctcccccatgtgataaatgggtccagggctgatcaaagaactctgactgcagaactgccgctctcagtggacagggcatctgttaccctgagacctgtggcagacacgtcttgttttcatttgatttttgttaagagtgcagtattgcagagtctagaggaatttttgtttccttgattaacatgattttcctggttgttacatccagggcatggcagtggcctcagccttaaacttttgttcctactcccaccctcagcgaactgggcagcacggggagggtttggctacccctgcccatccctgagccaggtaccaccattgtaaggaaacactttcagaaattcagctggttcctccaaacccttc

SEQ ID NO: 29418 - DNA, 1433 bp, Homo sapiens
  source 1..1433: mol_type = unassigned DNA
atgagcgcggacgcagcggccggggcgcccctgccccggctctgctgcctggagaaggagacccaccagcaggtggtgagccgcatccgcgccgcactcaacgccgtgcgcctgctggtggtcgaccccgagacggacgagcagctgcagaagctcggcgtccaggtccgagaggagctgctgcgcgcccaggaagcgccggggcaggccgagccgccggccgccgccgaggtgcagggggctggcaacgaaaatgagcctcgcgaggccgacaagagccacccggagcagcgcgagcttcggcctcggctctgtaccatgaagaagggccccagtggctatggcttcaacctgcacagcgacaagtccaagccaggccagttcatccggtcagtggacccagactccccggctgaggcttcagggctccgggcccaggatcgcattgtggaggtgaacggggtctgcatggaggggaagcagcatggggacgtggtgtccgccatcagggctggcggggacggctcaggaggtgggaaccagcgaggagctgaattcccaagacagccccccaaaacaggactccacagcgccctcgtctacctcctcctccgaccccatcctagacttcaacatctccctggccatggccaaagagagggcccaccagaaacgcagcagcaaacgggccccgcagatggactggagcaagaaaaacgaactcttcagcaacctctgagcgccctgctgccacccagtgactggcagggccgagccagcattccaccccacctttttccttctccccaattactcccctgaatcaatgtacaaatcagcacccacatcccctttcttgacaaatgatttttctagagaactatgttcttccctgactttagggaaggtgaatgtgttcccgtcctcccgcagtcagaaaggagactctgcctccctcctcctcactgagtgcctcatcctaccgggtgtccctttgccaccctgcctgggacatcgctggaacctgcaccatgccaggatcatgggaccaggcgagagggcaccctcccttcctcccccatgtgataaatgggtccagggctgatcaaagaactctgactgcagaactgccgctctcagtggacagggcatctgttaccctgagacctgtggcagacacgtcttgttttcatttgatttttgttaagagtgcagtattgcagagtctagaggaatttttgtttccttgattaacatgattttcctggttgttacatccagggcatggcagtggcctcagccttaaacttttgttcctactcccaccctcagcgaactgggcagcacggggagggtttggctacccctgcccatccctgagccaggtaccaccattgtaaggaaacactttcagaaattcagctggttcctcc

SEQ ID NO: 29419 - DNA, 2174 bp, Homo sapiens
  source 1..2174: mol_type = unassigned DNA
gaggcgacgggagccgaacaggagccgccgctgaagccaccgccgggtgcccagcgccgccgccgcccccgagctcccccgcgcccctgcccgcgggcggccggtgggcagcgggcgccatggccgcgccggagccgctgcggccgcgcctgtgccgcttggtgcgcggagagcagggctacggcttccacctgcacggcgagaagggccgccgcgggcagttcatccggcgcgtggaacccggttcccccgccgaggccgccgcgctgcgcgctggggaccgcctggtcgaggtcaacggcgtcaacgtggagggcgagacgcaccaccaggtggtgcaaaggatcaaggctgtggaggggcagactcggctgctggtggtggaccaggagacagatgaggagctccgccggcggcagctgacctgtaccgaggagatggcccagcgagggctcccacccgcccacgacccctgggagccgaagccagactgggcacacaccggcagccacagctccgaagctggcaagaaggatgtcagtgggcccctgagggagctgcgccctcggctctgccacctgcgaaagggacctcagggctatgggttcaacctgcatagtgacaagtcccggcccggccagtacatccgctctgtggacccgggctcacctgccgcccgctctggcctccgcgcccaggaccggctcattgaggtgaacgggcagaatgtggagggactgcgccatgctgaggtggtggccagcatcaaggcacgggaggacgaggcccggctgctggtcgtggaccccgagacagatgaacacttcaagcggcttcgggtcacacccaccgaggagcacgtggaaggtcctctgccgtcacccgtcaccaatggaaccagccctgcccagctcaatggtggctctgcgtgctcgtcccgaagtgacctgcctggttccgacaaggacactgaggatggcagtgcctggaagcaagatcccttccaggagagcggcctccacctgagccccacggcggccgaggccaaggagaaggctcgagccatgcgagtcaacaagcgcgcgccacagatggactggaacaggaagcgtgaaatcttcagcaacttctgagccccttcctgcctgtctcgggaccctgggacccctcccgcacggaccttgggcctcagcctgccccgagctcccccagcctcagtggactggagggtggtcctgccattgcccagaaatcagccccagccccggtgagcccccatcctgcccctgcccaccaggtactgggggcctgtggcagcaagatagggggagagagacccagagatgtgagagagagtcagagacagagacagagagagagagagagagacacagagagagacagagagagagcgagcgagcgcgcggcagccgcggggcgagggcctttgctgctctgccggggcctgctgactgaaaggaatttgtgtttttgctttttttccaaaaagatctccagctccacacatgtttccacttaataccagagacccccccccttcccctcccccttcccctcccccttgggacgcgctctaaataattgcaataaaacaaacctttctctgcaaaccatttcctccccgccccctcccctcagcagcggccgtcctgagtgggagtccctgggacttcccagtggccaagttggggcgcccagcctcttcgtggggaccttgggtaaggccagggaggcctgatgtggccgtaggagctgcccctgcccacctgccctggtgtgggggtccctaggccacaccctgctccccacccagctaccctgtgcgcctgtgccctgctgggggcctgggctctccgaggggcctgaggatggaggccccacgtccccgaggagggcggcctctggacaggcccctcattccgcgcggcagctcccaggcctggggaacgtaggtgtgtgagagcggcacccgggaaggacgcctggcctctggctcagccctgcttggcgggctcccccgtggacaccctgttgactttgcacttccctcccgggccccgcacccccgaaccgaccaccgatcgaccggcaccgctgttgcctcgtaagccatagcgcatgcgcgctctcaggataaacaggccctgcctggg

SEQ ID NO: 29420 - DNA, 2141 bp, Homo sapiens
  source 1..2141: mol_type = unassigned DNA
gaggcgacgggagccgaacaggagccgccgctgaagccaccgccgggtgcccagcgccgccgccgcccccgagctcccccgcgcccctgcccgcgggcggccggtgggcagcgggcgccatggccgcgccggagccgctgcggccgcgcctgtgccgcttggtgcgcggagagcagggctacggcttccacctgcacggcgagaagggccgccgcgggcagttcatccggcgcgtggaacccggttcccccgccgaggccgccgcgctgcgcgctggggaccgcctggtcgaggtcaacggcgtcaacgtggagggcgagacgcaccaccaggtggtgcaaaggatcaaggctgtggaggggcagactcggctgctggtggtggaccaggagacagatgaggagctccgccggcggcagctgacctgtaccgaggagatggcccagcgagggctcccacccgcccacgacccctgggagccgaagccagactgggcacacaccggcagccacagctccgaagctggcaagaaggatgtcagtgggcccctgagggagctgcgccctcggctctgccacctgcgaaagggacctcagggctatgggttcaacctgcatagtgacaagtcccggcccggccagtacatccgctctgtggacccgggctcacctgccgcccgctctggcctccgcgcccaggaccggctcattgaggtgaacgggcagaatgtggagggactgcgccatgctgaggtggtggccagcatcaaggcacgggaggacgaggcccggctgctggtcgtggaccccgagacagatgaacacttcaagcggcttcgggtcacacccaccgaggagcacgtggaaggtcctctgccgtcacccgtcaccaatggaaccagccctgcccagctcaatggtggctctgcgtgctcgtcccgaagtgacctgcctggttccgacaaggacactgaggagagcggcctccacctgagccccacggcggccgaggccaaggagaaggctcgagccatgcgagtcaacaagcgcgcgccacagatggactggaacaggaagcgtgaaatcttcagcaacttctgagccccttcctgcctgtctcgggaccctgggacccctcccgcacggaccttgggcctcagcctgccccgagctcccccagcctcagtggactggagggtggtcctgccattgcccagaaatcagccccagccccggtgagcccccatcctgcccctgcccaccaggtactgggggcctgtggcagcaagatagggggagagagacccagagatgtgagagagagtcagagacagagacagagagagagagagagagacacagagagagacagagagagagcgagcgagcgcgcggcagccgcggggcgagggcctttgctgctctgccggggcctgctgactgaaaggaatttgtgtttttgctttttttccaaaaagatctccagctccacacatgtttccacttaataccagagacccccccccttcccctcccccttcccctcccccttgggacgcgctctaaataattgcaataaaacaaacctttctctgcaaaccatttcctccccgccccctcccctcagcagcggccgtcctgagtgggagtccctgggacttcccagtggccaagttggggcgcccagcctcttcgtggggaccttgggtaaggccagggaggcctgatgtggccgtaggagctgcccctgcccacctgccctggtgtgggggtccctaggccacaccctgctccccacccagctaccctgtgcgcctgtgccctgctgggggcctgggctctccgaggggcctgaggatggaggccccacgtccccgaggagggcggcctctggacaggcccctcattccgcgcggcagctcccaggcctggggaacgtaggtgtgtgagagcggcacccgggaaggacgcctggcctctggctcagccctgcttggcgggctcccccgtggacaccctgttgactttgcacttccctcccgggccccgcacccccgaaccgaccaccgatcgaccggcaccgctgttgcctcgtaagccatagcgcatgcgcgctctcaggataaacaggccctgcctggg

SEQ ID NO: 29421 - DNA, 4138 bp, Homo sapiens
  source 1..4138: mol_type = unassigned DNA
agacagggaaggtttcctttcctcattagaaggactccagtgatctgtggaatgagcactacagtatccttttaaattttcacccacaagacaaagccagtatgcagtgaaatgaggaaatgcctttaagtgaagagatttttatttctttcataaattgctcaagccatgattggatggaggtcctccaggtagctccatggactttaacaagtctattgaataactgcatttgagttggaagctgagttgcctgaacacaaacgatttaaaccagattagaaagtgtctacatacagagctcaataacacactcggaatcttcttgggaggacccacagactgtacctatattacttttgacccaggtggatgcagtcactctctagaagcctccccgacttcagatgtgtggcacacatccacacaggggtgtaggtaggagaagcccacaggaatggctctgcagatgttcgtgacttacagtccttggaattgtttgctactgctagtggctcttgagtgttctgaagcatcttctgatttgaatgaatctgcaaattccactgctcagtatgcatctaacgcttggtttgctgctgccagctcagagccagaggaagggatatctgtttttgaactggattatgactatgtgcaaattccttatgaggtcactctctggatacttctagcatcccttgcaaaaataggcttccacctctaccacaggctgccaggcctcatgccagaaagctgcctcctcatcctggtgggggcgctggtgggcggcatcatcttcggcaccgaccacaaatcgcctccggtcatggactccagcatctacttcctgtatctcctgccacccatcgttctggagggcggctacttcatgcccacccggcccttctttgagaacatcggctccatcctgtggtgggcagtattgggggccctgatcaacgccttgggcattggcctctccctctacctcatctgccaggtgaaggcctttggcctgggcgacgtcaacctgctgcagaacctgctgttcggcagcctgatctccgccgtggacccagtggccgtgctagccgtgtttgaggaagcgcgcgtgaacgagcagctctacatgatgatctttggggaggccctgctcaatgatggcattactgtggtcttatacaatatgttaattgcctttacaaagatgcataaatttgaagacatagaaactgtcgacattttggctggatgtgcccgattcatcgttgtggggcttggaggggtattgtttggcatcgtttttggatttatttctgcatttatcacacgtttcactcagaatatctctgcaattgagccactcatcgtcttcatgttcagctatttgtcttacttagctgctgaaaccctctatctctccggcatcctggcaatcacagcctgcgcagtaacaatgaaaaagtacgtggaagaaaacgtgtcccagacatcatacacgaccatcaagtacttcatgaagatgctgagcagcgtcagcgagaccttgatcttcatcttcatgggtgtgtccactgtgggcaagaatcacgagtggaactgggccttcatctgcttcaccctggccttctgccaaatctggagagccatcagcgtatttgctctcttctatatcagtaaccagtttcggactttccccttctccatcaaggaccagtgcatcattttctacagtggtgttcgaggagctggaagtttttcacttgcatttttgcttcctctgtctctttttcctaggaagaaaatgtttgtcactgctactctagtagttatatactttactgtatttattcagggaatcacagttggccctctggtcaggtacctggatgttaaaaaaaccaataaaaaagaatccatcaatgaagagcttcatattcgtctgatggatcacttaaaggctggaatcgaagatgtgtgtgggcactggagtcactaccaagtgagagacaagtttaagaagtttgatcatagatacttacggaaaatcctcatcagaaagaacctacccaaatcaagcattgtttctttgtacaagaagctggaaatgaagcaagccatcgagatggtggagactgggatactgagctctacagctttctccataccccatcaggcccagaggatacaaggaatcaaaagactttcccctgaagatgtggagtccataagggacattctgacatccaacatgtaccaagttcggcaaaggaccctgtcctacaacaaatacaacctcaaaccccaaacaagtgagaagcaggctaaagagattctgatccgccgccagaacaccttaagggagagcatgaggaaaggtcacagcctgccctggggaaagccggctggcaccaagaatatccgctacctctcctacccctacgggaatcctcagtctgcaggaagagacacaagggctgctgggttctcagatgatgacagcagtgatccaggatccccatccatcacgttcagcgcatgctctcggatagggtcacttcagaagcaagaggcacaagaaataataccaatgaagagcctacacagaggaaggaaggcattcagctttggttatcaaagaaacacaagccaagaagagtacttgggtggagtaaggagggtggccttaagacccaaacctctgtttcatgcagtggatgaggagggtgagtctggaggggagagtgagggcaaggcctctttggttgaggttcggtcgaggtggacagctgaccatggacacggcagggaccatcacaggtcccatagtcctttgctccaaaaaaaatagtgttattgtccacaagattgttttggtgtttctcaagagtctgtcttcctataactgtgaaaggaggatttctggaattcagaagagagctattgagtttgctgtgttgaagctattaaacatggatctataagcagcaggaagattttttccaaggactgggagcaaacttgcaggctctgccatgtacttattgtggggtacctttagatgaattccctgtgagtgagagaagttgatcaccccaggaattagtcactaagaattcctaagaactttctatcaaaagcattggatccaagccatatattgaaatacaagcgtgattaatcagtaattcacattgccgatatgcatatgcaacttataatcaaatagaactagaagagactttgaagtcacctgactcagccccttgtgtttacagacaaggacatgtagtccaaggttgcatggtgagttcacagtcggattgtcctccctccaaactgaaactaatttgattttgatttcatattcaatatgcaataattatgttctatcagagataaaatttgttatgaatttgctttatttaatcagtagcaatgatagatgtgatgcatactataggattaatctgtgaacaatgggtttacggtctatttcataattgaaatatttattttaaaaatgaatattagaaacaaaacagccataaacagagtttaatagcaatgatgttaacaacaagtatttataaggggtgcatttgtagggtgtgacattttaccctagggtataaaactatttttcttttattattattattattattattatactttaagttttagggtacatgtgcacattgtgcaggttagttacatatgtatacatgtgccatgctggtgtgctgcacccgctaactcgtcatctagcattaggtgtatctcccaatgctatccctcccccctccccccaccccacaacagtccccagagtgtgatgttccccttcctgtgtccatgtgatctcattgttcaattcccacctatgagtgagaatatgcggtgtttggttttttgttcttgggatagtttactgagaatgatgatttccaatttcatccatgtccctacaaaggacatgaactcatcattttttatggctgcatggtattccatggtgtatatgtgccacattttcttaatccagtctatcattgttggacatttgggttggttccaagtctttgctattgtgaataatgccgcaataaacatacgtgtgcatgtgtcttta

SEQ ID NO: 29422 - DNA, 3734 bp, Homo sapiens
  source 1..3734: mol_type = unassigned DNA
ggcggcggcgacgcggggccggcggccgtgcggtgccgggagggcggctgggcaggcggcaggatgctgcgcgccgccctgtccctgctcgcgctgcccctggcgggggcggccgaagagcccacccagaagccagagtccccgggcgagcctcccccaggcttagagctcttccgctggcagtggcacgaggtggaggcgccctacctggtggccctgtggatcctggtggccagtctggccaaaatcgtgtttcacctgtctcggaaagtaacatctctggtccctgagagctgcctgctgattttgctgggcctggtgctagggggaattgttttggctgtggccaagaaagctgagtaccagctggagccaggcaccttcttcctcttcctgctgcctcctattgtgttggactcaggctatttcatgcctagcaggctgttctttgacaacttgggtgccatcctcacctatgccgtggtaggcacactctggaatgccttcacaacaggcgctgccctctggggcttgcagcaggctggacttgtagcccctagggtgcaggctggcttactggacttcctgctgtttgggagcctcatctcggcggtggaccccgtggccgtgctagctgtctttgaggaggtgcacgtcaatgagactctctttatcatcgtctttggcgagtccctgctcaacgatgctgtcaccgtggtgctgtacaaggtctgcaactcctttgtggagatgggctctgccaatgtgcaggccactgactacctgaagggagtcgcctccctgtttgtggtcagtctgggcggggcagccgtgggcttagtctttgccttcctcctggccctgaccacacgcttcaccaagcgggtccgcatcatcgagccgctgctggtcttcctcctcgcctacgcagcctacctcactgctgaaatggcctcgctctccgccattcttgcggtgaccatgtgtggcctgggctgtaagaagtacgtggaggccaacatctcccataagtcacgcacaactgtcaaatatacaatgaagactctagccagctgtgctgagaccgtgatcttcatgctgcttggcatctcagccgtggactcttctaagtgggcctgggattctgggctggtgctgggcaccctcatcttcatcctgttcttccgagccctcggcgtagtcctgcagacctgggtgctgaatcagttccggctagtccctctggacaagattgaccaagtggtgatgtcctatgggggcctgcggggggctgtggcctttgctctcgtcatcctactggataggaccaaggtccctgccaaggactactttgtagccaccactattgtagtggtcttcttcacagtcatcgtgcagggcttgaccatcaagccactggtcaaatggctgaaggtgaagaggagtgagcatcacaaacccaccctgaaccaggagctgcatgaacacacttttgaccacattctggctgcagtggaggacgttgtggggcaccatggctaccactactggagggacaggtgggagcagtttgacaagaaatacctgagtcagctgctgatgcgacgatcagcctaccgcatccgggaccagatctgggatgtgtactacaggcttaacatccgggatgccatcagctttgtggaccagggaggccacgtcttgtcttccacaggtctcactctgccttctatgcccagccgcaattctgtggcagaaacttctgtcaccaacctgctgagggagagtggcagtggagcgtgtctggatctgcaggtgattgacacagtacgcagcggccgggatcgtgaggatgctgtgatgcatcatctgctctgcggaggcctctacaagccgcgccgtaggtacaaagccagctgcagtcgccacttcatctcagaggatgcgcaggagcggcaggacaaggaggtcttccagcagaacatgaagcggcggctggagtcctttaagtccaccaagcacaacatctgcttcaccaagagcaagccacgaccccgcaagactggccgcaggaagaaggatggtgtggcgaatgctgaggctacaaatgggaaacatcgaggcctgggctttcaggacacagctgctgtgatattaaccgtggagtctgaggaggaggaggaggagagcgacagttcagagacagagaaggaggacgatgaggggatcatctttgtggctcgtgccaccagtgaggttctccaagagggcaaggtctcaggaagccttgaggtgtgcccaagcccacgaatcattcccccctccccaacctgtgcagaaaaggagctcccctggaagagtgggcagggggacctggcagtgtacgtgtcctcggaaaccaccaagattgtgcctgtggacatgcagacgggttggaaccagagcatctcatccctggagagcctagcgtcccctccctgtaaccaggccccaattctgacctgcctgcctccccatccacggggcactgaagagccccaggtccctctccacctaccttctgatccacgctctagcttcgccttcccaccgagcctggccaaggctggccgctctcgcagtgagagcagcgctgacctcccccagcagcaggagctgcagcccctcatgggccacaaggaccacacccatctcagcccaggcaccgctacctcccactggtgcatccagttcaacagaggcagccggctgtagctcaaggcctcggggaggagcaggaggtggaatccctgtgggaagtgctccctgggtgatgggtagagccctcgaaacttgacatggggccagaagggcctgggttgaagtagtaattgggcttccttggagctagtcagaggggtcacctaagctggtcctcacaggggcctttctcaccacctccctgctcctaacccctgccactttctgtttcattaaggcctctactctggctcaggacccagtccaggccttctacgggctaggcccagagacttgggttgctggtcccccttccctagtgggttttcccggggactctataggcagctgctcctgcccgcaaagcaagagcatcattcctattcttcagtggatgccagccttccctgccccaactccctccccagcactgggtcagtggtgtcctggcagtgaggctccgtgaggggctggcccttagaggaactggggtgggaggtggggcaggcctcacccttgggctttgctgccctgttgggtcagctacccatagtccatttttttagggcagtgggaacctctgcctccacttcctgctttagccccttccctttgctgccaggtattggggtaatatttcctccttttccaagaccaaggccaagaggctgggccaggcttcagttcaggcctgttgcttaactggggtcaccctgggatctgctgctctgggtctaagtctagacctttctgatccttgggtctgggttttttgaggaggggacatagtggcctctgggctgccatgtcaccacctgaacattccccaaacagagaaggaacccagcatctcagggccactgctccattgctctgggggctgggatgcctggctaagcaggggctgacagggtggcaggtgactttctagggatcagcacctgccctgtgttttgtaccttgaacctaagatatattaaacatctctcagatgg

SEQ ID NO: 29423 - DNA, 3805 bp, Homo sapiens
  source 1..3805: mol_type = unassigned DNA
ggcggcggcgacgcggggccggcggccgtgcggtgccgggagggcggctgggcaggcggcaggatgctgcgcgccgccctgtccctgctcgcgctgcccctggcgggggcggccgaagagcccacccagaagccagagtccccgggcgagcctcccccaggcttagagctcttccgctggcagtggcacgaggtggaggcgccctacctggtggccctgtggatcctggtggccagtctggccaaaatcgtgtttcacctgtctcggaaagtaacatctctggtccctgagagctgcctgctgattttgctgggcctggtgctagggggaattgttttggctgtggccaagaaagctgagtaccagctggagccaggcaccttcttcctcttcctgctgcctcctattgtgttggactcaggctatttcatgcctagcaggctgttctttgacaacttgggtgccatcctcacctatgccgtggtaggcacactctggaatgccttcacaacaggcgctgccctctggggcttgcagcaggctggacttgtagcccctagggtgcaggctggcttactggacttcctgctgtttgggagcctcatctcggcggtggaccccgtggccgtgctagctgtctttgaggaggtgcacgtcaatgagactctctttatcatcgtctttggcgagtccctgctcaacgatgctgtcaccgtggtgctgtacaaggtctgcaactcctttgtggagatgggctctgccaatgtgcaggccactgactacctgaagggagtcgcctccctgtttgtggtcagtctgggcggggcagccgtgggcttagtctttgccttcctcctggccctgaccacacgcttcaccaagcgggtccgcatcatcgagccgctgctggtcttcctcctcgcctacgcagcctacctcactgctgaaatggcctcgctctccgccattcttgcggtgaccatgtgtggcctgggctgtaagaagtacgtggaggccaacatctcccataagtcacgcacaactgtcaaatatacaatgaagactctagccagctgtgctgagaccgtgatcttcatgctgcttggcatctcagccgtggactcttctaagtgggcctgggattctgggctggtgctgggcaccctcatcttcatcctgttcttccgagccctcggcgtagtcctgcagacctgggtgctgaatcagttccggctagtccctctggacaagattgaccaagtggtgatgtcctatgggggcctgcggggggctgtggcctttgctctcgtcatcctactggataggaccaaggtccctgccaaggactactttgtagccaccactattgtagtggtcttcttcacagtcatcgtgcagggcttgaccatcaagccactggtcaaatggctgaaggtgaagaggagtgagcatcacaaacccaccctgaaccaggagctgcatgaacacacttttgaccacattctggctgcagtggaggacgttgtggggcaccatggctaccactactggagggacaggtgggagcagtttgacaagaaatacctgagtcagctgctgatgcgacgatcagcctaccgcatccgggaccagatctgggatgtgtactacaggcttaacatccgggatgccatcagctttgtggaccagggaggccacgtcttgtcttccacaggtctcactctgccttctatgcccagccgcaattctgtggcagaaacttctgtcaccaacctgctgagggagagtggcagtggagcgtgtctggatctgcaggtgattgacacagtacgcagcggccgggatcgtgaggatgctgtgatgcatcatctgctctgcggaggcctctacaagccgcgccgtaggatagagctgaggacagagccctgtggcatgctactaaagactttcctccagactgacatggatcaagcatttttgggtacaaagccagctgcagtcgccacttcatctcagaggatgcgcaggagcggcaggacaaggaggtcttccagcagaatgaagcggcggctggagtcctttaagtccaccaagcacaacatctgcttcaccaagagcaagccacgaccccgcaagactggccgcaggaagaaggatggtgtggcgaatgctgaggctacaaatgggaaacatcgaggcctgggctttcaggacacagctgctgtgatattaaccgtggagtctgaggaggaggaggaggagagcgacagttcagagacagagaaggaggacgatgaggggatcatctttgtggctcgtgccaccagtgaggttctccaagagggcaaggtctcaggaagccttgaggtgtgcccaagcccacgaatcattcccccctccccaacctgtgcagaaaaggagctcccctggaagagtgggcagggggacctggcagtgtacgtgtcctcggaaaccaccaagattgtgcctgtggacatgcagacgggttggaaccagagcatctcatccctggagagcctagcgtcccctccctgtaaccaggccccaattctgacctgcctgcctccccatccacggggcactgaagagccccaggtccctctccacctaccttctgatccacgctctagcttcgccttcccaccgagcctggccaaggctggcctcgcagtgagagcagcgctgacctcccccagcagcaggagctgcagcccctcatgggccacaaggaccacacccatctcagcccaggcaccgctacctcccactggtgcatccagttcaacagaggcagccggctgtagctcaaggcctcggggaggagcaggaggtggaatccctgtgggaagtgctccctgggtgatgggtagagccctcgaaacttgacatggggccagaagggcctgggttgaagtagtaattgggcttccttggagctagtcagaggggtcacctaagctggtcctcacaggggcctttctcaccacctccctgctcctaacccctgccactttctgtttcattaaggcctctactctggctcaggacccagtccaggccttctacgggctaggcccagagacttgggttgctggtcccccttccctagtgggttttcccggggactctataggcagctgctcctgcccgcaaagcaagagcatcattcctattcttcagtggatgccagccttccctgccccaactccctccccagcactgggtcagtggtgtcctggcagtgaggctccgtgaggggctggcccttagaggaactggggtgggaggtggggcaggcctcacccttgggctttgctgccctgttgggtcagctacccatagtccatttttttagggcagtgggaacctctgcctccacttcctgctttagccccttccctttgctgccaggtattggggtaatatttcctccttttccaagaccaaggccaagaggctgggccaggcttcagttcaggcctgttgcttaactggggtcaccctgggatctgctgctctgggtctaagtctagacctttctgatccttgggtctgggttttttgaggaggggacatagtggcctctgggctgccatgtcaccacctgaacattccccaaacagagaaggaacccagcatctcagggccactgctccattgctctgggggctgggatgcctggctaagcaggggctgacagggtggcaggtgactttctagggatcagcacctgccctgtgttttgtaccttgaacctaagatatattaaacatctctcagatgg

SEQ ID NO: 29424 - DNA, 4681 bp, Homo sapiens
  source 1..4681: mol_type = unassigned DNA
cgccggtgaggtaggggcgggaggcggggggagacatggctcggcgcggctggcggcgggcacccctccgccgtggcgtcggcagcagtccccgagcccgcaggctcatgcggcccctttggttgctcctcgcagtgggcgtctttgactgggcaggggcttcggacggcggcggcggagaggctagagccatggacgaggagatcgtgtccgagaagcaagccgaggagagccaccggcaggacagcgccaacctgctcatcttcatcctgctgctcaccctcaccattctcacaatctggctcttcaagcaccgccgggcccgcttcctgcacgaaaccggcctggctatgatttatggtcttttggtgggccttgtgcttcggtatggcattcatgttccgagtgatgtaaataatgtgaccctgagctgtgaagtgcagtcaagtccaactaccttactggtaaatgttagtggaaaattttatgagtatatgctgaaaggagagattagttcacatgaactcaataatgttcaagataatgaaatgcttagaaaggttacttttgatccagaagtatttttcaacatattacttcctcctatcatattttatgcaggttatagcctgaaaaggagacatttttttcgaaatcttgggtctatcctagcatacgcttttcttggaacagcaatttcttgtttcgttattgggtcaataatgtatggctgtgtaacgctgatgaaggtaacgggacaacttgcaggagatttttactttacagattgcctactgtttggtgccattgtatcagcaactgatccagtgactgttcttgctatattccacgagcttcaagttgatgttgaactctatgcacttctttttggtgaaagtgtcctcaatgatgctgttgccatagtgctgtcctcctcaatagtggcataccagccagctggagacaacagtcacacctttgatgtcacagcgatgttcaagtctattgggatcttccttggaatcttcagtggatcttttgcaatgggtgctgctactggagtggtgacagctttagtgacaaagttcaccaaattacgggagttccagttgttggagacaggcctgttcttcttgatgtcctggagtaccttcctcttggctgaagcatggggcttcacaggtgtagttgcagtattgttttgtggcatcacacaagcacattatacgtataataatttgtccacggagtctcagcatagaactaaacagttgtttgagcttctcaatttcttggcagagaatttcatcttctcctacatggggctgacactgttcaccttccagaaccatgtctttaacccaacatttgtagtaggagcatttgttgctattttcttgggaagagctgccaatatttaccccttgtccctcttacttaatttgggtagaagaagtaagattggatcaaattttcaacacatgatgatgtttgctggccttcgtggtgcaatggcatttgccttggccattcgagatactgccacttatgcacggcaaatgatgttcagcaccacgcttctgattgtgttttttaccgtgtgggtatttggtggtggcaccactgcaatgctgtcatgcttgcatatcagggttggtgttgattcagaccaagaacacttgggtgttcctgaaaatgaaaggagaactaccaaagcagagagtgcttggcttttccggatgtggtacaactttgatcataactatctgaagcctctgctgacccacagcgggcctccgctgacaacaacactccctgcctgctgtggacccatcgccaggtgcctcaccagcccccaggcttacgaaaaccaggaacagttgaaagatgatgattctgatcttattctcaatgatggtgacatcagtttgacatatggagattctactgtgaacactgaaccggccacatccagcgccccaaggagatttatgggaaacagttctgaagatgccttggatcgggagcttgcatttggggaccatgaactggtcattcgaggaacacgcctggttcttccaatggatgattctgaacccccgctaaatttgttagataatacgagacatggtccagcctaagcttactaatactcacttagtgatttgtaaaatttgcacatgtgattgtgaagaaatttgtactacctaaaagtcccagtgcatgtctctgaatgtgtaagctatataaatgctatttatatggcatagaaagaatataaatatcctgtacacggcagattgtgaacaaactatattcctttaagttttcctggttgcactctgtagactggatctgttttaggaagttactttcacagtgatgttgtgtgttctgttagttttatgtctcagttaaagtgtaaaaagtgacggattttctctttcttaaacttacctgacacttaaccagagtaccagttctcgtgatgtgaattaatttttttgtgtgctaggggagggagagtgaggagggagtgttatttccttgggaacctagggaggagaggttcctttgttgggaaacttttgttgatagctgctgcctttgtcctgatcgttttctttcccttttctctggtggcctgttgtggtgcaacgagctgatggcatttgatcttgccccattcaggttggggagtgaagtgtgaggacccttttcccccgcttgctgtgaaagcacagattcattgactacagtacactgttgttcagaaaagaaggctgcaaatgacttctgagactttatgtcttttcttccagaccaagaccgtagaaggagtcacatctagccggcttagccaaagtacaggtgtatatagttcagggcacttgatttagatttggaggggctggggtgggcagagagcaagaggcgagtaaagagaatggtggtttcagagatctctcttcccaaatgtgtaaatattctataccagataagtttaaataagaaatttaattgctgcttaatttttgattatgtactttatctgtatagcaggctttgtcgtcagaagtttttatatcgatttaaattgctgctctttagcagccaaacaggagcaaaatgtaaaatttttgaacttactgtgtctaatcatcatttgttagtctgtagttaatgtcaacagttaatttatgaacccacgatcgttccacactgcaccaaagtcagtcataagagaaatcgaatattctggagcactgattgcagcagggtggctcctttgtgtgcagcaggtgtagtagtcttcattttcatggtacgttttaatattaattacctaagctgccatgcatttttttttttacagttctcaaggaagagcacagaacaatttctcatttcatatttggagtatgaaagtagattctattttgtaatgctgataatacctaaagatgcattgaatgcttggaagaatgctttttgatgttgattttgacctgttcatgattcagaagaaaaacaaacttttttggattttttttccctcaggtctgagtagcattgccttaaatcttatccagttagaacattgatttatttacatgatgttcagattttccagtgaaaaatacccttctgaacaaaacatgtacttactctccgaaaggcatctatctgtgctattgcaaacactccttgagattttaggggaattctaatgttgtaccctttcgtggcagctttgactgttggcatagccatttgttatgtagtggtagcgactttcctgctatgcaggaatccctcccatgacgtgtatgttttacatgatgtgtgcctcttcacgcagtaaatagtttcttgttaatgtatgtttgaggagtttgaacgtcagtgtcacttacccacaaagttattcaagttgtaaaaggttatacaataatttaacaactaccttttttattctgtcgggttactgacctcactttatgtaaatacttcgcatgacaaattcagtaactcgtctatttcagcatgcataagacttttcactagggaaactgataaagcttgagtcaactaaatctgccttcatactttatcaaggggaaccaagcctgctgtgcttacatcagcatctggaagactttcctctcctctaatctgtgtacacatctccaagcaaggaagaaaaaacaaactctgctcagacgcctatgaaacacctgaatgaactttgatgaagtacagtctgagttaccatcatgcacaagtagaactgctcttggacttgttttcctgttgtttgtggaacctacgcgtttgaatggcttgaacgttgcatcttttaaagttattttttaaggtttcttggcatttatcctagttgtccgtgtttggcaatgtgctgttaaagtaatagacttttaatctttatgtattttttgttttctctggagtacttggacagatgttatagtggtttcttttaggaaaatctgtcattaaaaaagttatagccttgcaaataaccactcacagtatttgagtcacagtttattttagtgagacgtaaagagtgctgacttcatttatttttctacctatatacctagtggaaaaggggaagactaatgttttcaaataaacaaacagaaacctaacagaa

SEQ ID NO: 29425 - DNA, 4585 bp, Homo sapiens
  source 1..4585: mol_type = unassigned DNA
cgccggtgaggtaggggcgggaggcggggggagacatggctcggcgcggctggcggcgggcacccctccgccgtggcgtcggcagcagtccccgagcccgcaggctcatgcggcccctttggttgctcctcgcagtgggcgtctttgactgggcaggggcttcggacggcggcggcggagaggctagagccatggacgaggagatcgtgtccgagaagcaagccgaggagagccaccggcaggacagcgccaacctgctcatcttcatcctgctgctcaccctcaccattctcacaatctggctcttcaagcaccgccgggcccgcttcctgcacgaaaccggcctggctatgatttatggtcttttggtgggccttgtgcttcggtatggcattcatgttccgagtgatgtaaataatgtgaccctgagctgtgaagtgcagtcaagtccaactaccttactggttacttttgatccagaagtatttttcaacatattacttcctcctatcatattttatgcaggttatagcctgaaaaggagacatttttttcgaaatcttgggtctatcctagcatacgcttttcttggaacagcaatttcttgtttcgttattgggtcaataatgtatggctgtgtaacgctgatgaaggtaacgggacaacttgcaggagatttttactttacagattgcctactgtttggtgccattgtatcagcaactgatccagtgactgttcttgctatattccacgagcttcaagttgatgttgaactctatgcacttctttttggtgaaagtgtcctcaatgatgctgttgccatagtgctgtcctcctcaatagtggcataccagccagctggagacaacagtcacacctttgatgtcacagcgatgttcaagtctattgggatcttccttggaatcttcagtggatcttttgcaatgggtgctgctactggagtggtgacagctttagtgacaaagttcaccaaattacgggagttccagttgttggagacaggcctgttcttcttgatgtcctggagtaccttcctcttggctgaagcatggggcttcacaggtgtagttgcagtattgttttgtggcatcacacaagcacattatacgtataataatttgtccacggagtctcagcatagaactaaacagttgtttgagcttctcaatttcttggcagagaatttcatcttctcctacatggggctgacactgttcaccttccagaaccatgtctttaacccaacatttgtagtaggagcatttgttgctattttcttgggaagagctgccaatatttaccccttgtccctcttacttaatttgggtagaagaagtaagattggatcaaattttcaacacatgatgatgtttgctggccttcgtggtgcaatggcatttgccttggccattcgagatactgccacttatgcacggcaaatgatgttcagcaccacgcttctgattgtgttttttaccgtgtgggtatttggtggtggcaccactgcaatgctgtcatgcttgcatatcagggttggtgttgattcagaccaagaacacttgggtgttcctgaaaatgaaaggagaactaccaaagcagagagtgcttggcttttccggatgtggtacaactttgatcataactatctgaagcctctgctgacccacagcgggcctccgctgacaacaacactccctgcctgctgtggacccatcgccaggtgcctcaccagcccccaggcttacgaaaaccaggaacagttgaaagatgatgattctgatcttattctcaatgatggtgacatcagtttgacatatggagattctactgtgaacactgaaccggccacatccagcgccccaaggagatttatgggaaacagttctgaagatgccttggatcgggagcttgcatttggggaccatgaactggtcattcgaggaacacgcctggttcttccaatggatgattctgaacccccgctaaatttgttagataatacgagacatggtccagcctaagcttactaatactcacttagtgatttgtaaaatttgcacatgtgattgtgaagaaatttgtactacctaaaagtcccagtgcatgtctctgaatgtgtaagctatataaatgctatttatatggcatagaaagaatataaatatcctgtacacggcagattgtgaacaaactatattcctttaagttttcctggttgcactctgtagactggatctgttttaggaagttactttcacagtgatgttgtgtgttctgttagttttatgtctcagttaaagtgtaaaaagtgacggattttctctttcttaaacttacctgacacttaaccagagtaccagttctcgtgatgtgaattaatttttttgtgtgctaggggagggagagtgaggagggagtgttatttccttgggaacctagggaggagaggttcctttgttgggaaacttttgttgatagctgctgcctttgtcctgatcgttttctttcccttttctctggtggcctgttgtggtgcaacgagctgatggcatttgatcttgccccattcaggttggggagtgaagtgtgaggacccttttcccccgcttgctgtgaaagcacagattcattgactacagtacactgttgttcagaaaagaaggctgcaaatgacttctgagactttatgtcttttcttccagaccaagaccgtagaaggagtcacatctagccggcttagccaaagtacaggtgtatatagttcagggcacttgatttagatttggaggggctggggtgggcagagagcaagaggcgagtaaagagaatggtggtttcagagatctctcttcccaaatgtgtaaatattctataccagataagtttaaataagaaatttaattgctgcttaatttttgattatgtactttatctgtatagcaggctttgtcgtcagaagtttttatatcgatttaaattgctgctctttagcagccaaacaggagcaaaatgtaaaatttttgaacttactgtgtctaatcatcatttgttagtctgtagttaatgtcaacagttaatttatgaacccacgatcgttccacactgcaccaaagtcagtcataagagaaatcgaatattctggagcactgattgcagcagggtggctcctttgtgtgcagcaggtgtagtagtcttcattttcatggtacgttttaatattaattacctaagctgccatgcatttttttttttacagttctcaaggaagagcacagaacaatttctcatttcatatttggagtatgaaagtagattctattttgtaatgctgataatacctaaagatgcattgaatgcttggaagaatgctttttgatgttgattttgacctgttcatgattcagaagaaaaacaaacttttttggattttttttccctcaggtctgagtagcattgccttaaatcttatccagttagaacattgatttatttacatgatgttcagattttccagtgaaaaatacccttctgaacaaaacatgtacttactctccgaaaggcatctatctgtgctattgcaaacactccttgagattttaggggaattctaatgttgtaccctttcgtggcagctttgactgttggcatagccatttgttatgtagtggtagcgactttcctgctatgcaggaatccctcccatgacgtgtatgttttacatgatgtgtgcctcttcacgcagtaaatagtttcttgttaatgtatgtttgaggagtttgaacgtcagtgtcacttacccacaaagttattcaagttgtaaaaggttatacaataatttaacaactaccttttttattctgtcgggttactgacctcactttatgtaaatacttcgcatgacaaattcagtaactcgtctatttcagcatgcataagacttttcactagggaaactgataaagcttgagtcaactaaatctgccttcatactttatcaaggggaaccaagcctgctgtgcttacatcagcatctggaagactttcctctcctctaatctgtgtacacatctccaagcaaggaagaaaaaacaaactctgctcagacgcctatgaaacacctgaatgaactttgatgaagtacagtctgagttaccatcatgcacaagtagaactgctcttggacttgttttcctgttgtttgtggaacctacgcgtttgaatggcttgaacgttgcatcttttaaagttattttttaaggtttcttggcatttatcctagttgtccgtgtttggcaatgtgctgttaaagtaatagacttttaatctttatgtattttttgttttctctggagtacttggacagatgttatagtggtttcttttaggaaaatctgtcattaaaaaagttatagccttgcaaataaccactcacagtatttgagtcacagtttattttagtgagacgtaaagagtgctgacttcatttatttttctacctatatacctagtggaaaaggggaagactaatgttttcaaataaacaaacagaaacctaacagaa

SEQ ID NO: 29426 - DNA, 4460 bp, Homo sapiens
  source 1..4460: mol_type = unassigned DNA
cctcggggagtggtccgaccgcgggcggccgccggtgagtgggcgtctttgactgggcaggggcttcggacggcggcggcggagaggctagagccatggacgaggagatcgtgtccgagaagcaagccgaggagagccaccggcaggacagcgccaacctgctcatcttcatcctgctgctcaccctcaccattctcacaatctggctcttcaagcaccgccgggcccgcttcctgcacgaaaccggcctggctatgatttatggtcttttggtgggccttgtgcttcggtatggcattcatgttccgagtgatgtaaataatgtgaccctgagctgtgaagtgcagtcaagtccaactaccttactggtaaatgttagtggaaaattttatgagtatatgctgaaaggagagattagttcacatgaactcaataatgttcaagataatgaaatgcttagaaaggttacttttgatccagaagtatttttcaacatattacttcctcctatcatattttatgcaggttatagcctgaaaaggagacatttttttcgaaatcttgggtctatcctagcatacgcttttcttggaacagcaatttcttgtttcgttattgggtcaataatgtatggctgtgtaacgctgatgaaggtaacgggacaacttgcaggagatttttactttacagattgcctactgtttggtgccattgtatcagcaactgatccagtgactgttcttgctatattccacgagcttcaagttgatgttgaactctatgcacttctttttggtgaaagtgtcctcaatgatgctgttgccatagtgctgtcctcctcaatagtggcataccagccagctggagacaacagtcacacctttgatgtcacagcgatgttcaagtctattgggatcttccttggaatcttcagtggatcttttgcaatgggtgctgctactggagtggtgacagctttagtgacaaagttcaccaaattacgggagttccagttgttggagacaggcctgttcttcttgatgtcctggagtaccttcctcttggctgaagcatggggcttcacaggtgtagttgcagtattgttttgtggcatcacacaagcacattatacgtataataatttgtccacggagtctcagcatagaactaaacagttgtttgagcttctcaatttcttggcagagaatttcatcttctcctacatggggctgacactgttcaccttccagaaccatgtctttaacccaacatttgtagtaggagcatttgttgctattttcttgggaagagctgccaatatttaccccttgtccctcttacttaatttgggtagaagaagtaagattggatcaaattttcaacacatgatgatgtttgctggccttcgtggtgcaatggcatttgccttggccattcgagatactgccacttatgcacggcaaatgatgttcagcaccacgcttctgattgtgttttttaccgtgtgggtatttggtggtggcaccactgcaatgctgtcatgcttgcatatcagggttggtgttgattcagaccaagaacacttgggtgttcctgaaaatgaaaggagaactaccaaagcagagagtgcttggcttttccggatgtggtacaactttgatcataactatctgaagcctctgctgacccacagcgggcctccgctgacaacaacactccctgcctgctgtggacccatcgccaggtgcctcaccagcccccaggcttacgaaaaccaggaacagttgaaagatgatgattctgatcttattctcaatgatggtgacatcagtttgacatatggagattctactgtgaacactgaaccggccacatccagcgccccaaggagatttatgggaaacagttctgaagatgccttggatcgggagcttgcatttggggaccatgaactggtcattcgaggaacacgcctggttcttccaatggatgattctgaacccccgctaaatttgttagataatacgagacatggtccagcctaagcttactaatactcacttagtgatttgtaaaatttgcacatgtgattgtgaagaaatttgtactacctaaaagtcccagtgcatgtctctgaatgtgtaagctatataaatgctatttatatggcatagaaagaatataaatatcctgtacacggcagattgtgaacaaactatattcctttaagttttcctggttgcactctgtagactggatctgttttaggaagttactttcacagtgatgttgtgtgttctgttagttttatgtctcagttaaagtgtaaaaagtgacggattttctctttcttaaacttacctgacacttaaccagagtaccagttctcgtgatgtgaattaatttttttgtgtgctaggggagggagagtgaggagggagtgttatttccttgggaacctagggaggagaggttcctttgttgggaaacttttgttgatagctgctgcctttgtcctgatcgttttctttcccttttctctggtggcctgttgtggtgcaacgagctgatggcatttgatcttgccccattcaggttggggagtgaagtgtgaggacccttttcccccgcttgctgtgaaagcacagattcattgactacagtacactgttgttcagaaaagaaggctgcaaatgacttctgagactttatgtcttttcttccagaccaagaccgtagaaggagtcacatctagccggcttagccaaagtacaggtgtatatagttcagggcacttgatttagatttggaggggctggggtgggcagagagcaagaggcgagtaaagagaatggtggtttcagagatctctcttcccaaatgtgtaaatattctataccagataagtttaaataagaaatttaattgctgcttaatttttgattatgtactttatctgtatagcaggctttgtcgtcagaagtttttatatcgatttaaattgctgctctttagcagccaaacaggagcaaaatgtaaaatttttgaacttactgtgtctaatcatcatttgttagtctgtagttaatgtcaacagttaatttatgaacccacgatcgttccacactgcaccaaagtcagtcataagagaaatcgaatattctggagcactgattgcagcagggtggctcctttgtgtgcagcaggtgtagtagtcttcattttcatggtacgttttaatattaattacctaagctgccatgcatttttttttttacagttctcaaggaagagcacagaacaatttctcatttcatatttggagtatgaaagtagattctattttgtaatgctgataatacctaaagatgcattgaatgcttggaagaatgctttttgatgttgattttgacctgttcatgattcagaagaaaaacaaacttttttggattttttttccctcaggtctgagtagcattgccttaaatcttatccagttagaacattgatttatttacatgatgttcagattttccagtgaaaaatacccttctgaacaaaacatgtacttactctccgaaaggcatctatctgtgctattgcaaacactccttgagattttaggggaattctaatgttgtaccctttcgtggcagctttgactgttggcatagccatttgttatgtagtggtagcgactttcctgctatgcaggaatccctcccatgacgtgtatgttttacatgatgtgtgcctcttcacgcagtaaatagtttcttgttaatgtatgtttgaggagtttgaacgtcagtgtcacttacccacaaagttattcaagttgtaaaaggttatacaataatttaacaactaccttttttattctgtcgggttactgacctcactttatgtaaatacttcgcatgacaaattcagtaactcgtctatttcagcatgcataagacttttcactagggaaactgataaagcttgagtcaactaaatctgccttcatactttatcaaggggaaccaagcctgctgtgcttacatcagcatctggaagactttcctctcctctaatctgtgtacacatctccaagcaaggaagaaaaaacaaactctgctcagacgcctatgaaacacctgaatgaactttgatgaagtacagtctgagttaccatcatgcacaagtagaactgctcttggacttgttttcctgttgtttgtggaacctacgcgtttgaatggcttgaacgttgcatcttttaaagttattttttaaggtttcttggcatttatcctagttgtccgtgtttggcaatgtgctgttaaagtaatagacttttaatctttatgtattttttgttttctctggagtacttggacagatgttatagtggtttcttttaggaaaatctgtcattaaaaaagttatagccttgcaaataaccactcacagta

SEQ ID NO: 29427 - DNA, 3838 bp, Homo sapiens
  source 1..3838: mol_type = unassigned DNA
gaggaggcgcggggggccccgggaccatggagcctggtgacgcggcgcgccctggctcgggtcgggctaccggggcgccgccgccgcggctgctgctgctgccgctgctgctgggttgggggctgcgagtcgcggccgcggcctcggcctcctcctctggggcggcggcggaggacagcagcgccatggaggagctcgctactgagaaggaggcggaggagagccaccggcaagacagcgtgagcctgctcaccttcatcctgctgctcacgctcaccatcctcaccatctggctcttcaagcaccgccgggtgcgctttctgcacgagaccgggctggccatgatctatgggctcatcgttggggtgatcctgaggtatggtacccctgctaccagtggccgtgacaaatcactcagctgcactcaggaagacagggccttcagtaccttattagtgaatgtcagcggaaagttcttcgaatacactctgaaaggagaaatcagtcctggcaagatcaacagcgtagagcagaatgatatgctacggaaggtaacattcgatccagaagtatttttcaacattcttctgcctccaattatttttcatgctggatacagcttaaagaagagacactttttcagaaatcttggatctatactggcctatgccttcttggggactgctgtttcatgcttcattattggaaatctcatgtatggtgtggtgaagctcatgaagattatgggacagctctcagataaattttactacacagattgtctcttttttggagcaatcatctctgccactgacccagtgactgtgctggcgatatttaatgaattgcatgcagacgtggatctttacgcacttctttttggagagagcgtcctaaatgatgctgttgccattgtactgtcctcgtctattgttgcctaccagccagcgggactgaacactcacgcctttgatgctgctgccttttttaagtcagttggcatttttctaggtatatttagtggctcttttaccatgggagctgtgactggtgttaatgccaacgtgactaagtttaccaaactgcactgcttccccctgctggagacggcgctgttcttcctcatgtcctggagcacgtttctcttggcagaagcctgcggatttacaggtgttgtagctgtccttttctgtggaatcacacaagctcattacacctacaacaatctgtcggtggaatcaagaagtcgaaccaagcagctctttgaggtgttacatttcctggcagagaacttcatcttctcctacatgggcctggcactgtttaccttccagaagcacgttttcagccccattttcatcatcggagcttttgttgccatcttcctgggcagagccgcgcacatctacccgctctccttcttcctcaacttgggcagaaggcataagattggctggaattttcaacacatgatgatgttttcaggcctcaggggagcaatggcatttgcgttggccatccgtgacacggcatcctatgctcgccagatgatgttcacgaccacccttctcattgtgttcttcactgtctggatcattggaggaggcacgacacccatgttgtcatggcttaacatcagagttggcgtcgaggagccctccgaagaggaccagaatgaacaccactggcagtacttcagagttggtgttgaccccgatcaagacccaccacccaacaacgacagctttcaagtcttacaaggggacggcccagattctgccagaggaaaccggacaaaacaggagagcgcatggatattcaggctgtggtacagctttgatcacaattacctgaagcccatcctcacacacagtggtcccccactaaccaccacgctccccgcctggtgtggcttactagctcgatgtctgaccagtccccaggtgtacgataaccaagagccactgagagaggaagactctgatttcatcctgaccgaaggcgacctgacattgacctacggggacagcacagtgactgcaaatggctcctcaagttcgcacaccgcctccacgagtctggagggcagccggagaacgaagagcagctcggaggaagtgctggagcgagacctgggaatgggagaccagaaggtttcgagccggggcacccgcctagtgtttcccctggaagataatgcttgactttccccccaagccctggcgcgatggggtaggctcccgatggggtgaggacagctgcaagccctagtgttgttggaggtggggcagtgactagattgaactaactcttctattttattggggtctgaagctattgtaacacttaaaatttaactcacaatgcagatggtgaggcaaaagtgtctctaaattcagacaaacgtagacctattcccacttttttcacatagtagtgcgctgtttcagagttaaacaaacaaaaaaaaatagcatgctttaatggtctcctaattcattcacctgcagtatctgaacaaggcgaggcaggtgctgggtggggggattcctcccatgagaggctgcatctcagtacacagcagtgcaagtcaagctgaccatagaattatcaagttaaagagaaggaaggcaattgagatcggaactccaaggattatgggaaacttggtgttaaatgggacagaaaacatgaaaaagcaatttggaggctctggcaacgaagtctgcttgactgcaacctcatatcaggattcctgactttatgctgcctgtgttttttctagactgaagatttgaaaatacatccacgaacatttcaacatggaacgaagaattatagttccttctctggctatatccataaagaagtagttatgaaatgtttaaaaccaaaggcaaatagtgttatactcttattttttgattaatctgaggaaaggaggtatttagaaactgatgatggtatcactgcaaaaagcattcaactttttttttttgttgagatggtgtttcactctgtcacccaggctggagtgcagtggcgtggtcttggctcactgcaacctctgcctcacgggttcaagtgattctcctgcctcagcctcctgattagctgggattacaggtgcccaccaccatgcccagctaattttttgtatttttggtagagatggggtttcaccatgttgcccaggctggtgtcaaactcctgacctcgtgatccacctcccttggcctcccaaagtgctgggattacaggtgtgagccactgcacctggccagcattcaacttttgagggctaccatatgagctgacagcctagggaaataatcactaggactgaagtatctactctgggtttagaaataacaccaaattttgtaggatgctattatctgggaaagggaaggcagcaagaaacctacaaggcaccaggctagaattcagagggaaagaaatctcaatgcaaaaaaattactgcaaagaaatacaagatagtagtctcaagactaggtagaattccaaactttgagccgacgaatgcatgagatttcagtggccacctgaggaatcagagggcaaacaatggaacattaagtattttcagcccactagaaagctctgtcttctataagcttaagagtccgagtgtctttacaccactgagtgccatgcagagaagggtcattttccttgtatctggggaggctgctgcaccagcttaacatgtgggtgtgatttgaaagttaggttttcagtttggattctttctggatgagctgttctgtctgcccacacctgtagtgctgaaatacagaaagacctctcgggaaaa

SEQ ID NO: 29428 - DNA, 6094 bp, Homo sapiens
  source 1..6094: mol_type = unassigned DNA
gccccgcggctccgaactcggtggtcctggaagctccgcaggatgggggagaagatggcggaagaggagaggttccccaatacaactcatgagggtttcaatgtcaccctccacaccaccctggttgtcacgacgaaactggtgctcccgacccctggcaagcccatcctccccgtgcagacaggggagcaggcccagcaagaggagcagtccagcggcatgaccattttcttcagcctccttgtcctagctatctgcatcatattggtgcatttactgatccgatacagattacatttcttgccagagagtgttgctgttgtttctttaggtattctcatgggagcagttataaaaattatagagtttaaaaaactggcgaattggaaggaagaagaaatgtttcgtccaaacatgtttttcctcctcctgcttccccctattatctttgagtctggatattcattacacaagggtaacttctttcaaaatattggttccatcaccctgtttgctgtttttgggacggcaatctccgcttttgtagtaggtggaggaatttattttctgggtcaggctgatgtaatctctaaactcaacatgacagacagttttgcgtttggctccctaatatctgctgtcgatccagtggccactattgccattttcaatgcacttcatgtggaccccgtgctcaacatgctggtctttggagaaagtattctcaacgatgcagtctccattgttctgaccaacacagctgaaggtttaacaagaaaaaatatgtcagatgtcagtgggtggcaaacatttttacaagcccttgactacttcctcaaaatgttctttggctctgcagcgctcggcactctcactggcttaatttctgcattagtgctgaagcatattgacttgaggaaaacgccttccttggagtttggcatgatgatcatttttgcttatctgccttatgggcttgcagaaggaatctcactctcaggcatcatggccatccttttctcaggcatcgtgatgtcccactacacgcaccataacctctccccagtcacccagatcctcatgcagcagaccctccgcaccgtggccttcttatgtgaaacatgtgtgtttgcatttcttggcctgtccatttttagttttcctcacaagtttgaaatttcctttgtcatctggtgcatagtgcttgtactatttggcagagcggtaaacattttccctctttcctacctcctgaatttcttccgggatcataaaatcacaccgaagatgatgttcatcatgtggtttagtggcctgcggggagccatcccctatgccctgagcctacacctggacctggagcccatggagaagcggcagctcatcggcaccaccaccatcgtcatcgtgctcttcaccatcctgctgctgggcggcagcaccatgcccctcattcgcctcatggacatcgaggacgccaaggcacaccgcaggaacaagaaggacgtcaacctcagcaagactgagaagatgggcaacactgtggagtcggagcacctgtcggagctcacggaggaggagtacgaggcccactacatcaggcggcaggaccttaagggcttcgtgtggctggacgccaagtacctgaaccccttcttcactcggaggctgacgcaggaggacctgcaccacgggcgcatccagatgaaaactctcaccaacaagtggtacgaggaggtacgccagggcccctccggctccgaggacgacgagcaggagctgctctgacgccaggtgccaaggcttcaggcaggcaggcccaggatgggcgtttgctgcgcacagacactcagcaggggcctcgcagagatgcgtgcatccagcagccccttcaagacataagagggcggggcgaggtactggctgcagagtcgccttagtccagaacctgacaggcctctggagccaggcgacttcttgggaaactgtcatctcccgactcctccctgagccagcctccgctcagtgtggctcctcagcccacagaggggagggagcatggggccaggtgccagtcatctgtgaagctagggcgcctacccccccacccggaggacccctgcggccccctgcctagaggagcaccatctacagttgtgccattccccagccactgccttcatgctgcccccgccggactggcagagccaggggtcagccacctgcctttgagtcatcaagatgcctctgcagccacaattctgacctaagtggcagggcccagaaatcctgaaaacctcccgctgccttttgtgatacttcctgtgctccctcagagagaaacggagtgaccttttgtcctttacctgattggcacttcgcagtctatctccctgggtagcagacggctgctgcccttctctgggcatgttctgaatgtttacactggtaccttctggtatcttctttagagccccctgcaagctgcaactctaggcttttatcttgcggggtcagagcgccctctagagggaaaagctagaggcacagggtttctgccggcccacaactgctgtcttgatttgcattttacagcaaagtgctgagagcctctagtcgcctcctgccatctgatctccctccccaccattcccgtactcagttgttcttttgtctaatcggaggccactgtgctgaggccctgcagtgtctgctcactgctgccatcttcgctgctagtcagggttccatcctctttcccctctcccagttccctaccacgttggatcccattcgtcacccatgctagggtccccaaagcactggggcaggggccagagcagcagcacccagtgctccctcctctactctgacctggggccccagcatcctggagcacacgctccacgcacacacaccccagccctgtcccaggggcctggccccctcagccatctcagggtgaggagctgccagtcatgtccagatggaatgactcccatcctctcctcatctcccctttgacgagcctcaaactgctcagctcatcaaagagccattgccaacttccgtatgtggttctgggtcccagggagccttggaacctggcaccctggggtggtttaattcatcattaagaagcattcctgcttctcaagggacacagtggcctgcatgggccagcatggaccctgggctgatcatgtgcattcctgcttctctggggacacagtgggcccacatgggccagcatggaccctgggctagagcaagcacatctccatctcttccacctcaggcagtgtggctccagatgtcaggagggactgacctcaggaccttccaggttcctctgtgccaggaatgagaggccaggcccgatcctaccacctcgccttgaccctgaagtcagagcaggccagccaagcaggaagcacactgtttactttttgcatgaaaagtaaatgtgtacttgatagagctaaaatatgatcttttttaatttctcaaccccataatttgagccattgccttgcttaattttggtttccaccatttccttttagtggagaagagaggaagtcagagggtagggacctttgcctgcccctgggcgagtgcgggcagggatctgagaccagattgttctcgcacccctgccagaactcactctcccctgaagtttagggtcccatctcccagatgtaagttgttttgcaaactcagtttgccaggatttctttctttcctaatcttaaattcacagataaagcaatgaaaagagtcagatcccatttccgtctgccccctcgtcaccaggtgtgatagccccagccaggtcacacctggcctcacactttgagctgagacttgaaaacgatgctgtggcggaagagcatgtggggcttggtggaggggccccaggatttgttgggggcaaagggggtggcgggaccgttcccaggaggtaccagcacctgcctcgatctcctctgagcctcttctgccccctgtcggccaggtgaggtcagcagcctgggagagtgcccccaagagatgagggcaccccgtgttccttggcaatcttggctcaccttggtaacaaaaggccatagaagtctgtttttctgggtcagttttttttgcctgagaataacaaattgctgctgtctacctttagcacacccaataattctatttggggcagtgaatgcatagaagatataaaaatacgcagcttaactatatcttcctgcgtgtgtatttattttcttctgggtctaggccatggtacaggagaactgtggcgtgtaggaggaatacttcaggatgagtgaaggctggagccagggagcgctggaggaaaccagccctttagccagcagcccctccaccacaggcactgctgtgtggaacgagttcttggaatgaatcccatgctttctgcagcctgtagttgttatgacccctcggaacaaccaccccgtggcttgtgtggggtctcgcagggaaaagggctggcttctaggtccccgagataagtgtgcagggggatgggccagggccaggctaagggtggctcagttccatcatctggaggtcagacacactgtccagaggcagaactgaagccctctcggcccctaccctaagccagccacccctcttcacagtgggtgagctgggctgggctggctggcatgaggccaaggggtaggcctgagcgccagagtcgcccaggttagcccacaggattcctttgtgtgccatggaatgctgaaagatgggtgactggggacccttcttaaaacctttggcaaaggtgccatcggcagggcttggcctcatgaagtctcaggtccgtgttcccgcagggcgcacatgcttggagagtcctcagcagggtagccgaggccaggccacttctgctgaggatggggcaggctggggtgtgggtgtggcctggggtggctcagggctggaactgctgcctgattcctgtgtggggagaagctcagtggccgtttgctgccactgacaaggatttcacatgcagaagagaaaaggcccccctccaccccccgcattccctgccgagtgagagccagtgtttgctgcccttgctgggggcgggtaggaaaccctgagcttcctgatgcggagtcatgaagcagagtcctcgggaaggcatctccacagccccgggtcctctgtctaacgccctccatttcacgccctccatctcacagtcaagataaaggcctcgagaataaagagccagcccccttccatttagtctcctgccgtttcccaaacagttgtccaacagttagacattgaggggcttcactgttaccaggcatgtaacagaaggaggaagactaacacacaccccctgccccatcccatccccctctcccgagctattttcttgctgtggcctctggtgcccttgagttggtctccccggctgctctgcgggggcttcactggcttcggagtgagcgcgaagtgctggtgagcagtgggcctgtgattggatgggaagatgtgcatccgtggtcaaaagtcagctgccagccctgcggaaccagagcctcaggctgggatggggaggcctccctgcttccacctgcatggtgggcatggcctggcttacaccaaaggctttgacggtttctccaagtaaggatctgcaaatcttgaatcgtcctcaaaatgacgaagcttgaattgtcctcaagatggatgtgaatcttacattccttttcatcatttcctttgtaaaaatgacgagtgctgggtttttgttttaagaagcattatgaaggccagacttactcatttttctcccccaagtgagctgcaagaggcccctgttaggcccctgtttcctgagcagtgatgtgctgctcttcttggtggggctttgggctgggaggggaaggcgggtcagagatgggggacctgtggctgccatgcaggagcccctgcgtcatctcgttggactctttaagggagtcaggaatagatgtatgaacagtcgtgtcactggatgcctatttagaaataaagtgtatgctgctgaattgga

SEQ ID NO: 29429 - DNA, 6303 bp, Homo sapiens
  source 1..6303: mol_type = unassigned DNA
ccgaaagccccgggagagactaagaagcaatcctcccacgcgctttctcccaccctcgggccactgagacggagggacagagggccgccctcgcgcggccgaggccccgcctcccgctcgcccgcccgcgcctccagcggaagccggaagcaaaagcgggtcctgctagccccgcggctccgaactcggtggtcctggaagctccgcaggatgggggagaagatggcggaagaggagaggttccccaatacaactcatgagggtttcaatgtcaccctccacaccaccctggttgtcacgacgaaactggtgctcccgacccctggcaagcccatcctccccgtgcagacaggggagcaggcccagcaagaggagcagtccagcggcatgaccattttcttcagcctccttgtcctagctatctgcatcatattggtgcatttactgatccgatacagattacatttcttgccagagagtgttgctgttgtttctttaggtattctcatgggagcagttataaaaattatagagtttaaaaaactggcgaattggaaggaagaagaaatgtttcgtccaaacatgtttttcctcctcctgcttccccctattatctttgagtctggatattcattacacaagggtaacttctttcaaaatattggttccatcaccctgtttgctgtttttgggacggcaatctccgcttttgtagtaggtggaggaatttattttctgggtcagggttttttttttgtgtgtgtctgtgtgtttgtgtgttttattttacaggctgatgtaatctctaaactcaacatgacagacagttttgcgtttggctccctaatatctgctgtcgatccagtggccactattgccattttcaatgcacttcatgtggaccccgtgctcaacatgctggtctttggagaaagtattctcaacgatgcagtctccattgttctgaccaacacagctgaaggtttaacaagaaaaaatatgtcagatgtcagtgggtggcaaacatttttacaagcccttgactacttcctcaaaatgttctttggctctgcagcgctcggcactctcactggcttaatttctgcattagtgctgaagcatattgacttgaggaaaacgccttccttggagtttggcatgatgatcatttttgcttatctgccttatgggcttgcagaaggaatctcactctcaggcatcatggccatccttttctcaggcatcgtgatgtcccactacacgcaccataacctctccccagtcacccagatcctcatgcagcagaccctccgcaccgtggccttcttatgtgaaacatgtgtgtttgcatttcttggcctgtccatttttagttttcctcacaagtttgaaatttcctttgtcatctggtgcatagtgcttgtactatttggcagagcggtaaacattttccctctttcctacctcctgaatttcttccgggatcataaaatcacaccgaagatgatgttcatcatgtggtttagtggcctgcggggagccatcccctatgccctgagcctacacctggacctggagcccatggagaagcggcagctcatcggcaccaccaccatcgtcatcgtgctcttcaccatcctgctgctgggcggcagcaccatgcccctcattcgcctcatggacatcgaggacgccaaggcacaccgcaggaacaagaaggacgtcaacctcagcaagactgagaagatgggcaacactgtggagtcggagcacctgtcggagctcacggaggaggagtacgaggcccactacatcaggcggcaggaccttaagggcttcgtgtggctggacgccaagtacctgaaccccttcttcactcggaggctgacgcaggaggacctgcaccacgggcgcatccagatgaaaactctcaccaacaagtggtacgaggaggtacgccagggcccctccggctccgaggacgacgagcaggagctgctctgacgccaggtgccaaggcttcaggcaggcaggcccaggatgggcgtttgctgcgcacagacactcagcaggggcctcgcagagatgcgtgcatccagcagccccttcaagacataagagggcggggcgaggtactggctgcagagtcgccttagtccagaacctgacaggcctctggagccaggcgacttcttgggaaactgtcatctcccgactcctccctgagccagcctccgctcagtgtggctcctcagcccacagaggggagggagcatggggccaggtgccagtcatctgtgaagctagggcgcctacccccccacccggaggacccctgcggccccctgcctagaggagcaccatctacagttgtgccattccccagccactgccttcatgctgcccccgccggactggcagagccaggggtcagccacctgcctttgagtcatcaagatgcctctgcagccacaattctgacctaagtggcagggcccagaaatcctgaaaacctcccgctgccttttgtgatacttcctgtgctccctcagagagaaacggagtgaccttttgtcctttacctgattggcacttcgcagtctatctccctgggtagcagacggctgctgcccttctctgggcatgttctgaatgtttacactggtaccttctggtatcttctttagagccccctgcaagctgcaactctaggcttttatcttgcggggtcagagcgccctctagagggaaaagctagaggcacagggtttctgccggcccacaactgctgtcttgatttgcattttacagcaaagtgctgagagcctctagtcgcctcctgccatctgatctccctccccaccattcccgtactcagttgttcttttgtctaatcggaggccactgtgctgaggccctgcagtgtctgctcactgctgccatcttcgctgctagtcagggttccatcctctttcccctctcccagttccctaccacgttggatcccattcgtcacccatgctagggtccccaaagcactggggcaggggccagagcagcagcacccagtgctccctcctctactctgacctggggccccagcatcctggagcacacgctccacgcacacacaccccagccctgtcccaggggcctggccccctcagccatctcagggtgaggagctgccagtcatgtccagatggaatgactcccatcctctcctcatctcccctttgacgagcctcaaactgctcagctcatcaaagagccattgccaacttccgtatgtggttctgggtcccagggagccttggaacctggcaccctggggtggtttaattcatcattaagaagcattcctgcttctcaagggacacagtggcctgcatgggccagcatggaccctgggctgatcatgtgcattcctgcttctctggggacacagtgggcccacatgggccagcatggaccctgggctagagcaagcacatctccatctcttccacctcaggcagtgtggctccagatgtcaggagggactgacctcaggaccttccaggttcctctgtgccaggaatgagaggccaggcccgatcctaccacctcgccttgaccctgaagtcagagcaggccagccaagcaggaagcacactgtttactttttgcatgaaaagtaaatgtgtacttgatagagctaaaatatgatcttttttaatttctcaaccccataatttgagccattgccttgcttaattttggtttccaccatttccttttagtggagaagagaggaagtcagagggtagggacctttgcctgcccctgggcgagtgcgggcagggatctgagaccagattgttctcgcacccctgccagaactcactctcccctgaagtttagggtcccatctcccagatgtaagttgttttgcaaactcagtttgccaggatttctttctttcctaatcttaaattcacagataaagcaatgaaaagagtcagatcccatttccgtctgccccctcgtcaccaggtgtgatagccccagccaggtcacacctggcctcacactttgagctgagacttgaaaacgatgctgtggcggaagagcatgtggggcttggtggaggggccccaggatttgttgggggcaaagggggtggcgggaccgttcccaggaggtaccagcacctgcctcgatctcctctgagcctcttctgccccctgtcggccaggtgaggtcagcagcctgggagagtgcccccaagagatgagggcaccccgtgttccttggcaatcttggctcaccttggtaacaaaaggccatagaagtctgtttttctgggtcagttttttttgcctgagaataacaaattgctgctgtctacctttagcacacccaataattctatttggggcagtgaatgcatagaagatataaaaatacgcagcttaactatatcttcctgcgtgtgtatttattttcttctgggtctaggccatggtacaggagaactgtggcgtgtaggaggaatacttcaggatgagtgaaggctggagccagggagcgctggaggaaaccagccctttagccagcagcccctccaccacaggcactgctgtgtggaacgagttcttggaatgaatcccatgctttctgcagcctgtagttgttatgacccctcggaacaaccaccccgtggcttgtgtggggtctcgcagggaaaagggctggcttctaggtccccgagataagtgtgcagggggatgggccagggccaggctaagggtggctcagttccatcatctggaggtcagacacactgtccagaggcagaactgaagccctctcggcccctaccctaagccagccacccctcttcacagtgggtgagctgggctgggctggctggcatgaggccaaggggtaggcctgagcgccagagtcgcccaggttagcccacaggattcctttgtgtgccatggaatgctgaaagatgggtgactggggacccttcttaaaacctttggcaaaggtgccatcggcagggcttggcctcatgaagtctcaggtccgtgttcccgcagggcgcacatgcttggagagtcctcagcagggtagccgaggccaggccacttctgctgaggatggggcaggctggggtgtgggtgtggcctggggtggctcagggctggaactgctgcctgattcctgtgtggggagaagctcagtggccgtttgctgccactgacaaggatttcacatgcagaagagaaaaggcccccctccaccccccgcattccctgccgagtgagagccagtgtttgctgcccttgctgggggcgggtaggaaaccctgagcttcctgatgcggagtcatgaagcagagtcctcgggaaggcatctccacagccccgggtcctctgtctaacgccctccatttcacgccctccatctcacagtcaagataaaggcctcgagaataaagagccagcccccttccatttagtctcctgccgtttcccaaacagttgtccaacagttagacattgaggggcttcactgttaccaggcatgtaacagaaggaggaagactaacacacaccccctgccccatcccatccccctctcccgagctattttcttgctgtggcctctggtgcccttgagttggtctccccggctgctctgcgggggcttcactggcttcggagtgagcgcgaagtgctggtgagcagtgggcctgtgattggatgggaagatgtgcatccgtggtcaaaagtcagctgccagccctgcggaaccagagcctcaggctgggatggggaggcctccctgcttccacctgcatggtgggcatggcctggcttacaccaaaggctttgacggtttctccaagtaaggatctgcaaatcttgaatcgtcctcaaaatgacgaagcttgaattgtcctcaagatggatgtgaatcttacattccttttcatcatttcctttgtaaaaatgacgagtgctgggtttttgttttaagaagcattatgaaggccagacttactcatttttctcccccaagtgagctgcaagaggcccctgttaggcccctgtttcctgagcagtgatgtgctgctcttcttggtggggctttgggctgggaggggaaggcgggtcagagatgggggacctgtggctgccatgcaggagcccctgcgtcatctcgttggactctttaagggagtcaggaatagatgtatgaacagtcgtgtcactggatgcctatttagaaataaagtgtatgctgctg

SEQ ID NO: 29430 - DNA, 2309 bp, Homo sapiens
  source 1..2309: mol_type = unassigned DNA
aagctccgcaggatgggggagaagatggcggaagaggagaggttccccaatacaactcatgagggtttcaatgtcaccctccacaccaccctggttgtcacgacgaaactggtgctcccgacccctggcaagcccatcctccccgtgcagacaggggagcaggcccagcaagaggagcagtccagcggcatgaccattttcttcagcctccttgtcctagctatctgcatcatattggtgcatttactgatccgatacagattacatttcttgccagagagtgttgctgttgtttctttaggtattctcatgggagcagttataaaaattatagagtttaaaaaactggcgaattggaagggtaacttctttcaaaatattggttccatcaccctgtttgctgtttttgggacggcaatctccgcttttgtagtaggtggaggaatttattttctgggtcagttttgcgtttggctccctaatatctgctgtcgatccagtggccactattgccattttcaatgcacttcatgtggaccccgtgctcaacatgctggtctttggagaaagtattctcaacgatgcagtctccattgttctgaccaacacagctgaaggtttaacaagaaaaaatatgtcagatgtcagtgggtggcaaacatttttacaagcccttgactacttcctcaaaatgttctttggctctgcagcgctcggcactctcactggcttaatttctgcattagtgctgaagcatattgacttgaggaaaacgccttccttggagtttggcatgatgatcatttttgcttatctgccttatgggcttgcagaaggaatctcactctcaggcatcatggccatccttttctcaggcatcgtgatgtcccactacacgcaccataacctctccccagtcacccagatcctcatgcagcagaccctccgcaccgtggccttcttatgtgaaacatgtgtgtttgcatttcttggcctgtccatttttagttttcctcacaagtttgaaatttcctttgtcatctggtgcatagtgcttgtactatttggcagagcggtaaacattttccctctttcctacctcctgaatttcttccgggatcataaaatcacaccgaagatgatgttcatcatgtggtttagtggcctgcggggagccatcccctatgccctgagcctacacctggacctggagcccatggagaagcggcagctcatcggcaccaccaccatcgtcatcgtgctcttcaccatcctgctgctgggcggcagcaccatgcccctcattcgcctcatggacatcgaggacgccaaggcacaccgcaggaacaagaaggacgtcaacctcagcaagactgagaagatgggcaacactgtggagtcggagcacctgtcggagctcacggaggaggagtacgaggcccactacatcaggcggcaggaccttaagggcttcgtgtggctggacgccaagtacctgaaccccttcttcactcggaggctgacgcaggaggacctgcaccacgggcgcatccagatgaaaactctcaccaacaagtggtacgaggaggtacgccagggcccctccggctccgaggacgacgagcaggagctgctctgacgccaggtgccaaggcttcaggcaggcaggcccaggatgggcgtttgctgcgcacagacactcagcaggggcctcgcagagatgcgtgcatccagcagccccttcaagacataagagggcggggcgaggtactggctgcagagtcgccttagtccagaacctgacaggcctctggagccaggcgacttcttgggaaactgtcatctcccgactcctccctgagccagcctccgctcagtgtggctcctcagcccacagaggggagggagcatggggccaggtgccagtcatctgtgaagctagggcgcctacccccccacccggaggacccctgcggccccctgcctagaggagcaccatctacagttgtgccattccccagccactgccttcatgctgcccccgccggactggcagagccaggggtcagccacctgcctttgagtcatcaagatgcctctgcagccacaattctgacctaagtggcagggcccagaaatcctgaaaacctcccgctgccttttgtgatacttcctgtgctccctcagagagaaacggagtgaccttttgtcctttacctgattggcacttcgcagtctatctccctgggtagcagacggctgctgcccttctctgggcatgttctgaatgtttacactggtaccttctg

SEQ ID NO: 29431 - DNA, 2163 bp, Homo sapiens
  source 1..2163: mol_type = unassigned DNA
gaagctccgcaggatgggggagaagatggcggaagaggagaggttccccaatacaactcatgagggtttcaatgtcaccctccacaccaccctggttgtcacgacgaaactggtgctcccgacccctggcaagcccatcctccccgtgcagacaggggagcaggcccagcaagaggagcagtccagcggcatgaccattttcttcagcctccttgtcctagctatctgcatcatattggtgcatttactgatccgatacagattacatttcttgccagagagtgttgctgttgtttctttaggtattctcatgggagcagttataaaaattatagagtttaaaaaactggcgaattggaaggaagaagaaatgtttcgtccaaacatgtttttcctcctcctgcttccccctattatctttgagtctggatattcattacacaagggtaacttctttcaaaatattggttccatcaccctgtttgctgtttttgggacggcaatctccgcttttgtagtaggtggaggaatttattttctgggtcagttttgcgtttggctccctaatatctgctgtcgatccagtggccactattgccattttcaatgcacttcatgtggaccccgtgctcaacatgctggtctttggagaaagtattctcaacgatgcagtctccattgttctgaccaattgtcatttacgtgctgaagcatattgacttgaggaaaacgccttccttggagtttggcatgatgatcatttttgcttatctgccttatgggcttgcagaaggaatctcactctcaggcatcatggccatccttttctcaggcatcgtgatgtcccactacacgcaccataacctctccccagtcacccagatcctcatgcagcagaccctccgcaccgtggccttcttatgtgaaacatgtgtgtttgcatttcttggcctgtccatttttagttttcctcacaagtttgaaatttcctttgtcatctggtgcatagtgcttgtactatttggcagagcggtaaacattttccctctttcctacctcctgaatttcttccgggatcataaaatcacaccgaagatgatgttcatcatgtggtttagtggcctgcggggagccatcccctatgccctgagcctacacctggacctggagcccatggagaagcggcagctcatcggcaccaccaccatcgtcatcgtgctcttcaccatcctgctgctgggcggcagcaccatgcccctcattcgcctcatggacatcgaggacgccaaggcacaccgcaggaacaagaaggacgtcaacctcagcaagactgagaagatgggcaacactgtggagtcggagcacctgtcggagctcacggaggaggagtacgaggcccactacatcaggcggcaggaccttaagggcttcgtgtggctggacgccaagtacctgaaccccttcttcactcggaggctgacgcaggaggacctgcaccacgggcgcatccagatgaaaactctcaccaacaagtggtacgaggaggtacgccagggcccctccggctccgaggacgacgagcaggagctgctctgacgccaggtgccaaggcttcaggcaggcaggcccaggatgggcgtttgctgcgcacagacactcagcaggggcctcgcagagatgcgtgcatccagcagccccttcaagacataagagggcggggcgaggtactggctgcagagtcgccttagtccagaacctgacaggcctctggagccaggcgacttcttgggaaactgtcatctcccgactcctccctgagccagcctccgctcagtgtggctcctcagcccacagaggggagggagcatggggccaggtgccagtcatctgtgaagctagggcgcctacccccccacccggaggacccctgcggccccctgcctagaggagcaccatctacagttgtgccattccccagccactgccttcatgctgcccccgccggactggcagagccaggggtcagccacctgcctttgagtcatcaagatgcctctgcagccacaattctgacctaagtggcagggcccagaaatcctgaaaacctcccgctgccttttgtgatacttcctgtgctccctcagagagaaacggagtgacctt

SEQ ID NO: 29432 - DNA, 3627 bp, Homo sapiens
  source 1..3627: mol_type = unassigned DNA
aaaagagacagggctgctttaagagagaaacaggaagttgtaactagaagccatctgaatactaagccagggcagaatgcttgtgaagtagcaactaaagtggcagtgtttcttctgaaattctcaggcagtcagactgtcttaggcaaatcttgataaaatagcctttatccaggtttttatctaaggaatcccaagaagactggggaatggagagacagtcaagggttatgtcagaaaaggatgagtatcagtttcaacatcagggagcggtggagctgcttgtcttcaattttttgctcatccttaccattttgacaatctggttatttaaaaatcatcgattccgcttcttgcatgaaactggaggagcaatggtgtatggccttataatgggactaattttacgatatgctacagcaccaactgatattgaaagtggaactgtctatgactgtgtaaaactaactttcagtccatcaactctgctggttaatatcactgaccaagtttatgaatataaatacaaaagagaaataagtcagcacaacatcaatcctcatcaaggaaatgctatacttgaaaagatgacatttgatccagaaatcttcttcaatgttttactgccaccaattatatttcatgcaggatatagtctaaagaagagacacttttttcaaaacttaggatctattttaacgtatgccttcttgggaactgccatctcctgcatcgtcatagggttaattatgtatggttttgtgaaggctatgatacatgctggccagctgaaaaatggagactttcatttcactgactgtttattttttggttcactgatgtctgctacagatccagtgacagtgctggccattttccatgaactgcacgtcgaccctgacctgtacacactcttgtttggagagagtgtgttgaatgatgcagtggccatagtccttacatattctatatccatttacagtcccaaggagaatccaaatgcatttgatgccgcagcattcttccagtctgtggggaatttcctgggaatcttcgctggctcatttgcaatggggtctgcgtatgccatcatcacagcactgttgaccaaatttaccaagctgtgtgagttcccgatgctggaaaccggcctgtttttcctgctttcttggagtgccttcctgtctgccgaggctgccggcctaacagggatagttgctgttctcttctgtggagtcacacaagcacattatacctacaacaatctgtcttcggattccaaaataagaactaaacagttgtttgaatttatgaactttttggcggagaacgtcatcttctgttacatgggcctggcactgttcacgttccagaatcatatctttaatgctctttttatacttggagcctttctagcaatttttgttgccagagcctgcaacatatatcccctctccttcctcctgaatctaggccgaaaacagaagatcccctggaactttcagcacatgatgatgttttcaggtttgcgaggagcgatcgcatttgccttagctattcggaacacagaatctcagcccaaacaaatgatgtttaccactacgctgctcctcgtgttcttcactgtctgggtatttggaggaggaacaacccccatgttgacttggcttcagatcagagttggcgtggacctggatgaaaatctgaaggaggacccctcctcacaacaccaggaagcaaataacttggataaaaacatgacgaaagcagagagtgctcggctcttcagaatgtggtatagctttgaccacaagtatctgaaaccaattttaacccactctggtcctccgctgactacaacattacctgaatggtgtggtccgatttccaggctgcttaccagtcctcaagcctatggggaacagctaaaagaggatgatgtggaatgcattgtaaaccaggatgaactagccataaattaccaggagcaagcctcctcaccctgcagtcctcctgcaaggctaggtctggaccagaaagcttcaccccagacgccaggcaaggaaaacatttatgagggagacctcggcctgggaggctatgaactcaagcttgagcaaactttgggtcaatcccagttgaattaattggcatgaagagtacagatgtaatcacaagtaatgcaagactcactgaggaatacaagccaagctgatgaggcagtacaggggagaggctggaaaacatattaagagcataaattggagagaatcaaagccttgtcacatggatcctctggtgcctgaagaaatgagattttattatccctctctattatgcaaatgaatttagttttttgacagcagccattctgattactggattggctggggtggggatggaggtatcaggagtctagctgctggaggatgggacagctgtgctgggtcttcagggcatttctgctgcgaatgcggctctccaggcccttcacttctattctggattttattccctccattaaggagagtttaaaaataaaagaaagcttctgagagtaaacattttgctcctaagctgaagggaatgcccagctatttagtaagtgataagtttcttattttgaggacttgactcccatttgctctcagtgaccccagggcagagcccagagaagtgttccgtacccactgctgatggtttcccagagcccacactgagttgaagaacctattgttcttcttggcatccttcttatgctacttctcccatcgctcaaaggggttgcctatggctgggtgtgccctgccctaaatgcagcaccactttcaagcttagtaggaccattccaagaaaaccaggtttcttctccccataccacgttgtgcctgaagaacaagccttcccgtccttgcctgcatgtgagtcacttcttggctgtgcagcaggtccccccctccccgcgatatgctggagggtaggattctgcagcctgtgttgctctctacctggcagcagactgtgcaggagccccaacctgtcctccaattccagcattcacagctgatgagcagtgcaggagcagggcgagaggaacagagccaatgatgtgtgggttacactgaggagccaaggacagggcctcaggtctcccccttacaaggcgtggctcatggcctgcattccagagaccaacatgatagcttttaattcagctgcatgacctgtgccttttaagccataaagatacctcaagcctagcacctcttgaaatccagatgttcatattagactcgaaaaaataggctccaggcctaggtgcccaggctatgatgagtctgcttttgaaggaggtagggaatgacatcttccttggacccaaagcttaaaagtaatgtatgctttgctgaccactgtttgttaggccttaaacaacattcactgtggtggtatcaggcacactgctatgtgcatcaattatttttttgctttccaaacagaatctctggggcacaagttttacactcaagctaagtataactttgtcatttcaggtaaatatgacaagtggtggagcatgaagttttctaatttgacttaatcctaataaatttttgttacaaagta

SEQ ID NO: 29433 - DNA, 978 bp, Homo sapiens
  source 1..978: mol_type = unassigned DNA
cttagactccagagtagctgggagcagatgacatttgatccagaaatcttcttcaatgttttactgccaccaattatatttcatgcaggatatagtctaaagaagagacacttttttcaaaacttaggatctattttaacgtatgccttcttgggaactgccatctcctgcatcgtcatagggttaattatgtatggttttgtgaaggctatgatacatgctggccagctgaaaaatggagactttcatttcactgactgtttattttttggttcactgatgtctgctacagatccagtgacagtgctggccattttccatgaactgcacgtcgaccctgacctgtacacactcttgtttggagagagtgtgttgaatgatgcagtggccatagtccttacatattctatatccatttacagtcccaaggagaatccaaatgcatttgatgccgcagcattcttccagtctgtggggaatttcctgggaatcttcgctggctcatttgcaatggggtctgcgtatgccatcatcacagcactgttgaccaaatttaccaagctgtgtgagttcccgatgctggaaaccggcctgtttttcctgctttcttggagtgccttcctgtctgccgaggctgccggcctaacagggatagttgctgttctcttctgtggagtcacacaagcacattatacctacaacaatctgtcttcggattccaaaataagaactaaacagttgtttgaatttatgaactttttggcggagaacgtcatcttctgttacatgggcctggcactgttcacgttccagaatcatatctttaatgctctttttatacttggagcctttgtatctatattcctagccagagcccacactgagttgaagaacctattgttcttcttggcatccttcttatgctacttctcccatcgctcaaaggggttgcctatggctgggtgtgccctgccctaa

SEQ ID NO: 29434 - DNA, 4172 bp, Homo sapiens
  source 1..4172: mol_type = unassigned DNA
aagagatgatgggcctgaagctaaccggtgcagactaggggcgagtttggagcaagtaactgtcagtgaggttgcagttggtctgggctgtttggctgtgagcgaaatagctgccccccacttctcacttgcacaccacgggatactcctcctgaggctccggatgattcagatggactgtgaaaaacaacaagatggatgatcatatggagattgcttctaacataaatctgcataaaaatttttctgaaacatggctggaatatttaaggagttttttttcagtactgaggacctccctgaagtcattctaacattgtctttgatcagctccattggagcatttttgaaccggcacttggaagactttccaattcctgtccctgtgatattatttttacttggatgcagttttgaagtattaagctttacatcttcacaggtccaaagatacgcaaacgccatacaatggatgagtccagacttattttttcgtatatttacaccagtagttttctttactactgcatttgacatggatacgtacatgcttcaaaagttattttggcagatacttttaatttcaattcccggctttttggttaattatatcttagttctttggcatctggcatctgtaaatcaattacttttgaagcctacccaatggttattattttcagctatccttgtgagttcagatcccatgctaaccgcagctgctataagagaccttgggctttctagaagcctcatcagtttaattaatggagaaagtctgatgacctctgttatatcattaattacatttactagtattatggattttgaccaaagactacaaagtaaaagaaaccataccttagctgaagagatcgtgggtggaatttgttcatatattatagcaagtttcttgtttggaattctaagttcaaaactgattcaattttggatgtcaactgtttttggtgatgatgtcaatcatataagtctcatcttttcaattctgtatctcatcttttatatttgtgagttagttggaatgtcaggaatatttactctggccattgtgggacttcttttaaattctacaagttttaaagcagcaattgaagaaacacttcttcttgaattctggacttttctatcacgtattgcttttctcatggtgtttactttctttggacttctaattcctgcacatacatatttgtatatagaatttgttgatatatactattcattaaatatctacttaacattgattgttttaagatttctgacccttcttttaataagccctgttttgtctcgagttggtcatgagttcagttggcgctggatattcataatggtctgtagtgaaatgaaggggatgcctaatataaacatggcccttctgcttgcctactctgatctttattttggatctgacaaagaaaaatctcaaatattatttcatggagtgttagtatgcctaataacccttgttgtcaatagatttattttgccagtggcagttactatactaggtcttcgtgatgccacatcaacaaaatataaatcggtttgttgcacatttcaacactttcaagagctaaccaagtctgcagcctctgcccttaaatttgacaaagatcttgctaatgctgattggaacatgattgagaaagcaattacacttgaaaacccatacatgttgaacgaagaagaaacaacagaacatcagaaggtgaaatgtccacactgtaacaaggaaatagatgagatctttaacactgaagcaatggagctggccaacaggcgtctcttgtcagcacaaatagcaagctaccagagacaatacaggaatgagattctgtcccagagtgctgtccaggtgttggttggtgcagcagaaagttttggtgagaagaagggaaaatgtatgagtcttgatacaataaagaattattctgaaagccaaaaaacagttacctttgctagaaaactactacttaattgggtgtataataccagaaaggaaaaagagggcccatcaaaatacttcttttttcgtatatgccatacaatagtatttactgaggaatttgaacatgttggataccttgtgatattaatgaatatatttccctttataatctcttggatatcccagttaaatgtaatctaccacagcgaattaaaacacactaactactgttttcttacactttatattctagaggcactacttaagatagcagcaatgaggaaggactttttttcacatgcctggaacatattcgagttagcaattacattaattggcatcttacatgtaatacttattgaaatagacaccattaagtatatttttaatgagactgaagtaatagtctttataaaagttgttcaattttttcgtatactacgcattttcaagctcatagcaccaaagttgctgcaaataatagataaaagaatgagtcatcagaagaccttttggtatggaatactaaaaggctatgtccaaggcgaagcagacataatgaccataattgatcagattacaagttctaaacagattaaacagatgttattaaagcaagtgataaggaatatggaacatgctataaaagagctaggctacttagagtatgatcacccagaaattgctgtcactgtgaaaacaaaggaagaaattaatgttatgctcaatatggctacagaaattcttaaggcttttggcttaaaaggaattattagtaaaactgaaggtgctggaattaataagttaatcatggccaaaaagaaagaggtgcttgattctcaatctattatcaggcctcttactgttgaagaagttctatatcatattccgtggctagataaaaacaaagattatataaacttcattcaggaaaaagccaaagttgtaacatttgattgtggaaatgatatatttgaagaaggtgatgagcccaaaggaatctatatcattatttcaggcatggtaaagcttgaaaaatcaaagccaggtttagggattgatcaaatggtggagtcaaaggagaaagattttccgataattgacacagactatatgctcagtggagaaataataggagagataaactgcttaactaatgaacctatgaaatattctgccacctgcaaaactgtagtggagacatgttttattcccaaaactcacttgtatgatgcttttgagcaatgctctcctctcattaaacaaaaaatgtggctaaaacttggactcgctattacagccagaaaaatcagagaacacttatcttatgaggattggaactacaatatgcaactaaagctctctaatatttatgtagtagatataccaatgagtaccaaaactgatatttatgatgaaaatctaatctatgttatcctcatacatggagctgtagaagattgtctgttacgaaaaacttatagagcacctttcttaattcctataacatgccatcagatacaaagtattgaagatttcacaaaagtagtgattattcaaactccgattaacatgaaaacattcagaaggaatattagaaagtttgttcctaaacataaaagttatcttacaccaggattaataggttcagttggaacattggaagaaggcattcaagaagaaagaaatgttaaggaggatggagcacacagtgccgccactgccaggagtccccagccttgctccctgctggggacaaagttcaactgtaaggagtcccctagaataaacctaaggaaagtcaggaaagagtaagactgttaagaagaccgaagcatgtattaatgctgtggctatgagaggcctcctgctgcagaaacacacttccctacatcaagaaggagtaacttcaggttggatcctgtgtggatgatcttggtgctaagcagaaaagaaatttggaccttgaaaccagcagttcaacatatatactttttgcaaaatttccttgatttaaaatatttgttattttaaatatacaaaacattttagaaaatcttagagtaaattttagtcttaaagccagaaaataagtttatagccatctagatattttgcatattgctcttacagcaataatggtttggttcactttatgaaaaataaaatgtattaaaatatagtttaaatgctgttcttg

SEQ ID NO: 29435 - DNA, 3979 bp, Homo sapiens
  source 1..3979: mol_type = unassigned DNA
agactaggggcgagtttggagcaagtaactgtcagtgaggttgcagttggtctgggctgtttggctgtgagcgaaatagctgccccccacttctcacttgcacaccacgggatactcctcctgaggctccggatgattcagatggactgtgaaaaacaacaagatggatgatcatatggagattgcttctaacataaatctgcataaaaatttttctgaaacatggctggaatatttaaggagttttttttcagtactgaggacctccctgaagtcattctaacattgtctttgatcagctccattggagcatttttgaaccggcacttggaagactttccaattcctgtccctgtgatattatttttacttggatgcagttttgaagtattaagctttacatcttcacaggtccaaagatacgcaaacgccatacaatggatgagtccagacttattttttcgtatatttacaccagtagttttctttactactgcatttgacatggatacgtacatgcttcaaaagttattttggcagatacttttaatttcaattcccggctttttggttaattatatcttagttctttggcatctggcatctgtaaatcaattacttttgaagcctacccaatggttattattttcagctatccttgtgagttcagatcccatgctaaccgcagctgctataagagaccttgggctttctagaagcctcatcagtttaattaatggagaaagtctgatgacctctgttatatcattaattacatttactagtattatggattttgaccaaagactacaaagtaaaagaaaccataccttagctgaagagatcgtgggtggaatttgttcatatattatagcaagtttcttgtttggaattctaagttcaaaactgattcaattttggatgtcaactgtttttggtgatgatgtcaatcatataagtctcatcttttcaattctgtatctcatcttttatatttgtgagttagttggaatgtcaggaatatttactctggccattgtgggacttcttttaaattctacaagttttaaagcagcaattgaagaaacacttcttcttgaatttctgacccttcttttaataagccctgttttgtctcgagttggtcatgagttcagttggcgctggatattcataatggtctgtagtgaaatgaaggggatgcctaatataaacatggcccttctgcttgcctactctgatctttattttggatctgacaaagaaaaatctcaaatattatttcatggagtgttagtatgcctaataacccttgttgtcaatagatttattttgccagtggcagttactatactaggtcttcgtgatgccacatcaacaaaatataaatcggtttgttgcacatttcaacactttcaagagctaaccaagtctgcagcctctgcccttaaatttgacaaagatcttgctaatgctgattggaacatgattgagaaagcaattacacttgaaaacccatacatgttgaacgaagaagaaacaacagaacatcagaaggtgaaatgtccacactgtaacaaggaaatagatgagatctttaacactgaagcaatggagctggccaacaggcgtctcttgtcagcacaaatagcaagctaccagagacaatacaggaatgagattctgtcccagagtgctgtccaggtgttggttggtgcagcagaaagttttggtgagaagaagggaaaatgtatgagtcttgatacaataaagaattattctgaaagccaaaaaacagttacctttgctagaaaactactacttaattgggtgtataataccagaaaggaaaaagagggcccatcaaaatacttcttttttcgtatatgccatacaatagtatttactgaggaatttgaacatgttggataccttgtgatattaatgaatatatttccctttataatctcttggatatcccagttaaatgtaatctaccacagcgaattaaaacacactaactactgttttcttacactttatattctagaggcactacttaagatagcagcaatgaggaaggactttttttcacatgcctggaacatattcgagttagcaattacattaattggcatcttacatgtaatacttattgaaatagacaccattaagtatatttttaatgagactgaagtaatagtctttataaaagttgttcaattttttcgtatactacgcattttcaagctcatagcaccaaagttgctgcaaataatagataaaagaatgagtcatcagaagaccttttggtatggaatactaaaaggctatgtccaaggcgaagcagacataatgaccataattgatcagattacaagttctaaacagattaaacagatgttattaaagcaagtgataaggaatatggaacatgctataaaagagctaggctacttagagtatgatcacccagaaattgctgtcactgtgaaaacaaaggaagaaattaatgttatgctcaatatggctacagaaattcttaaggcttttggcttaaaaggaattattagtaaaactgaaggtgctggaattaataagttaatcatggccaaaaagaaagaggtgcttgattctcaatctattatcaggcctcttactgttgaagaagttctatatcatattccgtggctagataaaaacaaagattatataaacttcattcaggaaaaagccaaagttgtaacatttgattgtggaaatgatatatttgaagaaggtgatgagcccaaaggaatctatatcattatttcaggcatggtaaagcttgaaaaatcaaagccaggtttagggattgatcaaatggtggagtcaaaggagaaagattttccgataattgacacagactatatgctcagtggagaaataataggagagataaactgcttaactaatgaacctatgaaatattctgccacctgcaaaactgtagtggagacatgttttattcccaaaactcacttgtatgatgcttttgagcaatgctctcctctcattaaacaaaaaatgtggctaaaacttggactcgctattacagccagaaaaatcagagaacacttatcttatgaggattggaactacaatatgcaactaaagctctctaatatttatgtagtagatataccaatgagtaccaaaactgatatttatgatgaaaatctaatctatgttatcctcatacatggagctgtagaagattgtctgttacgaaaaacttatagagcacctttcttaattcctataacatgccatcagatacaaagtattgaagatttcacaaaagtagtgattattcaaactccgattaacatgaaaacattcagaaggaatattagaaagtttgttcctaaacataaaagttatcttacaccaggattaataggttcagttggaacattggaagaaggcattcaagaagaaagaaatgttaaggaggatggagcacacagtgccgccactgccaggagtccccagccttgctccctgctggggacaaagttcaactgtaaggagtcccctagaataaacctaaggaaagtcaggaaagagtaagactgttaagaagaccgaagcatgtattaatgctgtggctatgagaggcctcctgctgcagaaacacacttccctacatcaagaaggagtaacttcaggttggatcctgtgtggatgatcttggtgctaagcagaaaagaaatttggaccttgaaaccagcagttcaacatatatactttttgcaaaatttccttgatttaaaatatttgttattttaaatatacaaaacattttagaaaatcttagagtaaattttagtcttaaagccagaaaataagtttatagccatctagatattttgcatattgctcttacagcaataatggtttggttcactttatgaaaaataaaatgtattaaaatata

SEQ ID NO: 29436 - DNA, 2705 bp, Homo sapiens
  source 1..2705: mol_type = unassigned DNA
ggggcgagcgggaaagcggcagcggcggcggcggcggcggcggcgggggaaggatgcaggggaagaagccgggcggttcgtcgggcggcggccggagcggcgagctgcagggggacgaggcgcagaggaacaagaaaaagaaaaagaaggtgtcctgcttttccaacatcaagatcttcctggtgtccgagtgcgccctgatgctggcgcagggcacggtgggcgcctacctggtgagcgtcctgaccaccctggagcgtaggttcaacctgcagagcgctgacgtgggtgtgatcgctagcagcttcgagatcgggaacctggcgctcatcctcttcgtgagctacttcggggcacgcgggcaccggccgcgcctgatcggctgcggcggcatcgtcatggcgctgggcgcgctgctgtcggcgctgcccgagttcctgacccaccagtacaagtacgaggcgggcgagatccgctggggcgccgagggccgcgacgtctgcgcagccaacggctcgggcggcgacgaggggcccgaccccgacctcatctgccgcaaccggacggctaccaacatgatgtacttgctgctcattggggcccaggtgctcctgggcatcggtgctacccctgtgcagcccctgggcgtctcctacatcgacgaccacgtgcggaggaaggactcctcgctctatataggaatcctgttcacgatgctggtatttggaccagcctgcgggtttatcctgggctctttctgtaccaaaatctacgtggatgcggtcttcattgacacaagtaacctggacatcactccggacgacccccgctggatcggagcctggtggggtggctttctgctctgcggtgccttactcttcttctcttccctcttgatgtttgggtttccacagtccctgcccccgcactcagagcccgccatggaaagcgagcaggccatgctctccgaaagagaatacgagagacccaagcccagcaacggggtcctgaggcaccccctggagccagacagcagtgcctcctgtttccagcagctgagagtgatcccgaaggtcaccaagcacctgctctcaaaccctgtgttcacctgcatcatcctggccgcctgcatggagattgcagtggtggctggcttcgctgcctttttggggaagtacctggagcagcagtttaacctcaccacctcttctgccaaccagctgcttgggatgactgcgatcccgtgtgcttgtctgggtatcttcctgggaggtcttttggtgaagaagctcagcctgtctgccctgggggccattcggatggccatgctcgtcaacctggtgtccactgcttgctacgtctccttcctcttcctgggctgcgacactggccctgtggctggggttactgttccctatggaaacagcacagcacctggctcagccctggacccctactcgccctgcaataataactgtgaatgccaaaccgattccttcactccagtgtgtggggcagatggcatcacctacctgtctgcctgctttgctggctgcaacagcacgaatctcacgggctgtgcgtgcctcaccaccgtccctgctgagaacgcaaccgtggttcctggaaaatgccccagtcctgggtgccaagaggccttcctcactttcctctgtgtgatgtgtatctgcagcctgatcggtgccatggcacagacaccctcagtcatcatcctcatcaggacagtcagccctgaactcaagtcttacgctttgggagttctttttctcctccttcgtttgttgggcttcatccctccacccctcatcttcggggctggcatcgactccacctgcctgttctggagcacgttctgtggggagcaaggcgcctgcgtcctctacgacaatgtggtctaccgatacctgtatgtcagcatcgccatcgcgctcaaatccttcgccttcatcctgtacaccaccacgtggcagtgcctgaggaaaaactataaacgctacatcaaaaaccacgagggcgggctgagcaccagcacagagtaccaagacattgagactgagaaaacctgccccgaatcacattcaccttcagaagactcctttgtgagaagctgagggcctggccctcttcctcttcctggagagaacagcccaccaccacccacagacctcgcgggcctcacttagcgcgctcctccctgtccgagaacccgagggtccccatgtggattatccagccagtgtgtggtcctttgaggccccaagcgcaggcctgtgatgaggaccaaagaggtgacttatggtcaggagtactccaaacagctctcagagtaggcatctttcctgggtctctaaagagtcatgctgacctggtgtgcaaattcccttccacccatccctctacctcctctggggatggcttgccgacatgctttagaaactcccctcttgggaatgctcctctgactgagggctccaacagctttaatgaaatcagccgagagggtaaaaaccaacctgttgcatagaatggaggggggaaaaagcacatactcaatagatttttgagtgtggtactctgtatttttgcagcgtttattttccaaatgagcagtttagaaatatgtgatgtaaagtacatactgtacgtttgctgaaaattatattaaaagcactattttaattctt

SEQ ID NO: 29437 - DNA, 2229 bp, Homo sapiens
  source 1..2229: mol_type = unassigned DNA
gacttgttgcagttgctgtaggattctaaatccaggtgattgtttcaaactgagcatcaacaacaaaaacatttgtatgatatctatatttcaatcatggaccaaaatcaacatttgaataaaacagcagaggcacaaccttcagagaataagaaaacaagatactgcaatggattgaagatgttcttggcagctctgtcactcagctttattgctaagacactaggtgcaattattatgaaaagttccatcattcatatagaacggagatttgagatatcctcttctcttgttggttttattgacggaagctttgaaattggaaatttgcttgtgattgtatttgtgagttactttggatccaaactacatagaccaaagttaattggaatcggttgtttcattatgggaattggaggtgttttgactgctttgccacatttcttcatgggatattacaggtattctaaagaaactaatatcaattcatcagaaaattcaacatcgaccttatccacttgtttaattaatcaaattttatcactcaatagagcatcacctgagatagtgggaaaaggttgtttaaaggaatctgggtcatacatgtggatatatgtgttcatgggtaatatgcttcgtggaataggggagactcccatagtaccattggggctttcttacattgatgatttcgctaaagaaggacattcttctttgtatttaggtatattgaatgcaatagcaatgattggtccaatcattggctttaccctgggatctctgttttctaaaatgtacgtggatattggatatgtagatctaagcactatcaggataactcctactgattctcgatgggttggagcttggtggcttaatttccttgtgtctggactattctccattatttcttccataccattctttttcttgccccaaactccaaataaaccacaaaaagaaagaaaagcttcactgtctttgcatgtgctggaaacaaatgatgaaaaggatcaaacagctaatttgaccaatcaaggaaaaaatattaccaaaaatgtgactggttttttccagtcttttaaaagcatccttactaatcccctgtatgttatgtttgtgcttttgacgttgttacaagtaagcagctatattggtgcttttacttatgtcttcaaatacgtagagcaacagtatggtcagccttcatctaaggctaacatcttattgggagtcataaccatacctatttttgcaagtggaatgtttttaggaggatatatcattaaaaaattcaaactgaacaccgttggaattgccaaattctcatgttttactgctgtgatgtcattgtccttttacctattatattttttcatactctgtgaaaacaaatcagttgccggactaaccatgacctatgatggaaataatccagtgacatctcatagagatgtaccactttcttattgcaactcagactgcaattgtgatgaaagtcaatgggaaccagtctgtggaaacaatggaataacttacatctcaccctgtctagcaggttgcaaatcttcaagtggcaataaaaagcctatagtgttttacaactgcagttgtttggaagtaactggtctccagaacagaaattactcagcccatttgggtgaatgcccaagagatgatgcttgtacaaggaaattttacttttttgttgcaatacaagtcttgaatttatttttctctgcacttggaggcacctcacatgtcatgctgattgttaaaattgttcaacctgaattgaaatcacttgcactgggtttccactcaatggttatacgagcactaggaggaattctagctccaatatattttggggctctgattgatacaacgtgtataaagtggtccaccaacaactgtggcacacgtgggtcatgtaggacatataattccacatcattttcaagggtctacttgggcttgtcttcaatgttaagagtctcatcacttgttttatatattatattaatttatgccatgaagaaaaaatatcaagagaaagatatcaatgcatcagaaaatggaagtgtcatggatgaagcaaacttagaatccttaaataaaaataaacattttgtcccttctgctggggcagatagtgaaacacattgttaaggggagaaaaaaagccacttctgcttctgtgtttccaaacagcattgcattgattca

SEQ ID NO: 29438 - DNA, 2712 bp, Homo sapiens
  source 1..2712: mol_type = unassigned DNA
gagactttaacatcagaaaaaggatggacttgttgcagttgctgtagcattcaaagtcaaggtgatcatttcaaaccaagcatcagcaacaattaaaaatattcacttggtatctgtagtttaataatggaccaacatcaacatttgaataaaacagcagagtcagcatcttcagagaaaaagaaaacaagacgctgcaatggattcaagatgttcttggcagccctgtcattcagctatattgctaaagcactaggtggaatcattatgaaaatttccatcactcaaatagaaaggagatttgacatatcctcttctcttgctggtttaattgatggaagctttgaaattggaaatttgcttgtgattgtatttgtaagttactttggatctaaactacacagaccgaagttaattggaattggttgtctccttatgggaactggaagtattttgacatctttaccacatttcttcatgggatattataggtattctaaagaaacccatattaatccatcagaaaattcaacatcaagtttatcaacctgtttaattaatcaaaccttatcattcaatggaacatcacctgagatagtagaaaaagattgtgtaaaggaatctgggtcacacatgtggatctatgtcttcatggggaatatgcttcgtggcataggggaaacccccatagtaccattggggatttcatacattgatgattttgcaaaagaaggacattcttccttgtatttaggtagtttgaatgcaataggaatgattggtccagtcattggctttgcactgggatctctgtttgctaaaatgtacgtggatattggatatgtagatctgagcactatcagaataactcctaaggactctcgttgggttggagcttggtggcttggtttccttgtgtctggactattttccattatttcttccataccattttttttcttgccgaaaaatccaaataaaccacaaaaagaaagaaaaatttcactatcattgcatgtgctgaaaacaaatgatgatagaaatcaaacagctaatttgaccaaccaaggaaaaaatgttaccaaaaatgtgactggttttttccagtctttgaaaagcatccttaccaatcccctgtatgttatatttctgcttttgacattgttacaagtaagcagctttattggttcttttacttacgtctttaaatatatggagcaacagtacggtcagtctgcatctcatgctaactttttgttgggaatcataaccattcctacggttgcaactggaatgtttttaggaggatttatcattaaaaaattcaaattgtctttagttggaattgccaaattttcatttcttacttcgatgatatccttcttgtttcaacttctatatttccctctaatctgcgaaagcaaatcagttgccggcctaaccttgacctatgatggaaataattcagtggcatctcatgtagatgtaccactttcttattgcaactcagagtgcaattgtgatgaaagtcagtgggaaccagtctgtgggaacaatggaataacttacctgtcaccttgtctagcaggatgcaaatcctcaagtggtattaaaaagcatacagtgttttataactgtagttgtgtggaagtaactggtctccagaacagaaattactcagcacacttgggtgaatgcccaagagataatacttgtacaaggaaatttttcatctatgttgcaattcaagtcataaactctttgttctctgcaacaggaggtaccacatttatcttgttgactgtgaagattgttcaacctgaattgaaagcacttgcaatgggtttccagtcaatggttataagaacactaggaggaattctagctccaatatattttggggctctgattgataaaacatgtatgaagtggtccaccaacagctgtggagcacaaggggcttgtaggatatataattccgtattttttggaagggtctacttgggcttatctatagctttaagattcccagcacttgttttatatattgttttcatttttgctatgaagaaaaaatttcaaggaaaagataccaaggcatcggacaatgaaagaaaagtaatggatgaagcaaacttagaattcttaaataatggtgaacattttgtaccttctgctggaacagatagtaaaacatgtaatttggacatgcaagacaatgctgctgccaactaacattgcattgattcattaagatgttatttttgaggtgttcctggtctttcactgacaattccaacattctttacttacagtggaccaatggataagtctatgcatctataataaactataaaaaatgggagtacccatggttaggatatagctatgcctttatggttaagattagaatatatgatccataaaaatttaaagtgagaggcatggttagtgtgtgatacaataaaaagtaattgtttggtagttgtaactgctaataaaaccagtgactagaatataagggaggtaaaaaggacaagatagattaatagcctaaataaagagaaaagcctgatgcctttaaaaaaaatgaaacactttggatgtattacttaggccaaaatctggcctggatttatgctataatatatattttcatgttaagttgtatatttttcagaaattataaatattattaatttaaaatttgaa

SEQ ID NO: 29439 - DNA, 2805 bp, Homo sapiens
  source 1..2805: mol_type = unassigned DNA
gatggacttgttgcagttgctgtagcattcaaagtcaagttgtgctttgcgatgctgagtttactgttttaaatggacttcaagcatagccctgaagtgttgtcccgttgttcccacctcctagagggcctgacagaagaggtacatatgctatgtgatcatttcaaaccaagcatcagcaacaattaaaaatattcacttggtatctgtagtttaataatggaccaacatcaacatttgaataaaacagcagagtcagcatcttcagagaaaaagaaaacaagacgctgcaatggattcaagatgttcttggcagccctgtcattcagctatattgctaaagcactaggtggaatcattatgaaaatttccatcactcaaatagaaaggagatttgacatatcctcttctcttgctggtttaattgatggaagctttgaaattggaaatttgcttgtgattgtatttgtaagttactttggatctaaactacacagaccgaagttaattggaattggttgtctccttatgggaactggaagtattttgacatctttaccacatttcttcatgggatattataggtattctaaagaaacccatattaatccatcagaaaattcaacatcaagtttatcaacctgtttaattaatcaaaccttatcattcaatggaacatcacctgagatagtagaaaaagattgtgtaaaggaatctgggtcacacatgtggatctatgtcttcatggggaatatgcttcgtggcataggggaaacccccatagtaccattggggatttcatacattgatgattttgcaaaagaaggacattcttccttgtatttaggtagtttgaatgcaataggaatgattggtccagtcattggctttgcactgggatctctgtttgctaaaatgtacgtggatattggatatgtagatctgagcactatcagaataactcctaaggactctcgttgggttggagcttggtggcttggtttccttgtgtctggactattttccattatttcttccataccattttttttcttgccgaaaaatccaaataaaccacaaaaagaaagaaaaatttcactatcattgcatgtgctgaaaacaaatgatgatagaaatcaaacagctaatttgaccaaccaaggaaaaaatgttaccaaaaatgtgactggttttttccagtctttgaaaagcatccttaccaatcccctgtatgttatatttctgcttttgacattgttacaagtaagcagctttattggttcttttacttacgtctttaaatatatggagcaacagtacggtcagtctgcatctcatgctaactttttgttgggaatcataaccattcctacggttgcaactggaatgtttttaggaggatttatcattaaaaaattcaaattgtctttagttggaattgccaaattttcatttcttacttcgatgatatccttcttgtttcaacttctatatttccctctaatctgcgaaagcaaatcagttgccggcctaaccttgacctatgatggaaataattcagtggcatctcatgtagatgtaccactttcttattgcaactcagagtgcaattgtgatgaaagtcagtgggaaccagtctgtgggaacaatggaataacttacctgtcaccttgtctagcaggatgcaaatcctcaagtggtattaaaaagcatacagtgttttataactgtagttgtgtggaagtaactggtctccagaacagaaattactcagcacacttgggtgaatgcccaagagataatacttgtacaaggaaatttttcatctatgttgcaattcaagtcataaactctttgttctctgcaacaggaggtaccacatttatcttgttgactgtgaagattgttcaacctgaattgaaagcacttgcaatgggtttccagtcaatggttataagaacactaggaggaattctagctccaatatattttggggctctgattgataaaacatgtatgaagtggtccaccaacagctgtggagcacaaggggcttgtaggatatataattccgtattttttggaagggtctacttgggcttatctatagctttaagattcccagcacttgttttatatattgttttcatttttgctatgaagaaaaaatttcaaggaaaagataccaaggcatcggacaatgaaagaaaagtaatggatgaagcaaacttagaattcttaaataatggtgaacattttgtaccttctgctggaacagatagtaaaacatgtaatttggacatgcaagacaatgctgctgccaactaacattgcattgattcattaagatgttatttttgaggtgttcctggtctttcactgacaattccaacattctttacttacagtggaccaatggataagtctatgcatctataataaactataaaaaatgggagtacccatggttaggatatagctatgcctttatggttaagattagaatatatgatccataaaaatttaaagtgagaggcatggttagtgtgtgatacaataaaaagtaattgtttggtagttgtaactgctaataaaaccagtgactagaatataagggaggtaaaaaggacaagatagattaatagcctaaataaagagaaaagcctgatgcctttaaaaaaaatgaaacactttggatgtattacttaggccaaaatctggcctggatttatgctataatatatattttcatgttaagttgtatatttttcagaaattataaatattattaatttaaaatttgaa

SEQ ID NO: 29440 - DNA, 2247 bp, Homo sapiens
  source 1..2247: mol_type = unassigned DNA
atggaccaacatcaacatttgaataaaacagcagagtcagcatcttcagagaaaaagaaaacaagacgctgcaatggattcaagatgttcttggcagccctgtcattcagctatattgctaaagcactaggtggaatcattatgaaaatttccatcactcaaatagaaaggagatttgacatatcctcttctcttgctggtttaattgatggaagctttgaaattggaaatttgcttgtgattgtatttgtaagttactttggatctaaactacacagaccgaagttaattggaattggttgtctccttatgggaactggaagtattttgacatctttaccacatttcttcatgggatattataggtattctaaagaaacccatattaatccatcagaaaattcaacatcaagtttatcaacctgtttaattaatcaaaccttatcattcaatggaacatcacctgagatagtagaaaaagattgtgtaaaggaatctgggtcacacatgtggatctatgtcttcatggggaatatgcttcgtggcataggggaaacccccatagtaccattggggatttcatacattgatgattttgcaaaagaaggacattcttccttgtatttaggtagtttgaatgcaataggaatgattggtccagtcattggctttgcactgggatctctgtttgctaaaatgtacgtggatattggatatgtagatctgagcactatcagaataactcctaaggactctcgttgggttggagcttggtggcttggtttccttgtgtctggactattttccattatttcttccataccattttttttcttgccgaaaaatccaaataaaccacaaaaagaaagaaaaatttcactatcattgcatgtgctgaaaacaaatgatgatagaaatcaaacagctaatttgaccaaccaaggaaaaaatgttaccaaaaatgtgactggttttttccagtctttgaaaagcatccttaccaatcccctgtatgttatatttctgcttttgacattgttacaagtaagcagctttattggttcttttacttacgtctttaaatatatggagcaacagtacggtcagtctgcatctcatgctaactttttgttgggaatcataaccattcctacggttgcaactggaatgtttttaggaggatttatcattaaaaaattcaaattgtctttagttggaattgccaaattttcatttcttacttcgatgatatccttcttgtttcaacttctatatttccctctaatctgcgaaagcaaatcagttgccggcctaaccttgacctatgatggaaataattcagtggcatctcatgtagatgtaccactttcttattgcaactcagagtgcaattgtgatgaaagtcagtgggaaccagtctgtgggaacaatggaataacttacctgtcaccttgtctagcaggatgcaaatcctcaagtggtattaaaaagcatacagtgttttataactgtagttgtgtggaagtaactggtctccagaacagaaattactcagcacacttgggtgaatgcccaagagataatacttgtacaaggaaatttttcatctatgttgcaattcaagtcataaactctttgttctctgcaacaggaggtaccacatttatcttgttgactgtgaagattgttcaacctgaattgaaagcacttgcaatgggtttccagtcaatggttataagaacactaggaggaattctagctccaatatattttggggctctgattgataaaacatgtatgaagtggtccaccaacagctgtggagcacaaggggcttgtaggatatataattccgtattttttgggattgttcaacctgaattgaaagcacttgcaatcggcttccattcaatgattatgcgatcgctaggaggtattctagttccaatatattttggggctctgattgatacaacgtgtatgaagtggtccaccaacagctgtggagcacgaggggcttgtaggatatataattccacatatttgggaagagccttcttcggcttgaaggtagccctaatatttccagtacttgttttacttactgtatttatttttgttgtaaggaaaaaatcccatggaaaggataccaaagtattagaaaatgaaagacaagtaatggatgaagcaaacttagaattcttaaacgacagtgaacattttgtaccttctgctgaagaacagtaa

SEQ ID NO: 29441 - DNA, 3365 bp, Homo sapiens
  source 1..3365: mol_type = unassigned DNA
gcaaagaaatggctcaaaagcttcagctctttctgtgccctgggagctgagatgcacgtcagtggccttgccagcgtggccaattctctgctgactgccagaaaaaagaggccaggaagaaagaggaaagagaagagatcgctcaggggtgagaccatgcccttcatcttttcttttccctaatctcctctgcttgtgtccacccacactctccccacctggcaaaattgttcaaaattgctgtggagtttacctcagtttcctctttcagtctgtggtgtgtggtccatcctcttgctgagcacattgaaaggaactggctatctttgatctcttcctccagatcagagtcaaggaatgtgtttataatggacacttcatccaaagaaaatatccagttgttctgcaaaacttcagtgcaacctgttggaaggccttcttttaaaacagaatatccctcctcagaagaaaagcaaccatgctgtggtgaactaaaggtgttcttgtgtgccttgtcttttgtttactttgccaaagcattggcagaaggctatctgaagagcaccatcactcagatagagagaaggtttgatatcccttcttcactggtgggagttattgatggtagttttgaaattgggaatctcttagttataacatttgttagctactttggagccaaacttcacaggccaaaaataattggagcagggtgtgtaatcatgggagttggaacactgctcattgcaatgcctcagttcttcatggagcagtacaaatatgagagatattctccttcctccaattccactctcagcatctctccgtgtctcctagagtcaagcagtcaattaccagtttcagttatggaaaaatcaaaatccaaaataagtaacgaatgtgaagtggacactagctcttccatgtggatttatgttttcctgggcaatcttcttcgtggaataggagaaactcccattcagcctttgggcattgcctacctggatgattttgccagtgaagacaatgcagctttctatattgggtgtgtgcagacggttgcaattataggaccaatctttggtttcctgttaggctcattatgtgccaaactatatgttgacattggctttgtaaacctagatcacataaccattaccccaaaagatccccagtgggtaggagcctggtggcttggctatctaatagcaggaatcataagtcttcttgcagctgtgcctttctggtatttaccaaagagtttaccaagatcccaaagtagagaggattctaattcttcctctgagaaatccaagtttattatagatgatcacacagactaccaaacaccccagggagaaaatgcaaaaataatggaaatggcaagagattttcttccatcactgaagaatctttttggaaacccagtatacttcctatatttatgtacaagcactgttcagttcaattctctgttcggcatggtgacgtacaaaccaaagtacattgagcagcagtatggacagtcatcctccagggccaactttgtgatcgggctcatcaacattccagcagtggcccttggaatattctctggggggatagttatgaaaaaattcagaatcagtgtgtgtggagctgcaaaactctacttgggatcatctgtctttggttacctcctatttctttccctgtttgcactgggctgtgaaaattctgatgtggcaggactaactgtctcctaccaaggaaccaaacctgtctcttatcatgaacgagctctcttttcagattgcaactcaagatgcaaatgttcagagacaaaatgggaacccatgtgcggtgaaaatggaatcacatatgtatcagcttgtcttgctggttgtcaaacctccaacaggagtggaaaaaatattatattttacaactgcacttgtgtgggaattgcagcttctaaatccggaaattcctcaggcatagtgggaagatgtcagaaagacaatggatgtccccaaatgtttctgtatttccttgtaatttcagtcatcacatcctatactttatccctaggtggcatacctggatacatattacttctgaggtgcattaagccacagcttaagtcttttgccttgggtatctacacattagcaataagagttcttgcaggaatcccagctccagtgtattttggagttttgattgatacttcatgcctcaaatggggatttaaaagatgtggaagtagaggatcatgcagattatatgattcaaatgtcttcagacatatatatctgggactaactgtgatactgggcacagtgtcaattctcctaagcattgcagtacttttcattttaaagaaaaattatgtttcaaaacacagaagttttataaccaagagagaaagaacaatggtgtctacaagattccaaaaggaaaattacactacaagtgatcatctgctacaacccaactactggccaggcaaggaaactcaactttagaaacatgatgactggaagtcatgtcttctaattggttgacattttgcaaacaaataaattgtaatcaaaagagctctaaatttgtaatttctttctcctttcaaaaaatgtctactttgttttggtcctaggcattaggtaatataactgataatatactgaaacatataatggaagatgcagatgataaaactaattttgaactttttaatttatataaattattttatatcacttacttatttcactttattttgctttgtgctcattgatatatattagctgtactcctagaagaacaattgtctctattgtcacacatggttatatttaaagtaatttctgaactgtgtaatgtgtctagagtaagcaaatactgctaacaattaactcataccttgggttccttcaagtattactcctatagtattttctcccatagctgtcttcatctgtgtattttaataatgatcttaggatggagcagaacatggagaggaagatttcattttaagctcctccttttctttgaaatacaataatttatatagaaatgtgtagcagcaaattatattggggattagaattttgaattaatagctctcctactattaatttacatgtgctttttgtgtggcgctataagtgactatggttgtaaagtaataaaattgatgttaacatgcccaattattgttcttttatgaatccaatgaatttaaaactattgttaaatataatactgccccactttaatatatgtaagcaacttcctacttatacacgacgtgttcctaaaacatgtttgaaaggtgaatttctgaaagtctacaataaatgtaggtgttacaacaggaa

SEQ ID NO: 29442 - DNA, 3466 bp, Homo sapiens
  source 1..3466: mol_type = unassigned DNA
gcaaagaaatggctcaaaagcttcagctctttctgtgccctgggagctgagatgcacgtcagtggccttgccagcgtggccaattctctgctgactgccagaaaaaagaggccaggaagaaagaggaaagagaagagatcgctcaggggtgagaccatgcccttcatcttttcttttccctaatctcctctgcttgtgtccacccacactctccccacctggcaaaattgttcaaaattgctgtggagtttacctcagtttcctctttcagtctgtggtgtgtggtccatcctcttgctgagcacattgaaaggaactggctatctttgatctcttcctccagatcagagtcaaggaatgtgtttataatggacacttcatccaaagaaaatatccagttgttctgcaaaacttcagtgcaacctgttggaaggccttcttttaaaacagaatatccctcctcagaagaaaagcaaccatgctgtggtgaactaaaggtgttcttgtgtgccttgtcttttgtttactttgccaaagcattggcagaaggctatctgaagagcaccatcactcagatagagagaaggtttgatatcccttcttcactggtgggagttattgatggtagttttgaaattgggaatctcttagttataacatttgttagctactttggagccaaacttcacaggccaaaaataattggagcagggtgtgtaatcatgggagttggaacactgctcattgcaatgcctcagttcttcatggagcagtacaaatatgagagatattctccttcctccaattccactctcagcatctctccgtgtctcctagagtcaagcagtcaattaccagtttcagttatggaaaaatcaaaatccaaaataagtaacgaatgtgaagtggacactagctcttccatgtggatttatgttttcctgggcaatcttcttcgtggaataggagaaactcccattcagcctttgggcattgcctacctggatgattttgccagtgaagacaatgcagctttctatattgggtgtgtgcagacggttgcaattataggaccaatctttggtttcctgttaggctcattatgtgccaaactatatgttgacattggctttgtaaacctagatcacataaccattaccccaaaagatccccagtgggtaggagcctggtggcttggctatctaatagcaggaatcataagtcttcttgcagctgtgcctttctggtatttaccaaagagtttaccaagatcccaaagtagagaggattctaattcttcctctgagaaatccaagtttattatagatgatcacacagactaccaaacaccccagggagaaaatgcaaaaataatggaaatggcaagagattttcttccatcactgaagaatctttttggaaacccagtatacttcctatatttatgtacaagcactgttcagttcaattctctgttcggcatggtgacgtacaaaccaaagtacattgagcagcagtatggacagtcatcctccagggccaactttgtgatcgggctcatcaacattccagcagtggcccttggaatattctctggggggatagttatgaaaaaattcagaatcagtgtgtgtggagctgcaaaactctacttgggatcatctgtctttggttacctcctatttctttccctgtttgcactgggctgtgaaaattctgatgtggcaggactaactgtctcctaccaaggaaccaaacctgtctcttatcatgaacgagctctcttttcagattgcaactcaagatgcaaatgttcagagacaaaatgggaacccatgtgcggtgaaaatggaatcacatatgtatcagcttgtcttgctggttgtcaaacctccaacaggagtggaaaaaatattatattttacaactgcacttgtgtgggaattgcagcttctaaatccggaaattcctcaggcatagtgggaagatgtcagaaagacaatggatgtccccaaatgtttctgtatttccttgtaatttcagtcatcacatcctatactttatccctaggtggcatacctggatacatattacttctgaggtgcattaagccacagcttaagtcttttgccttgggtatctacacattagcaataagagttcttgcaggaatcccagctccagtgtattttggagttttgattgatacttcatgcctcaaatggggatttaaaagatgtggaagtagaggatcatgcagattatatgattcaaatgtcttcaggtaccaaatcaaaagcattcccgcatctcattgctacagcatcccagatttacacaatgccactgacactaacaagttttcatgtcatttcactgcttgtaagacatatatatctgggactaactgtgatactgggcacagtgtcaattctcctaagcattgcagtacttttcattttaaagaaaaattatgtttcaaaacacagaagttttataaccaagagagaaagaacaatggtgtctacaagattccaaaaggaaaattacactacaagtgatcatctgctacaacccaactactggccaggcaaggaaactcaactttagaaacatgatgactggaagtcatgtcttctaattggttgacattttgcaaacaaataaattgtaatcaaaagagctctaaatttgtaatttctttctcctttcaaaaaatgtctactttgttttggtcctaggcattaggtaatataactgataatatactgaaacatataatggaagatgcagatgataaaactaattttgaactttttaatttatataaattattttatatcacttacttatttcactttattttgctttgtgctcattgatatatattagctgtactcctagaagaacaattgtctctattgtcacacatggttatatttaaagtaatttctgaactgtgtaatgtgtctagagtaagcaaatactgctaacaattaactcataccttgggttccttcaagtattactcctatagtattttctcccatagctgtcttcatctgtgtattttaataatgatcttaggatggagcagaacatggagaggaagatttcattttaagctcctccttttctttgaaatacaataatttatatagaaatgtgtagcagcaaattatattggggattagaattttgaattaatagctctcctactattaatttacatgtgctttttgtgtggcgctataagtgactatggttgtaaagtaataaaattgatgttaacatgcccaattattgttcttttatgaatccaatgaatttaaaactattgttaaatataatactgccccactttaatatatgtaagcaacttcctacttatacacgacgtgttcctaaaacatgtttgaaaggtgaatttctgaaagtctacaataaatgtaggtgttacaacagg

SEQ ID NO: 29443 - DNA, 2529 bp, Homo sapiens
  source 1..2529: mol_type = unassigned DNA
attgcaaagaaatggctcaaaagcttcagctctttctgtgccctgggagctgagatgcacgtcagtggccttgccagcgtggccaattctctgctgactgccagaaaaaagaggccaggaagaaagaggaaagagaagagatcgctcagggtctgtggtgtgtggtccatcctcttgctgagcacattgaaaggaactggctatctttgatctcttcctccagatcagagtcaaggaatgtgtttataatggacacttcatccaaagaaaatatccagttgttctgcaaaacttcagtgcaacctgttggaaggccttcttttaaaacagaatatccctcctcagaagaaaagcaaccatgctgtggtgaactaaaggtgttcttgtgtgccttgtcttttgtttactttgccaaagcattggcagaaggctatctgaagagcaccatcactcagatagagagaaggtttgatatcccttcttcactggtgggagttattgatggtagttttgaaattgggaatctcttagttataacatttgttagctactttggagccaaacttcacaggccaaaaataattggagcagggtgtgtaatcatgggagttggaacactgctcattgcaatgcctcagttcttcatggagcagtacaaatatgagagatattctccttcctccaattccactctcagcatctctccgtgtctcctagagtcaagcagtcaattaccagtttcagttatggaaaaatcaaaatccaaaataagtaacgggtgtgtgcagacggttgcaattataggaccaatctttggtttcctgttaggctcattatgtgccaaactatatgttgacattggctttgtaaacctagatcacataaccattaccccaaaagatccccagtgggtaggagcctggtggcttggctatctaatagcaggaatcataagtcttcttgcagctgtgcctttctggtatttaccaaagagtttaccaagatcccaaagtagagaggattctaattcttcctctgagaaatccaagtttattatagatgatcacacagactaccaaacaccccagggagaaaatgcaaaaataatggaaatggcaagagattttcttccatcactgaagaatctttttggaaacccagtatacttcctatatttatgtacaagcactgttcagttcaattctctgttcggcatggtgacgtacaaaccaaagtacattgagcagcagtatggacagtcatcctccagggccaactttgtgatcgggctcatcaacattccagcagtggcccttggaatattctctggggggatagttatgaaaaaattcagaatcagtgtgtgtggagctgcaaaactctacttgggatcatctgtctttggttacctcctatttctttccctgtttgcactgggctgtgaaaattctgatgtggcaggactaactgtctcctaccaaggaaccaaacctgtctcttatcatgaacgagctctcttttcagattgcaactcaagatgcaaatgttcagagacaaaatgggaacccatgtgcggtgaaaatggaatcacatatgtatcagcttgtcttgctggttgtcaaacctccaacaggagtggaaaaaatattatattttacaactgcacttgtgtgggaattgcagcttctaaatccggaaattcctcaggcatagtgggaagatgtcagaaagacaatggatgtccccaaatgtttctgtatttccttgtaatttcagtcatcacatcctatactttatccctaggtggcatacctggatacatattacttctgaggtgcattaagccacagcttaagtcttttgccttgggtatctacacattagcaataagagttcttgcaggaatcccagctccagtgtattttggagttttgattgatacttcatgcctcaaatggggatttaaaagatgtggaagtagaggatcatgcagattatatgattcaaatgtcttcagacatatatatctgggactaactgtgatactgggcacagtgtcaattctcctaagcattgcagtacttttcattttaaagaaaaattatgtttcaaaacacagaagttttataaccaagagagaaagaacaatggtgtctacaagattccaaaaggaaaattacactacaagtgatcatctgctacaacccaactactggccaggcaaggaaactcaactttagaaacatgatgactggaagtcatgtcttctaattggttgacattttgcaaacaaataaattgtaatcaaaagagctctaaatttgtaatttctttctcctttcaaaaaatgtctactttgttttggtcctaggcattaggtaatataactgataatatactgaaacatataatggaagatgcagatgataaaactaattttgaactttttaatttatataaattattttatatcacttacttatttcactttattttgctttgtgctcattgatatatattagctgtact

SEQ ID NO: 29444 - DNA, 2868 bp, Homo sapiens
  source 1..2868: mol_type = unassigned DNA
aagagatcgctcaggggtgagaccatgcccttcatcttttcttttccctaatctcctctgcttgtgtccacccacactctccccacctggcaaaattgttcaaaattgctgtggagtttacctcagtttcctctttcagtctgtggtgtgtggtccatcctcttgctgagcacattgaaaggaactggctatctttgatctcttcctccagggaatctcttagttataacatttgttagctactttggagccaaacttcacaggccaaaaataattggagcagggtgtgtaatcatgggagttggaacactgctcattgcaatgcctcagttcttcatggagcagtacaaatatgagagatattctccttcctccaattccactctcagcatctctccgtgtctcctagagtcaagcagtcaattaccagtttcagttatggaaaaatcaaaatccaaaataagtaacgaatgtgaagtggacactagctcttccatgtggatttatgttttcctgggcaatcttcttcgtggaataggagaaactcccattcagcctttgggcattgcctacctggatgattttgccagtgaagacaatgcagctttctatattgggtgtgtgcagacggttgcaattataggaccaatctttggtttcctgttaggctcattatgtgccaaactatatgttgacattggctttgtaaacctagatcacataaccattaccccaaaagatccccagtgggtaggagcctggtggcttggctatctaatagcaggaatcataagtcttcttgcagctgtgcctttctggtatttaccaaagagtttaccaagatcccaaagtagagaggattctaattcttcctctgagaaatccaagtttattatagatgatcacacagactaccaaacaccccagggagaaaatgcaaaaataatggaaatggcaagagattttcttccatcactgaagaatctttttggaaacccagtatacttcctatatttatgtacaagcactgttcagttcaattctctgttcggcatggtgacgtacaaaccaaagtacattgagcagcagtatggacagtcatcctccagggccaactttgtgatcgggctcatcaacattccagcagtggcccttggaatattctctggggggatagttatgaaaaaattcagaatcagtgtgtgtggagctgcaaaactctacttgggatcatctgtctttggttacctcctatttctttccctgtttgcactgggctgtgaaaattctgatgtggcaggactaactgtctcctaccaaggaaccaaacctgtctcttatcatgaacgagctctcttttcagattgcaactcaagatgcaaatgttcagagacaaaatgggaacccatgtgcggtgaaaatggaatcacatatgtatcagcttgtcttgctggttgtcaaacctccaacaggagtggaaaaaatattatattttacaactgcacttgtgtgggaattgcagcttctaaatccggaaattcctcaggcatagtgggaagatgtcagaaagacaatggatgtccccaaatgtttctgtatttccttgtaatttcagtcatcacatcctatactttatccctaggtggcatacctggatacatattacttctgaggtgcattaagccacagcttaagtcttttgccttgggtatctacacattagcaataagagttcttgcaggaatcccagctccagtgtattttggagttttgattgatacttcatgcctcaaatggggatttaaaagatgtggaagtagaggatcatgcagattatatgattcaaatgtcttcaggtaccaaatcaaaagcattcccgcatctcattgctacagcatcccagatttacacaatgccactgacactaacaagttttcatgtcatttcactgcttgtaagacatatatatctgggactaactgtgatactgggcacagtgtcaattctcctaagcattgcagtacttttcattttaaagaaaaattatgtttcaaaacacagaagttttataaccaagagagaaagaacaatggtgtctacaagattccaaaaggaaaattacactacaagtgatcatctgctacaacccaactactggccaggcaaggaaactcaactttagaaacatgatgactggaagtcatgtcttctaattggttgacattttgcaaacaaataaattgtaatcaaaagagctctaaatttgtaatttctttctcctttcaaaaaatgtctactttgttttggtcctaggcattaggtaatataactgataatatactgaaacatataatggaagatgcagatgataaaactaattttgaactttttaatttatataaattattttatatcacttacttatttcactttattttgctttgtgctcattgatatatattagctgtactcctagaagaacaattgtctctattgtcacacatggttatatttaaagtaatttctgaactgtgtaatgtgtctagagtaagcaaatactgctaacaattaactcataccttgggttccttcaagtattactcctatagtattttctcccatagctgtcttcatctgtgtattttaataatgatcttaggatggagcagaacatggagaggaagatttcattttaagctcctccttttctttgaaatacaataatttatatagaaatgtgtagcagcaaattatattggggattagaattttgaattaatagctctcctactattaatttacatgtgctttttgtgtggcgctataagtgactatggttgtaaagtaataaaattgatgttaacatgc

SEQ ID NO: 29445 - DNA, 3453 bp, Homo sapiens
  source 1..3453: mol_type = unassigned DNA
gttgtgttttctgggaatcagcaagtaagatcacaagtggtcttttcttttattcactctctcccataaagaaagctttatcacgtgtggccttaaacttgcagcaaattgcaaagaaatggctcaaaagcttcagctctttctgtgccctgggagctgagatgcacgtcagtggccttgccagcgtggccaattctctgctgactgccagaaaaaagaggccaggaagaaagaggaaagagaagagatcgctcagggtctgtggtgtgtggtccatcctcttgctgagcacattgaaaggaactggctatctttgatctcttcctccagatcagagtcaaggaatgtgtttataatggacacttcatccaaagaaaatatccagttgttctgcaaaacttcagtgcaacctgttggaaggccttcttttaaaacagaatatccctcctcagaagaaaagcaaccatgctgtggtgaactaaaggtgttcttgtgtgccttgtcttttgtttactttgccaaagcattggcagaaggctatctgaagagcaccatcactcagatagagagaaggtttgatatcccttcttcactggtgggagttattgatggtagttttgaaattgggaatctcttagttataacatttgttagctactttggagccaaacttcacaggccaaaaataattggagcagggtgtgtaatcatgggagttggaacactgctcattgcaatgcctcagttcttcatggagcagtacaaatatgagagatattctccttcctccaattccactctcagcatctctccgtgtctcctagagtcaagcagtcaattaccagtttcagttatggaaaaatcaaaatccaaaataagtaacgaatgtgaagtggacactagctcttccatgtggatttatgttttcctgggcaatcttcttcgtggaataggagaaactcccattcagcctttgggcattgcctacctggatgattttgccagtgaagacaatgcagctttctatattgggtgtgtgcagacggttgcaattataggaccaatctttggtttcctgttaggctcattatgtgccaaactatatgttgacattggctttgtaaacctagatcacataaccattaccccaaaagatccccagtgggtaggagcctggtggcttggctatctaatagcaggaatcataagtcttcttgcagctgtgcctttctggtatttaccaaagagtttaccaagatcccaaagtagagaggattctaattcttcctctgagaaatccaagtttattatagatgatcacacagactaccaaacaccccagggagaaaatgcaaaaataatggaaatggcaagagattttcttccatcactgaagaatctttttggaaacccagtatacttcctatatttatgtacaagcactgttcagttcaattctctgttcggcatggtgacgtacaaaccaaagtacattgagcagcagtatggacagtcatcctccagggccaactttgtgatcgggctcatcaacattccagcagtggcccttggaatattctctggggggatagttatgaaaaaattcagaatcagtgtgtgtggagctgcaaaactctacttgggatcatctgtctttggttacctcctatttctttccctgtttgcactgggctgtgaaaattctgatgtggcaggactaactgtctcctaccaaggaaccaaacctgtctcttatcatgaacgagctctcttttcagattgcaactcaagatgcaaatgttcagagacaaaatgggaacccatgtgcggtgaaaatggaatcacatatgtatcagcttgtcttgctggttgtcaaacctccaacaggagtggaaaaaatattatattttacaactgcacttgtgtgggaattgcagcttctaaatccggaaattcctcaggcatagtgggaagatgtcagaaagacaatggatgtccccaaatgtttctgtatttccttgtaatttcagtcatcacatcctatactttatccctaggtggcatacctggatacatattacttctgaggtgcattaagccacagcttaagtcttttgccttgggtatctacacattagcaataagagttcttgcaggaatcccagctccagtgtattttggagttttgattgatacttcatgcctcaaatggggatttaaaagatgtggaagtagaggatcatgcagattatatgattcaaatgtcttcaggtaccaaatcaaaagcattcccgcatctcattgctacagcatcccagatttacacaatgccactgacactaacaagttttcatgtcatttcactgcttgtaagacatatatatctgggactaactgtgatactgggcacagtgtcaattctcctaagcattgcagtacttttcattttaaagaaaaattatgtttcaaaacacagaagttttataaccaagagagaaagaacaatggtgtctacaagattccaaaaggaaaattacactacaagtgatcatctgctacaacccaactactggccaggcaaggaaactcaactttagaaacatgatgactggaagtcatgtcttctaattggttgacattttgcaaacaaataaattgtaatcaaaagagctctaaatttgtaatttctttctcctttcaaaaaatgtctactttgttttggtcctaggcattaggtaatataactgataatatactgaaacatataatggaagatgcagatgataaaactaattttgaactttttaatttatataaattattttatatcacttacttatttcactttattttgctttgtgctcattgatatatattagctgtactcctagaagaacaattgtctctattgtcacacatggttatatttaaagtaatttctgaactgtgtaatgtgtctagagtaagcaaatactgctaacaattaactcataccttgggttccttcaagtattactcctatagtattttctcccatagctgtcttcatctgtgtattttaataatgatcttaggatggagcagaacatggagaggaagatttcattttaagctcctccttttctttgaaatacaataatttatatagaaatgtgtagcagcaaattatattggggattagaattttgaattaatagctctcctactattaatttacatgtgctttttgtgtggcgctataagtgactatggttgtaaagtaataaaattgatgttaacatgcccaattattgttcttttatgaatccaatgaatttaaaactattgttaaatataatactgccccactttaatatatgtaagcaacttcctacttatacacgacgtgttcctaaaacatgtttgaaaggtgaatttctgaaagtctacaataaatgtaggtgttacaacagg

SEQ ID NO: 29446 - DNA, 4223 bp, Homo sapiens
  source 1..4223: mol_type = unassigned DNA
acacctgtctgagggggcggcggcggcggcggcggcggggcgggggctcgtagcgcctttgacacccgaggaaaagagggaggagggagagcgcgtttcatcatcggcggcggccacttataaaaacttctaggcgcgcactcgctggctcagtctccgctccgcgaatctcctccggccactgccgccgcggtcgcctctcacccgcccggccgctccagcccgaggcgccccgaccccgcgccactccgcgcccggccagccgcccgcagccatggggctcctgcccaagctcggcgcgtcccagggcagcgacacctctactagccgagccggccgctgtgcccgctcggtcttcggcaacattaaggtgtttgtgctctgccaaggcctcctgcagctctgccaactcctgtacagcgcctacttcaagagcagcctcaccaccattgagaagcgctttgggctctccagttcttcatcgggtctcatttccagcttgaatgagatcagcaatgccatcctcatcatctttgtcagctactttggcagccgggtgcaccgtccacgtctgattggcatcggaggtctcttcctggctgcaggtgccttcatcctcaccctcccacacttcctctccgagccctaccagtacaccttggccagcactgggaacaacagccgcttgcaggccgagctctgccagaagcattggcaggacctgcctcccagtaagtgccacagcaccacccagaacccccagaaggagaccagcagcatgtggggcctgatggtggttgcccagctgctggctggcatcgggacagtgcctattcagccatttgggatctcctatgtggatgacttctcagagcccagcaactcgcccctgtacatctccatcttatttgccatctctgtatttggaccggctttcgggtacctgctgggctctgtcatgctgcagatctttgtggactatggcagggtcaacacagctgcagttaacttggtcccgggtgacccccgatggattggagcctggtggctaggcctgctcatttcttcagctttattggttctcacctctttccccttttttttcttccctcgagcaatgcccataggagcaaagagggctcctgccacagcagatgaagcaaggaagttggaggaggccaagtcaagaggctccctggtggatttcattaaacggtttccatgcatctttctgaggctcctgatgaactcactcttcgtcctggtggtcctggcccagtgcaccttctcctccgtcattgctggcctctccaccttcctcaacaagttcctggagaagcagtatggcacctcagcagcctatgccaacttcctcattggtgctgtgaacctccctgctgcagccttggggatgctgtttggaggaatcctcatgaagcgctttgttttctctctacaagccattccccgcatagctaccaccatcatcaccatctccatgatcctttgtgttcctttgttcttcatgggatgctccaccccaactgtggccgaagtctacccccctagcacatcaagttctatacatccgcagtctcctgcctgccgcagggactgctcgtgcccagattctatcttccacccggtctgtggagacaatggaatcgagtacctctccccttgccatgccggctgcagcaacatcaacatgagctctgcaacctccaagcaactgatctatttgaactgcagctgtgtgaccgggggatccgcttcagcaaagacaggatcgtgccctgtcccctgtgcccacttcctgctcccggccatcttcctcatctccttcgtgtccctgatagcctgcatctcccacaaccccctctacatgatggttctgcgtgtggtgaaccaggaggaaaagtcatttgccatcggggtgcagttcttgttgatgcgcttgctggcctggctgccatctccagccctctatggcctcaccattgaccactcctgcatccggtggaactcgctgtgcttggggaggcgaggggcctgcgcctactatgacaacgatgctctccgagacaggtacctgggcctgcagatgggctacaaggcgctgggcatgctgctgctttgcttcatcagctggagggtgaagaagaacaaggagtacaacgtgcagaaggcggcaggcctcatctgaccccaccctgggccactgccctgctccagagagtggaccttgactcttccacacctgcctatactcactaatgttaacacgtcatttcctttttgtatttttaaacaagaaagaaaaccccagtcctcatttgccttccctacctcttcctcccagagtcctccccacagttcctaagggccactgtgtacccgggctgtgtgggccagaactggggggctgagtcttccctggccccttggaagaggcccccagatgcccaggctcacttcagtgttgagtcctccattgaggatgcccactgaggcagccaggcccctcaccagccctggggggaatcctaaacagagagagaaaaagggtatctgcccttcttgccaggcagctccactctcccgctgactgcccacaccctgcagagtggcaggggtgaaaggaagaaggaagtggctgagttattaatagccagagccactgggagactggggagactggctgtaacccccttcacacctgggtttggcatcagcacagactacgggaggggctggctccctccccctcagaccctcacttcctgtacctagaggccattctggatgctgccatgttgggaagtacagtctctgcccattacctgcatgcaggcaccagagcagggactgagaaaccccaaggatgggtcatctaagtgctgtccatatgaaccctggactttctgtccttagatcctcacatgttatccctgtctttctggggtacgtttcaaactgaggaagctacaacacagtgaagacccaaggaaggcctatgaaaaggtcctgatgcccaacctcccaccccttcaatgtggggacgagaccccctcatctcagagtaatgggaagaacctcccacatctccctggcagcagatgaggtggcttcacatgcacttccctgtctggacttcagcccgtattccgaggagtagagaggcagaagagatgtcagcaaagcaagtgatgaagcagagtggatgtccactgtcaccaagctggatggcaagctgcggcccacaaaacagccagtcaggttggctttcctggtttcagacatgctcataccattcccattttctcagcctcttctcactgcctccagagaggtgggtgcctgggttgagagacacagctgctacgtgatagatgttgagagacagaagccaacgaaggaggtcattcatcaacaaatatatttattggagaccgactttgtgcaaagcaatgctaatcagggttctccatggagcttccctcagctcttacctcacctccctccatttacattagggccttctcccagggtgtgctcggtgggcagtgtgggactgggggtgtgggagttggtgagagcaggaggagaggtggggacagcaagaagccacagattggcatgaaggatcctgacctgactatccatgccatccatggcccccagactgactctgcacctggccctttgccagacagctctgtctccccatgtcctctggaacagctgggcatgggtcatggccattcatgacccttaagtgccacccttcttggaagaccccctccagaagcatactggaagccacctctggaaaagcctcatatggtgatatgccaaaatatttatgtcaatgtccaaacaaagtccaatgccatgagactgaagtctttgtggaaaccactgttacagacaagcttatttccaaagccacctcatttccaaacatctcactcaggaagggaggctcaatgtaacctcaggggccagttttagcatttgaaatggttctgcttggaaaatgatgccctgcaactaaccctggtctttcccatggcaatttaaccacatttggaaggcactgccttcagctgagtttatgaacaatgaatgccaaccttcaggttctagaagattggttgcactcccaaacctttattctattatattactattaaaatattctaattttgctattgaggtaa

SEQ ID NO: 29447 - DNA, 1937 bp, Homo sapiens
  source 1..1937: mol_type = unassigned DNA
tctccgctccgcgaatctcctccggccactgccgccgcggtcgcctctcacccgcccggccgctccagcccgaggcgccccgaccccgcgccactccgcgcccggccagccgcccgcagccatggggctcctgcccaagctcggcgcgtcccagggcagcgacacctctactagccgagccggccgctgtgcccgctcggtcttcggcaacattaaggtgtttgtgctctgccaaggcctcctgcagctctgccaactcctgtacagcgcctacttcaagagcagcctcaccaccattgagaagcgctttgggctctccagttcttcatcgggtctcatttccagcttgaatgagatcagcaatgccatcctcatcatctttgtcagctactttggcagccgggtgcaccgtccacgtctgattggcatcggaggtctcttcctggctgcaggtgccttcatcctcaccctcccacacttcctctccgagccctaccagtacaccttggccagcactgggaacaacagccgcttgcaggccgagctctgccagaagcattggcaggacctgcctcccagtaagtgccacagcaccacccagaacccccagaaggagaccagcagcatgtggggcctgatggtggttgcccagctgctggctggcatcgggacagtgcctattcagccatttgggatctcctatgtggatgacttctcagagcccagcaactcgcccctgtacatctccatcttatttgccatctctgtatttggaccggctttcgggtacctgctgggctctgtcatgctgcagatctttgtggactatggcagggtcaacacagctgcagttaacttggtcccgggtgacccccgatggattggagcctggtggctaggcctgctcatttcttcagctttattggttctcacctctttccccttttttttcttccctcgagcaatgcccataggagcaaagagggctcctgccacagcagatgaagcaaggaagttggaggaggccaagtcaagaggctccctggtggatttcattaaacggtttccatgcatctttctgaggctcctgatgaactcactcttcgtcctggtggtcctggcccagtgcaccttctcctccgtcattgctggcctctccaccttcctcaacaagttcctggagaagcagtatggcacctcagcagcctatgccaacttcctcattgcacatcaagttctatacatccgcagtctcctgcctgccgcagggactgctcgtgcccagattctatcttccacccggtctgtggagacaatggaatcgagtacctctccccttgccatgccggctgcagcaacatcaacatgagctctgcaacctccaagcaactgatctatttgaactgcagctgtgtgaccgggggatccgcttcagcaaagacaggatcgtgccctgtcccctgtgcccacttcctgctcccggccatcttcctcatctccttcgtgtccctgatagcctgcatctcccacaaccccctctacatgatggttctgcgtgtggtgaaccaggaggaaaagtcatttgccatcggggtgcagttcttgttgatgcgcttgctggcctggctgccatctccagccctctatggcctcaccattgaccactcctgcatccggtggaactcgctgtgcttggggaggcgaggggcctgcgcctactatgacaacgatgctctccgagacaggtacctgggcctgcagatgggctacaaggcgctgggcatgctgctgctttgcttcatcagctggagggtgaagaagaacaaggagtacaacgtgcagaaggcggcaggcctcatctgaccccaccctgggccactgccctgctccagagagtggaccttgactcttccacacctgcctatactcactaatgt

SEQ ID NO: 29448 - DNA, 5115 bp, Homo sapiens
  source 1..5115: mol_type = unassigned DNA
ggaggaggaaggggcgatcgcggcggcggcggcggcggcgaggagctgtgccttccacctctccagccccggcaggacgggggcggccgccgcgaacccggggcggggacagcacgcagcctcgaggcgcgcacccccgcccggcagcggccccgacacccggggcgagcgggaaagcggcagcggcggcggcggcggcggcggcgggggaaggatgcaggggaagaagccgggcggttcgtcgggcggcggccggagcggcgagctgcagggggacgaggcgcagaggaacaagaaaaagaaaaagaaggtgtcctgcttttccaacatcaagatcttcctggtgtccgagtgcgccctgatgctggcgcagggcacggtgggcgcctacctggtgagcgtcctgaccaccctggagcgtaggttcaacctgcagagcgctgacgtgggtgtgatcgctagcagcttcgagatcgggaacctggcgctcatcctcttcgtgagctacttcggggcacgcgggcaccggccgcgcctgatcggctgcggcggcatcgtcatggcgctgggcgcgctgctgtcggcgctgcccgagttcctgacccaccagtacaagtacgaggcgggcgagatccgctggggcgccgagggccgcgacgtctgcgcagccaacggctcgggcggcgacgaggggcccgaccccgacctcatctgccgcaaccggacggctaccaacatgatgtacttgctgctcattggggcccaggtgctcctgggcatcggtgctacccctgtgcagcccctgggcgtctcctacatcgacgaccacgtgcggaggaaggactcctcgctctatataggaatcctgttcacgatgctggtatttggaccagcctgcgggtttatcctgggctctttctgtaccaaaatctacgtggatgcggtcttcattgacacaagtaacctggacatcactccggacgacccccgctggatcggagcctggtggggtggctttctgctctgcggtgccttactcttcttctcttccctcttgatgtttgggtttccacagtccctgcccccgcactcagagcccgccatggaaagcgagcaggccatgctctccgaaagagaatacgagagacccaagcccagcaacggggtcctgaggcaccccctggagccagacagcagtgcctcctgtttccagcagctgagagtgatcccgaaggtcaccaagcacctgctctcaaaccctgtgttcacctgcatcatcctggccgcctgcatggagattgcagtggtggctggcttcgctgcctttttggggaagtacctggagcagcagtttaacctcaccacctcttctgccaaccagctgcttgggatgactgcgatcccgtgtgcttgtctgggtatcttcctgggaggtcttttggtgaagaagctcagcctgtctgccctgggggccattcggatggccatgctcgtcaacctggtgtccactgcttgctacgtctccttcctcttcctgggctgcgacactggccctgtggctggggttactgttccctatggaaacagcacagcacctggctcagccctggacccctactcgccctgcaataataactgtgaatgccaaaccgattccttcactccagtgtgtggggcagatggcatcacctacctgtctgcctgctttgctggctgcaacagcacgaatctcacgggctgtgcgtgcctcaccaccgtccctgctgagaacgcaaccgtggttcctggaaaatgccccagtcctgggtgccaagaggccttcctcactttcctctgtgtgatgtgtatctgcagcctgatcggtgccatggcacagacaccctcagtcatcatcctcatcaggacagtcagccctgaactcaagtcttacgctttgggagttctttttctcctccttcgtttgttgggcttcatccctccacccctcatcttcggggctggcatcgactccacctgcctgttctggagcacgttctgtggggagcaaggcgcctgcgtcctctacgacaatgtggtctaccgatacctgtatgtcagcatcgccatcgcgctcaaatccttcgccttcatcctgtacaccaccacgtggcagtgcctgaggaaaaactataaacgctacatcaaaaaccacgagggcgggctgagcaccagtgagttctttgcctctactctgaccctagacaacctggggagggaccctgtgcccgcaaaccagacacataggacaaagtttatctataacctggaagaccatgagtggtgtgaaaacatggagtccgttttatagtgactaaaggagggctgaactctgtattagtaatccaagggtcatttttttcttaaaaaaagaaaaaaaggttccaaaaaaaaccaaaactcagtacacacacacaggcacagatgcacacacacgcagacagacacaccgactttgtcctttttctcagcatcagagccagacaggattcagaataaggagagaatgacatcgtgcggcagggtcctggaggccacttgcgcggctgggccacagagtctactttgaaggcacctcatggttttcaggatgctgacagctgcaagcaacaggcactgccaaattcagggaacagtggtggccagcttggaggatggacatttctggatacacatacacatacaaaacagaaaacattttttaaaagaagtttcctaaaataaaaaaaattaaaaaaaaaaaacccacaagttgaaaacattgccagattaagcactagtgacacaccccgtgccaccctcttcctccaggtgggggtgggggcgggcgcacaagtcggaggggtggaagcaccactcctctctctgactttcgcaatatgggtcactgtgtagacgactcacccagtctgcatgtggttcaaggccccagagttctctcagtgatgctaatgggtgatccgtgctggagtttgtaattggcacctctcaccagctccatttccatgttcaagactgagggcctgagggggagccaggtggggggccagcacctcccagtggcgggcatccaccttcccccagccccacagagtgacctcaggaagcagtaggcctcgcctggctatgactgacccggctcagagctggtgagacccaacgcagtccaagtcatttgcttacatttgccaaaaacattttgccatttttaaaagaaaaaaatacaatccatatgaatttcaaactgttgtatgtataatcctctaatactatttttaactacttctaaaatctgtgttaacccttcaagtcactaacacagttctctaggccggatttattatgctggttgcttttactttttttctccttttttaatgcaccaaaaatatgtgatacaagggatgcaattaacctattgtaattttcatcattttatcctcattcgaatattctacaaaaacaagaatatacaatgtgttacaagaagaaaaaaaaatgcttcaaaaagagagtgtatatgcagcctgcctttaaaagaatcacatttgagacaacaggggataatgtgatgaattgcaaatttgccttttagcttccttccccatgattcagtgatcactgtcacgggaaacccttttatattcatgcttgacattccaagaggcgttcttttcagcctgtggaggagacactcttagatgtgggtttgtgtgtatgggtgcaacacttccggggataggaaagaagaacagttccctaacacaagctgttaagaagtctgtagcatctctgataacgaatagacccacaagctcctggaagctgtcgtgtgtccaatgcgtgaaaatgtctgtgacattttcagtgttagtcttgaactaaggcccttgtctgtgtgttttgaaggtgggtgaacctcagagaatgaacctgttatgatttggggtaagaatcacgttggaaaacctctcgcaaccagcacactaggccttctacggccatttctgtaaggggacagagcttaggtaaaggcacacactcatacacacacaacaaagggccctgctaacttactcctcatgctgcttcagtgacctttgttcatgtcacattcctggcgctggaaaaaaaactcaaaggttgattggtttgctttttcaccttggacacatttgcattttacccacaaggcaaacaaaagaatcaggaagtaaaaaatggttgggagtgggacaggtatggtaccgaatttttaatgaacattgtaaatgaagaggcttgaatgacagcccaaatctagagaaggcactcagcaagaccaaccaaaagaaaagctgtgtcgtggtatggggccaccgtgatcagctacctggggcaggatgcttctgagacaggcctttcaactgcttagtgttagtatgtccttgcttatgaaaatggggacactcatcagtacgttaactactaaaggggagatggttctccaaccacttcataaaatatgtatgttctgttgttcctaaggctttgataatatcctgtacagattttggtttagttttgcaaatatattgctaataggtcactcttatagattattgcttggcccttcaaactcagtacacacacactgaggccctttgacctagtgttttatggaactatttgctttgagagaaaaaaaaaagaaagttttttaaactctttgcattttggattttttttcctaagattttaggatgaatgtgaaaaagatgttagaataacaggaagacaactccagggctgagttttatcagcaattgggtataaatttaaagaccgctgttgcaggatggctctgaattctgttgtgtcgtcttttaaaattttaattattctcatatagtaccgaacagaaaactcagtctagttttaatttgccttttgtgctctaaagaagcattgtacatacaacactagatccagcccctcgattatctgtttggtttcaagtgaatgaaaagatttcctggtaagatcattggatttacagaatacaaaaatgtacgggatggaataaacctagaaagtgaa

SEQ ID NO: 29449 - DNA, 2776 bp, Homo sapiens
  source 1..2776: mol_type = unassigned DNA
ctgcggcgggggcggccccagcggatgaatgaagcggcgcgtggctgccggggaggccagagcgtggagcgctgcgcggcgcggcggccgggccctcgagacggggacggacacaccagcccctcggataccacttggccactcccgctgaggccactcccactgcgtggctgaagcctcgaggtcaccaggcggaggcgcggagatgcccctgcatcagctgggggacaagccgctcaccttccccagccccaactcagccatggaaaacgggcttgaccacaccccacccagcaggagggcatccccgggcacacccctgagccccggctccctccgctccgctgcccatagccccctggacaccagcaagcagcccctctgccagctctgggccgagaagcatggcgcccgggggacccatgaggtgcggtacgtctcggccgggcagagcgtggcgtgcggctggtgggccttcgcaccgccgtgcctgcaggtcctcaacacgcccaagggcatcctgttcttcctgtgtgcggccgcattcctgcaggggatgactgtgaatggcttcatcaacacagtcatcacctccctggagcgccgctatgacctgcacagctaccagagcgggctcatcgccagctcctacgacattgccgcctgcctctgcctcaccttcgtcagctacttcgggggctcagggcacaagccgcgctggctgggctggggcgtgctgcttatgggcacggggtcgctggtgttcgcgctgccccacttcacggctggccgctatgaggtggagttggacgcgggtgtcaggacgtgccctgccaaccccggcgcggtgtgtgcggacagcacctcgggcctgtcccgctaccagctggtcttcatgctgggccagttcctgcatggcgtgggtgccacacccctctacacgctgggcgtcacctacctggatgagaacgtcaagtccagctgctcgcccgtctacattgccatcttctacacagcggccatcctgggcccagctgccggctacctgattggaggtgccctgctgaatatctacacggaaatgggccgacggacggagctgaccaccgagagcccactgtgggtcggcgcctggtgggtcggcttcctgggctctggggccgctgctttcttcaccgccgttcccatccttggttaccctcggcagctgccaggctcccagcgctacgcggtcatgagagcggcggaaatgcaccagttgaaggacagcagccgtggggaggcgagcaacccggactttgggaaaaccatcagagacctgcctctctccatctggctcctgctgaagaaccccacgttcatcctgctctgcctggccggggccaccgaggccactctcatcaccggcatgtccacgttcagccccaagttcttggagtcccagttcagcctgagtgcctcagaagctgccaccttgtttgggtacctggtggtgccagcgggtggtggcggcaccttcctgggcggcttctttgtgaacaagctcaggctccggggctccgcggtcatcaagttctgcctgttctgcaccgttgtcagcctgctgggcatcctcgtcttctcactgcactgccccagtgtgcccatggcgggcgtcacagccagctacggcgggagcctcctgcccgaaggccacctgaacctaacggctccctgcaacgctgcctgcagctgccagccagaacactacagccctgtgtgcggctcggacggcctcatgtacttctcactgtgccacgcagggtgccctgcagccacggagacgaatgtggacggccagaaggtgtaccgagactgtagctgtatccctcagaatctttcctctggttttggccatgccactgcagggaaatgcacttcaacttgtcagagaaagcccctccttctggttttcatattcgttgtaattttctttacattcctcagcagcattcctgcactaacggcaactctacgatgtgtccgtgaccctcagagatcctttgccctgggaatccagtggattgtagttagaatactagggggcatcccggggcccatcgccttcggctgggtgatcgacaaggcctgtctgctgtggcaggaccagtgtggccagcagggctcctgcttggtgtaccagaattcggccatgagccgctacatactcatcatggggctcctgtacaaggtgctgggcgtcctcttctttgccatagcctgcttcttatacaagcccctgtcggagtcttcagatggcctggaaacttgtctgcccagccagtcctcagcccctgacagtgccacagatagccagctccagagcagcgtctgaccaccgcccgcgcccacccggccacggcgggcactcagcatttcctgatgacagaacagtgccgttgggtgatgcaatcacacgggaacttctatttgacctgcaaccttctacttaacctgtggtttaaagtcggctgtgacctcctgtccccagagctgtacggccctgcagtgggtgggaggaacttgcataaatatatatttatggacacacagtttgcatcagaacgtgtttatagaatgtgttttatacccgatcgtgtgtggtgtgcgtgaggacaaactccgcaggggctgtgaatcccactgggagggcggtgggcctgcagcctgaggaaggcttgtgtgtcctcagttaaaactgtgcatatcgaaatatattttgttatttaagcctgcg

SEQ ID NO: 29450 - DNA, 1749 bp, Homo sapiens
  source 1..1749: mol_type = unassigned DNA
atgcccctgcatcagctgggggacaagccgctcaccttccccagccccaactcagccatggaaaacgggcttgaccacaccccacccagcaggagggcatccccgggcacacccctgagccccggctccctccgctccgctgcccatagccccctggacaccagcaagcagcccctctgccagctctgggccgagaagcatggcgcccgggggacccatgaggtgcggtacgtctcggccgggcagagcgtggcgtgcggctggtgggccttcgcaccgccgtgcctgcaggtcctcaacacgcccaagggcatcctgttcttcctgtgtgcggccgcattcctgcaggggatgactgtgaatggcttcatcaacacagtcatcacctccctggagcgccgctatgacctgcacagctaccagagcgggctcatcgccagctcctacgacattgccgcctgcctctgcctcaccttcgtcagctacttcgggggctcagggcacaagccgcgctggctgggctggggcgtgctgcttatgggcacggggtcgctggtgttcgcgctgccccacttcacggctggccgctatgaggtggagttggacgcgggtgtcaggacgtgccctgccaaccccggcgcggtgtgtgcggacagcacctcgggcctgtcccgctaccagctggtcttcatgctgggccagttcctgcatggcgtgggtgccacacccctctacacgctgggcgtcacctacctgggcatgtccacgttcagccccaagttcttggagtcccagttcagcctgagtgcctcagaagctgccaccttgtttgggtacctggtggtgccagcgggtggtggcggcaccttcctgggcggcttctttgtgaacaagctcaggctccggggctccgcggtcatcaagttctgcctgttctgcaccgttgtcagcctgctgggcatcctcgtcttctcactgcactgccccagtgtgcccatggcgggcgtcacagccagctacggcgggagcctcctgcccgaaggccacctgaacctaacggctccctgcaacgctgcctgcagctgccagccagaacactacagccctgtgtgcggctcggacggcctcatgtacttctcactgtgccacgcagggtgccctgcagccacggagacgaatgtggacggccagaaggtgtaccgagactgtagctgtatccctcagaatctttcctctggttttggccatgccactgcagggaaatgcacttcaacttgtcagagaaagcccctccttctggttttcatattcgttgtaattttctttacattcctcagcagcattcctgcactaacggcaactctacgatgtgtccgtgaccctcagagatcctttgccctgggaatccagtggattgtagttagaatactagggggcatcccggggcccatcgccttcggctgggtgatcgacaaggcctgtctgctgtggcaggaccagtgtggccagcagggctcctgcttggtgtaccagaattcggccatgagccgctacatactcatcatggggctcctgtacaaggtgctgggcgtcctcttctttgccatagccagctccagagcagcgtctgaccaccgcccgcgcccacccggccacggcgggcactcagcatttcctgatgacagaacagtgccgttgggtgatgcaatcacacgggaacttctatttgacctgcaaccttctacttaa

SEQ ID NO: 29451 - DNA, 2665 bp, Homo sapiens
  source 1..2665: mol_type = unassigned DNA
gacacaccagcccctcggataccacttggccactcccgctgaggccactcccactgcgtggctgaagcctcgaggtcaccaggcggaggcgcggagatgcccctgcatcagctgggggacaagccgctcaccttccccagccccaactcagccatggaaaacgggcttgaccacaccccacccagcaggagggcatccccgggcacacccctgagccccggctccctccgctccgctgcccatagccccctggacaccagcaagcagcccctctgccagctctgggccgagaagcatggcgcccgggggacccatgaggtgcggtacgtctcggccgggcagagcgtggcgtgcggctggtgggccttcgcaccgccgtgcctgcaggtcctcaacacgcccaagggcatcctgttcttcctgtgtgcggccgcattcctgcaggggatgactgtgaatggcttcatcaacacagtcatcacctccctggagcgccgctatgacctgcacagctaccagagcgggctcatcgccagctcctacgacattgccgcctgcctctgcctcaccttcgtcagctacttcgggggctcagggcacaagccgcgctggctgggctggggcgtgctgcttatgggcacggggtcgctggtgttcgcgctgccccacttcacggctggccgctatgaggtggagttggacgcgggtgtcaggacgtgccctgccaaccccggcgcggtgtgtgcggacagcacctcgggcctgtcccgctaccagctggtcttcatgctgggccagttcctgcatggcgtgggtgccacacccctctacacgctgggcgtcacctacctggatgagaacgtcaagtccagctgctcgcccgtctacattgccatcttctacacagcggccatcctgggcccagctgccggctacctgattggaggtgccctgctgaatatctacacggaaatgggccgacggacggagctgaccaccgagagcccactgtgggtcggcgcctggtgggtcggcttcctgggctctggggccgctgctttcttcaccgccgttcccatccttggttaccctcggcagctgccaggctcccagcgctacgcggtcatgagagcggcggaaatgcaccagttgaaggacagcagccgtggggaggcgagcaacccggactttgggaaaaccatcagagacctgcctctctccatctggctcctgctgaagaaccccacgttcatcctgctctgcctggccggggccaccgaggccactctcatcaccggcatgtccacgttcagccccaagttcttggagtcccagttcagcctgagtgcctcagaagctgccaccttgtttgggtacctggtggtgccagcgggtggtggcggcaccttcctgggcggcttctttgtgaacaagctcaggctccggggctccgcggtcatcaagttctgcctgttctgcaccgttgtcagcctgctgggcatcctcgtcttctcactgcactgccccagtgtgcccatggcgggcgtcacagccagctacggcgggagcctcctgcccgaaggccacctgaacctaacggctccctgcaacgctgcctgcagctgccagccagaacactacagccctgtgtgcggctcggacggcctcatgtacttctcactgtgccacgcagggtgccctgcagccacggagacgaatgtggacggccagaaggtgtaccgagactgtagctgtatccctcagaatctttcctctggttttggccatgccactgcagggaaatgcacttcaacttgtcagagaaagcccctccttctggttttcatattcgttgtaattttctttacattcctcagcagcattcctgcactaacggcaactctacgatgtgtccgtgaccctcagagatcctttgccctgggaatccagtggattgtagttagaatactagggggcatcccggggcccatcgccttcggctgggtgatcgacaaggcctgtctgctgtggcaggaccagtgtggccagcagggctcctgcttggtgtaccagaattcggccatgagccgctacatactcatcatggggctcctgtacaaggtgctgggcgtcctcttctttgccatagcctgcttcttatacaagcccctgtcggagtcttcagatggcctggaaacttgtctgcccagccagtcctcagcccctgacagtgccacagatagccagctccagagcagcgtctgaccaccgcccgcgcccacccggccacggcgggcactcagcatttcctgatgacagaacagtgccgttgggtgatgcaatcacacgggaacttctatttgacctgcaaccttctacttaacctgtggtttaaagtcggctgtgacctcctgtccccagagctgtacggccctgcagtgggtgggaggaacttgcataaatatatatttatggacacacagtttgcatcagaacgtgtttatagaatgtgttttatacccgatcgtgtgtggtgtgcgtgaggacaaactccgcaggggctgtgaatcccactgggagggcggtgggcctgcagcctgaggaaggcttgtgtgtcctcagttaaaactgtgcatatcgaaatatattttgttatttaagcctg

SEQ ID NO: 29452 - DNA, 2732 bp, Homo sapiens
  source 1..2732: mol_type = unassigned DNA
ggctgccggggaggccagagcgtggagcgctgcgcggcgcggcggccgggccctcgagacggggacggacacaccagcccctcggataccacttggccactcccgctgaggccactcccactgcgtggctgaagcctcgaggtcaccaggcggaggcgcggagatgcccctgcatcagctgggggacaagccgctcaccttccccagccccaactcagccatggaaaacgggcttgaccacaccccacccagcaggagggcatccccgggcacacccctgagccccggctccctccgctccgctgcccatagccccctggacaccagcaagcagcccctctgccagctctgggccgagaagcatggcgcccgggggacccatgaggtgcggtacgtctcggccgggcagagcgtggcgtgcggctggtgggccttcgcaccgccgtgcctgcaggtcctcaacacgcccaagggcatcctgttcttcctgtgtgcggccgcattcctgcaggggatgactgtgaatggcttcatcaacacagtcatcacctccctggagcgccgctatgacctgcacagctaccagagcgggctcatcgccagctcctacgacattgccgcctgcctctgcctcaccttcgtcagctacttcgggggctcagggcacaagccgcgctggctgggctggggcgtgctgcttatgggcacggggtcgctggtgttcgcgctgccccacttcacggctggccgctatgaggtggagttggacgcgggtgtcaggacgtgccctgccaaccccggcgcggtgtgtgcggacagcacctcgggcctgtcccgctaccagctggtcttcatgctgggccagttcctgcatggcgtgggtgccacacccctctacacgctgggcgtcacctacctggatgagaacgtcaagtccagctgctcgcccgtctacattgccatcttctacacagcggccatcctgggcccagctgccggctacctgattggaggtgccctgctgaatatctacacggaaatgggccgacggacggagctgaccaccgagagcccactgtgggtcggcgcctggtgggtcggcttcctgggctctggggccgctgctttcttcaccgccgttcccatccttggttaccctcggcagctgccaggctcccagcgctacgcggtcatgagagcggcggaaatgcaccagttgaaggacagcagccgtggggaggcgagcaacccggactttgggaaaaccatcagagacctgcctctctccatctggctcctgctgaagaaccccacgttcatcctgctctgcctggccggggccaccgaggccactctcatcaccggcatgtccacgttcagccccaagttcttggagtcccagttcagcctgagtgcctcagaagctgccaccttgtttgggtacctggtggtgccagcgggtggtggcggcaccttcctgggcggcttctttgtgaacaagctcaggctccggggctccgcggtcatcaagttctgcctgttctgcaccgttgtcagcctgctgggcatcctcgtcttctcactgcactgccccagtgtgcccatggcgggcgtcacagccagctacggcgggagcctcctgcccgaaggccacctgaacctaacggctccctgcaacgctgcctgcagctgccagccagaacactacagccctgtgtgcggctcggacggcctcatgtacttctcactgtgccacgcagggtgccctgcagccacggagacgaatgtggacggccagaaggtgtaccgagactgtagctgtatccctcagaatctttcctctggttttggccatgccactgcagggaaatgcacttcaacttttctttacattcctcagcagcattcctgcactaacggcaactctacgacaggagcactccaggaaacacccaggtctaagcgggcctgcagatgtgtccgtgaccctcagagatcctttgccctgggaatccagtggattgtagttagaatactagggggcatcccggggcccatcgccttcggctgggtgatcgacaaggcctgtctgctgtggcaggaccagtgtggccagcagggctcctgcttggtgtaccagaattcggccatgagccgctacatactcatcatggggctcctgtacaaggtgctgggcgtcctcttctttgccatagcctgcttcttatacaagcccctgtcggagtcttcagatggcctggaaacttgtctgcccagccagtcctcagcccctgacagtgccacagatagccagctccagagcagcgtctgaccaccgcccgcgcccacccggccacggcgggcactcagcatttcctgatgacagaacagtgccgttgggtgatgcaatcacacgggaacttctatttgacctgcaaccttctacttaacctgtggtttaaagtcggctgtgacctcctgtccccagagctgtacggccctgcagtgggtgggaggaacttgcataaatatatatttatggacacacagtttgcatcagaacgtgtttatagaatgtgttttatacccgatcgtgtgtggtgtgcgtgaggacaaactccgcaggggctgtgaatcccactgggagggcggtgggcctgcagcctgaggaaggcttgtgtgtcctcagttaaaactgtgcatatcgaaatatattttgttatttaagcctg

SEQ ID NO: 29453 - DNA, 856 bp, Homo sapiens
  source 1..856: mol_type = unassigned DNA
actacagccctgtgtgcggctcggacggcctcatgtacttctcactgtgccacgcagggtgccctgcagccacggagacgaatgtggacggccagaagatgtgtccgtgaccctcagagatcctttgccctgggaatccagtggattgtagttagaatactagggggcatcccggggcccatcgccttcggctgggtgatcgacaaggcctgtctgctgtggcaggaccagtgtggccagcagggctcctgcttggtgtaccagaattcggccatgagccgctacatactcatcatggggctcctgtacaaggtgctgggcgtcctcttctttgccatagcctgcttcttatacaagcccctgtcggagtcttcagatggcctggaaacttgtctgcccagccagtcctcagcccctgacagtgccacagatagccagctccagagcagcgtctgaccaccgcccgcgcccacccggccacggcgggcactcagcatttcctgatgacagaacagtgccgttgggtgatgcaatcacacgggaacttctatttgacctgcaaccttctacttaacctgtggtttaaagtcggctgtgacctcctgtccccagagctgtacggccctgcagtgggtgggaggaacttgcataaatatatatttatggacacacagtttgcatcagaacgtgtttatagaatgtgttttatacccgatcgtgtgtggtgtgcgtgaggacaaactccgcaggggctgtgaatcccactgggagggcggtgggcctgcagcctgaggaaggcttgtgtgtcctcagttaaaactgtgcatatcgaaatatattttgttatttaagcctg

SEQ ID NO: 29454 - DNA, 3092 bp, Homo sapiens
  source 1..3092: mol_type = unassigned DNA
gcggcgcggcggccgggccctcgagacggggacggacacaccagcccctcggataccacttggccactcccgctgaggccactcccactgcgtggctgaagcctcgaggtcaccaggcggaggcgcggagatgcccctgcatcagctgggggacaagccgctcaccttccccagccccaactcagccatggaaaacgggcttgaccacaccccacccagcaggagggcatccccgggcacacccctgagccccggctccctccgctccgctgcccatagccccctggacaccagcaagcagcccctctgccagctctgggccgagaagcatggcgcccgggggacccatgaggtgcggtacgtctcggccgggcagagcgtggcgtgcggctggtgggccttcgcaccgccgtgcctgcaggtcctcaacacgcccaagggcatcctgttcttcctgtgtgcggccgcattcctgcaggggatgactgtgaatggcttcatcaacacagtcatcacctccctggagcgccgctatgacctgcacagctaccagagcgggctcatcgccagctcctacgacattgccgcctgcctctgcctcaccttcgtcagctacttcgggggctcagggcacaagccgcgctggctgggctggggcgtgctgcttatgggcacggggtcgctggtgttcgcgctgccccacttcacggctggccgctatgaggtggagttggacgcgggtgtcaggacgtgccctgccaaccccggcgcggtgtgtgcggacagcacctcgggcctgtcccgctaccagctggtcttcatgctgggccagttcctgcatggcgtgggtgccacacccctctacacgctgggcgtcacctacctggatgagaacgtcaagtccagctgctcgcccgtctacattgccatcttctacacagcggccatcctgggcccagctgccggctacctgattggaggtgccctgctgaatatctacacggaaatgggccgacggacggagctgaccaccgagagcccactgtgggtcggcgcctggtgggtcggcttcctgggctctggggccgctgctttcttcaccgccgttcccatccttggttaccctcggcagctgccaggctcccagcgctacgcggtcatgagagcggcggaaatgcaccagttgaaggacagcagccgtggggaggcgagcaacccggactttgggaaaaccatcagagacctgcctctctccatctggctcctgctgaagaaccccacgttcatcctgctctgcctggccggggccaccgaggccactctcatcaccggcatgtccacgttcagccccaagttcttggagtcccagttcagcctgagtgcctcagaagctgccaccttgtttgggtacctggtggtgccagcgggtggtggcggcaccttcctgggcggcttctttgtgaacaagctcaggctccggggctccgcggtcatcaagttctgcctgttctgcaccgttgtcagcctgctgggcatcctcgtcttctcactgcactgccccagtgtgcccatggcgggcgtcacagccagctacggcgggagcctcctgcccgaaggccacctgaacctaacggctccctgcaacgctgcctgcagctgccagccagaacactacagccctgtgtgcggctcggacggcctcatgtacttctcactgtgccacgcagggtgccctgcagccacggagacgaatgtggacggccagaaggtgagtggagccgctgcctaccgcccctgtcctcccctggaccctgggaaggggcccccgtgccttccccttgtaatcggagctattgttgggcttcccaggtgtaccgagactgtagctgtatccctcagaatctttcctctggttttggccatgccactgcagggaaatgcacttcaacttgtcagagaaagcccctccttctggttttcatattcgttgtaattttctttacattcctcagcagcattcctgcactaacggcaactctacggtaagctggggtcgggtgtgcgcttgtccagagctttccttgcagcaccctgaggcggagctctgcagatcctgagacaggagcactccaggaaacacccaggtctaagcgggcctgtctgtcactggtggcaggagagacctcactgtctctgatctctgacgaggggcttcccacttgggggggggtgatgatgtggctggggactggtccaggaggccactggcctagggggtgacttggcatgcaaccccacttctgtgggtgctgacgctgtggttttctattgcagatgtgtccgtgaccctcagagatcctttgccctgggaatccagtggattgtagttagaatactagggggcatcccggggcccatcgccttcggctgggtgatcgacaaggcctgtctgctgtggcaggaccagtgtggccagcagggctcctgcttggtgtaccagaattcggccatgagccgctacatactcatcatggggctcctgtacaaggtgctgggcgtcctcttctttgccatagcctgcttcttatacaagcccctgtcggagtcttcagatggcctggaaacttgtctgcccagccagtcctcagcccctgacagtgccacagatagccagctccagagcagcgtctgaccaccgcccgcgcccacccggccacggcgggcactcagcatttcctgatgacagaacagtgccgttgggtgatgcaatcacacgggaacttctatttgacctgcaaccttctacttaacctgtggtttaaagtcggctgtgacctcctgtccccagagctgtacggccctgcagtgggtgggaggaacttgcataaatatatatttatggacacacagtttgcatcagaacgtgtttatagaatgtgttttatacccgatcgtgtgtggtgtgcgtgaggacaaactccgcaggggctgtgaatcccactgggagggcggtgggcctgcagcctgaggaaggcttgtgtgtcctcagttaaaactgtgcatatcgaaatatattttgttatttaagcctg

SEQ ID NO: 29455 - DNA, 2437 bp, Homo sapiens
  source 1..2437: mol_type = unassigned DNA
gcttgggcggcaagagccccttgtggccaccgagtcctccgacgccctcgccaggctggcctttgggttggcccaggcaggacgggcagccgagagcactcgggccgcgtcgccaggagccgcccagggtgagccatgttcgtaggcgtcgcccggcactctgggagccaggatgaagtctcaaggggagtagagccgctggaggccgcgcgggcccagcctgctaaggacaggagggccaagggaaccccgaagtcctcgaagcccgggaaaaaacaccggtatctgagactacttccagaggccttgataaggttcggcggtttccgaaaaaggaaaaaagccaagtcctcagtttccaagaagccgggagaagtggatgacagtttggagcagccctgtggtttgggctgcttagtcagcacctgctgtgagtgttgcaataacattcgctgcttcatgattttctactgcatcctgctcatatgtcaaggtgtggtgtttggtcttatagatgtcagcattggcgattttcagaaggaatatcaactgaaaaccattgagaagttggcattggaaaagagttacgatatttcatctggcctggtagcaatatttatagcattctatggagacagaaaaaaagtaatatggtttgtagcttcctcctttttaataggacttggatcacttttatgtgcttttccatccattaatgaagaaaataaacaaagtaaggtaggaattgaagatatttgcgaagaaataaaggttgtcagtggttgccagagcagtggtatatcattccaatcaaaatacctgtctttcttcatccttgggcagactgtgcagggaatagcaggaatgcctctttatatccttggaataacctttattgatgagaatgttgctacacactcagctggtatctatttaggtattgcagaatgtacatcaatgattggatatgctctgggttatgtgctaggagcaccactagttaaagtccctgagaatactacttctgcaacaaacactacagtcaataatggtagtccagaatggctatggacttggtggattaattttctttttgccgctgtcgttgcatggtgtacattaataccattgtcatgctttccaaacaatatgccaggttcaacacggataaaagctaggaaacgtaaacagcttcatttttttgacagcagacttaaagatctgaaacttggaactaatatcaaggatttatgtgctgctctttggattctgatgaagaatccagtgctcatatgcctagctctgtcaaaagctacagaatatttagttattattggagcttctgaatttttgcctatatatttagaaaatcagtttatattaacacccactgtggcaactacacttgcaggacttgttttaattccaggaggtgcacttggccagcttctgggaggtgtcattgtttccacattagaaatgtcttgtaaagcccttatgagatttataatggttacatctgtgatatcacttatactgcttgtgtttattatttttgtacgctgtaatccagtgcaatttgctgggatcaatgaagattatgatggaacagggaagttgggaaacctcacggctccttgcaatgaaaaatgtagatgctcatcttcaatttattcttctatatgtggaagagatgatattgaatatttttctccctgctttgcagggtgtacatattctaaagcacaaaaccaaaaaaagatgtactacaattgttcttgcattaaagaaggattaataactgcagatgcagaaggtgattttattgatgccagacccgggaaatgtgatgcaaagtgctataagttacctttgttcattgcttttatcttttctacacttatattttctggtttttctggtgtaccaatcgtcttggccatgacgcgggttgtacctgacaaactgcgttctctggccttgggtgtaagctatgtgattttgagaatatttgggactattcctggaccatcaatctttaaaatgtcaggagaaacttcttgtattttacgggatgttaataaatgtggacacacaggacgttgttggatatataacaagacaaaaatggctttcttattggtaggaatatgttttctttgcaaactatgcactatcatcttcactactattgcatttttcatatacaaacgtcgtctaaatgagaacactgacttcccagatgtaactgtgaagaatccaaaagttaagaaaaaagaagaaactgacttgtaactggatcatcattgtattctccaagatttgtttctgtgcccaactttcagaagaggaaaatcacacattatgtttacataagtagcaaaaatatatttatggtgatctgcattttcataataaagtgtcctattgtgaaaca

SEQ ID NO: 29456 - DNA, 1762 bp, Homo sapiens
  source 1..1762: mol_type = unassigned DNA
tttgcctcctgccctaggagaaacgttcgctctggaggcttgggcggcaagagccccttgtggccaccgagtcctccgacgccctcgccaggctggcctttgggttggcccaggcaggacgggcagccgagagcactcgggccgcgtcgccaggagccgcccagggtgagccatgttcgtaggcgtcgcccggcactctgggagccaggatgaagtctcaaggggagtagagccgctggaggccgcgcgggcccagcctgctaaggacaggagggccaagggaaccccgaagtcctcgaagcccgggaaaaaacaccggtatctgagactacttccagaggccttgataaggttcggcggtttccgaaaaaggaaaaaagccaagtcctcagtttccaagaagccgggagaagtggatgacagtttggagcagccctgtggtttgggctgcttagtcagcacctgctgtgagtgttgcaataacattcgctgcttcatgattttctactgcatcctgctcatatgtcaaggtgtggtgtttggtcttatagatgtcagcattggcgattttcagaaggaatatcaactgaaaaccattgagaagttggcattggaaaagagttacgatatttcatctggcctggtagcaatatttatagcattctatggagacagaaaaaaagtaatatggtttgtagcttcctcctttttaataggacttggatcacttttatgtgcttttccatccattaatgaagaaaataaacaaagtaaggtaggaattgaaggtattgcagaatgtacatcaatgattggatatgctctgggttatgtgctaggagcaccactagttaaagtccctgagaatactacttctgcaacaaaaacagggaagttgggaaacctcacggctccttgcaatgaaaaatgtagatgctcatcttcaatttattcttctatatgtggaagagatgatattgaatatttttctccctgctttgcagggtgtacatattctaaagcacaaaaccaaaaaaagatgtactacaattgttcttgcattaaagaaggattaataactgcagatgcagaaggtgattttattgatgccagacccgggaaatgtgatgcaaagtgctataagttacctttgttcattgcttttatcttttctacacttatattttctggtttttctggtgtaccaatcgtcttggccatgacgcgggttgtacctgacaaactgcgttctctggccttgggtgtaagctatgtgattttgagaatatttgggactattcctggaccatcaatctttaaaatgtcaggagaaacttcttgtattttacgggatgttaataaatgtggacacacaggacgttgttggatatataacaagacaaaaatggctttcttattggtaggaatatgttttctttgcaaactatgcactatcatcttcactactattgcatttttcatatacaaacgtcgtctaaatgagaacactgacttcccagatgtaactgtgaagaatccaaaagttaagaaaaaagaagaaactgacttgtaactggatcatcattgtgattgcagatcatttgaggatcagagtgtgaaaacgagtttctcttttacagattctccaagatttgtttctgtgcccaactttcagaagaggaaaatcacacattatgtttacataagtagcaaaaatatatttatggtgatctgcattttcataataaagtgtcctattgtg

SEQ ID NO: 29457 - DNA, 2340 bp, Homo sapiens
  source 1..2340: mol_type = unassigned DNA
tttgcctcctgccctaggagaaacgttcgctctggaggcttgggcggcaagagccccttgtggccaccgagtcctccgacgccctcgccaggctggcctttgggttggcccaggcaggacgggcagccgagagcactcgggccgcgtcgccaggagccgcccagggtgagccatgttcgtaggcgtcgcccggcactctgggagccaggatgaagtctcaaggggagtagagccgctggaggccgcgcgggcccagcctgctaaggacaggagggccaagggaaccccgaagtcctcgaagcccgggaaaaaacaccggtatctgagactacttccagaggccttgataaggttcggcggtttccgaaaaaggaaaaaagccaagtcctcagtttccaagaagccgggagaagtggatgacagtttggagcagccctgtggtttgggctgcttagtcagcacctgctgtgagtgttgcaataacattcgctgcttcatgattttctactgcatcctgctcatatgtcaaggtgtggtgtttggtcttatagatgtcagcattggcgattttcagaaggaatatcaactgaaaaccattgagaagttggcattggaaaagagttacgatatttcatctggcctggtagcaatatttatagcattctatggagacagaaaaaaagtaatatggtttgtagcttcctcctttttaataggacttggatcacttttatgtgcttttccatccattaatgaagaaaataaacaaagtaaggtaggaattgaaggtattgcagaatgtacatcaatgattggatatgctctgggttatgtgctaggagcaccactagttaaagtccctgagaatactacttctgcaacaaacactacagtcaataatggtagtccagaatggctatggacttggtggattaattttctttttgccgctgtcgttgcatggtgtacattaataccattgtcatgctttccaaacaatatgccaggttcaacacggataaaagctaggaaacgtaaacagcttcatttttttgacagcagacttaaagatctgaaacttggaactaatatcaaggatttatgtgctgctctttggattctgatgaagaatccagtgctcatatgcctagctctgtcaaaagctacagaatatttagttattattggagcttctgaatttttgcctatatatttagaaaatcagtttatattaacacccactgtggcaactacacttgcaggacttgttttaattccaggaggtgcacttggccagcttctgggaggtgtcattgtttccacattagaaatgtcttgtaaagcccttatgagatttataatggttacatctgtgatatcacttatactgcttgtgtttattatttttgtacgctgtaatccagtgcaatttgctgggatcaatgaagattatgatggaacagggaagttgggaaacctcacggctccttgcaatgaaaaatgtagatgctcatcttcaatttattcttctatatgtggaagagatgatattgaatatttttctccctgctttgcagggtgtacatattctaaagcacaaaaccaaaaaaagatgtactacaattgttcttgcattaaagaaggattaataactgcagatgcagaaggtgattttattgatgccagacccgggaaatgtgatgcaaagtgctataagttacctttgttcattgcttttatcttttctacacttatattttctggtttttctggtgtaccaatcgtcttggccatgacgcgggttgtacctgacaaactgcgttctctggccttgggtgtaagctatgtgattttgagaatatttgggactattcctggaccatcaatctttaaaatgtcaggagaaacttcttgtattttacgggatgttaataaatgtggacacacaggacgttgttggatatataacaagacaaaaatggctttcttattggtaggaatatgttttctttgcaaactatgcactatcatcttcactactattgcatttttcatatacaaacgtcgtctaaatgagaacactgacttcccagatgtaactgtgaagaatccaaaagttaagaaaaaagaagaaactgacttgtaactggatcatcattgtgattgcagatcatttgaggatcagagtgtgaaaacgagtttctcttttacagattctccaagatttgtttctgtgcccaactttcagaagaggaaaatcacacattatgtttacataagtagcaaaaatatatttatggtgatctgcattttcataataaagtgtcctattgtgaaaca

SEQ ID NO: 29458 - DNA, 2689 bp, Homo sapiens
  source 1..2689: mol_type = unassigned DNA
tttgcctcctgccctaggagaaacgttcgctctggaggcttgggcggcaagagccccttgtggccaccgagtcctccgacgccctcgccaggctggcctttgggttggcccaggcaggacgggcagccgagagcactcgggccgcgtcgccaggagccgcccagggtgagccatgttcgtaggcgtcgcccggcactctgggagccaggatgaagtctcaaggggagtagagccgctggaggccgcgcgggcccagcctgctaaggacaggagggccaagggaaccccgaagtcctcgaagcccgggaaaaaacaccggtatctgagactacttccagaggccttgataaggttcggcggtttccgaaaaaggaaaaaagccaagtcctcagtttccaagaagccgggagaagtggatgacagtttggagcagccctgtggtttgggctgcttagtcagcacctgctgtgagtgttgcaataacattcgctgcttcatgattttctactgcatcctgctcatatgtcaaggtgtggtgtttggtcttatagatgtcagcattggcgattttcagaaggaatatcaactgaaaaccattgagaagttggcattggaaaagagttacgatatttcatctggcctggtagcaatatttatagcattctatggagacagaaaaaaagtaatatggtttgtagcttcctcctttttaataggacttggatcacttttatgtgcttttccatccattaatgaagaaaataaacaaagtaaggtaggaattgaagatatttgcgaagaaataaaggttgtcagtggttgccagagcagtggtatatcattccaatcaaaatacctgtctttcttcatccttgggcagactgtgcagggaatagcaggaatgcctctttatatccttggaataacctttattgatgagaatgttgctacacactcagctggtatctatttaggtattgcagaatgtacatcaatgattggatatgctctgggttatgtgctaggagcaccactagttaaagtccctgagaatactacttctgcaacaaacactacagtcaataatggtagtccagaatggctatggacttggtggattaattttctttttgccgctgtcgttgcatggtgtacattaataccattgtcatgctttccaaacaatatgccaggttcaacacggataaaagctaggaaacgtaaacagcttcatttttttgacagcagacttaaagatctgaaacttggaactaatatcaaggatttatgtgctgctctttggattctgatgaagaatccagtgctcatatgcctagctctgtcaaaagctacagaatatttagttattattggagcttctgaatttttgcctatatatttagaaaatcagtttatattaacacccactgtggcaactacacttgcaggacttgttttaattccaggaggtgcacttggccagcttctgggaggtgtcattgtttccacattagaaatgtcttgtaaagcccttatgagatttataatggttacatctgtgatatcacttatactgcttgtgtttattatttttgtacgctgtaatccagtgcaatttgctgggatcaatgaagattatgatggaacagggaagttgggaaacctcacggctccttgcaatgaaaaatgtagatgctcatcttcaatttattcttctatatgtggaagagatgatattgaatatttttctccctgctttgcagggtgtacatattctaaagcacaaaaccaaaaaaagatgtactacaattgttcttgcattaaagaaggattaataactgcagatgcagaaggtgattttattgatgccagacccgggaaatgtgatgcaaagtgctataagttacctttgttcattgcttttatcttttctacacttatattttctggtttttctggtgtaccaatcgtcttggccatgacgcgggttgtacctgacaaactgcgttctctggccttgggtgtaagctatgtgattttgagaatatttgggactattcctggaccatcaatctttaaaatgtcaggagaaacttcttgtattttacgggatgttaataaatgtggacacacaggacgttgttggatatataacaagacaaaaatggctttcttattggtaggaatatgttttctttgcaaactatgcactatcatcttcactactattgcatttttcatatacaaacgtcgtctaaatgagaacactgacttcccagatgtaactgtgaagaatccaaaagttaagaaaaaagaagaaactgacttgtaactggatcatcattgtgattgcagatcatttgaggatcagagtgtgaaaacgagtttctcttttacagattctccaagatttgtttctgtgcccaactttcagaagaggaaaatcacacattatgtttacataagtagcaaaaatatatttatggtgatctgcattttcataataaagtgtcctattgtgaaacatttctgataatgtttttaatgtatgtagaatttttaggatttactgggagaattaaagtttaataattttagattatttacatttcttcttaatattctgctgtctagaaatattaaaaattatacaactaggaaataaagtaaaataataacattcaaagcc

SEQ ID NO: 29459 - DNA, 432 bp, Homo sapiens
  source 1..432: mol_type = unassigned DNA
ctaaatgagaacactgacttcccagatgtaactgtgaagaatccaaaagttaagaaaaaagaagaaactgacttgtaactggatcatcattgtcaggattgcagatcatttgaggatcagagtgtgaaaacgagtttctcttttacagattctccaagatttgtttctgtgcccaactttcagaagaggaaaatcacacattatgtttacataagtagcaaaaatatatttatggtgatctgcattttcataataaagtgtcctattgtgaaacatttctgataatgtttttaatgtatgtagaatttttaggatttactgggagaattaaagtttaataattttagattatttacatttcttcttaatattctgctgtctagaaatattaaaaattatacaactaggaaataaagtaaaataataacattc

SEQ ID NO: 29460 - DNA, 1611 bp, Homo sapiens
  source 1..1611: mol_type = unassigned DNA
gttggcccaggcaggacgggcagccgagagcactcgggccgcgtcgccaggagccgcccagggtgagccatgttcgtaggcgtcgcccggcactctgggagccaggatgaagtctcaaggggagtagagccgctggaggccgcgcgggcccagcctgctaaggacaggagggccaagggaaccccgaagtcctcgaagcccgggaaaaaacaccggtatctgagactacttccagaggccttgataaggttcggcggtttccgaaaaaggaaaaaagccaagtcctcagtttccaagaagccgggagaagtggatgacagtttggagcagccctgtggtttgggctgcttagtcagcacctgctgtgagtgttgcaataacattcgctgcttcatgattttctactgcatcctgctcatatgtcaaggtgtggtgtttggtcttatagatgtcagcattggcgattttcagaaggaatatcaactgaaaaccattgagaagttggcattggaaaagagttacgatatttcatctggcctggtagcaatatttatagcattctatggagacagaaaaaaagtaatatggtttgtagcttcctcctttttaataggacttggatcacttttatgtgcttttccatccattaatgaagaaaataaacaaagtaaggtaggaattgaaggtattgcagaatgtacatcaatgattggatatgctctgggttatgtgctaggagcaccactagttaaagtccctgagaatactacttctgcaacaaaaacagggaagttgggaaacctcacggctccttgcaatgaaaaatgtagatgctcatcttcaatttattcttctatatgtggaagagatgatattgaatatttttctccctgctttgcagggtgtacatattctaaagcacaaaaccaaaaaaagatgtactacaattgttcttgcattaaagaaggattaataactgcagatgcagaaggtgattttattgatgccagacccgggaaatgtgatgcaaagtgctataagttacctttgttcattgcttttatcttttctacacttatattttctggtttttctggtgtaccaatcgtcttggccatgacgcgggttgtacctgacaaactgcgttctctggccttgggtgtaagctatgtgattttgagaatatttgggactattcctggaccatcaatctttaaaatgtcaggagaaacttcttgtattttacgggatgttaataaatgtggacacacaggacgttgttggatatataacaagacaaaaatggctttcttattggtaggaatatgttttctttgcaaactatgcactatcatcttcactactattgcatttttcatatacaaacgtcgtctaaatgagaacactgacttcccagatgtaactgtgaagaatccaaaagttaagaaaaaagaagaaactgacttgtaactggatcatcattgtattctccaagatttgtttctgtgcccaactttcagaagaggaaaatcacacattatgtttacataagtagcaaaaatatatttatggtgatctgcattttcataataaagtgtcctattgtgaaac

SEQ ID NO: 29461 - DNA, 618 bp, Homo sapiens
  source 1..618: mol_type = unassigned DNA
agcacacaagccgctttaggagcgaggttcggagccatcgctgctgcctgctgatccgcgcctagagtttgaccagccactctccagctcggctttcgcggcgccgagatgctgtcctgccgcctccagtgcgcgctggctgcgctgtccatcgtcctggccctgggctgtgtcaccggcgctccctcggaccccagactccgtcagtttctgcagaagtccctggctgctgccgcggggaagcaggaactggccaagtacttcttggcagagctgctgtctgaacccaaccagacggagaatgatgccctggaacctgaagatctgtcccaggctgctgagcaggatgaaatgaggcttgagctgcagagatctgctaactcaaacccggctatggcaccccgagaacgcaaagctggctgcaagaatttcttctggaagactttcacatcctgttagctttcttaactagtattgtccatatcagacctctgatccctcgcccccacaccccatctctcttccctaatcctccaagtcttcagcgagacccttgcattagaaactgaaaactgtaaatacaaaataaaattatggtgaaattatgaaaaatgtgaa

SEQ ID NO: 29462 - DNA, 4295 bp, Homo sapiens
  source 1..4295: mol_type = unassigned DNA
tggtcatcgcacggcggcagctcctcacctggatttagaagagctggcgtccccgcccgcccaagcctttaaactctcgtctgccagaacccgccaactctccaggcttagggccagtttccgcgattctaagagtaattgcgtgggcacctgtgctggggccaggcgcaaagaagggagttggtctgcgcgaagatcgtcaacctgctaacagaccgcacatgcactttgcaccgaccatctacgtctcagtctggaggttgcgcactttggctgctgacgcgctggtggtgcctattaatcatttaccagtccagagccgcgccagttaatggctgtgccgtgcggtgctcccacatcctggcctctcctctccacggtcgcctgtgcccgggcaccccggagctgcaaactgcagagcccaggcaaccgctgggctgtgcgccccgccggcgccggtaggagccgcgctccccgcagcggttgcgctctacccggaggcgctgggcggctgtgggctgcaggcaagcggtcgggtggggagggagggcgcaggcggcgggtgcgcgaggagaaagccccagccctggcagccccactggcccccctcagctgggatgttccccaatggcaccgcctcctctccttcctcctctcctagccccagcccgggcagctgcggcgaaggcggcggcagcaggggccccggggccggcgctgcggacggcatggaggagccagggcgaaatgcgtcccagaacgggaccttgagcgagggccagggcagcgccatcctgatctctttcatctactccgtggtgtgcctggtggggctgtgtgggaactctatggtcatctacgtgatcctgcgctatgccaagatgaagacggccaccaacatctacatcctaaatctggccattgctgatgagctgctcatgctcagcgtgcccttcctagtcacctccacgttgttgcgccactggcccttcggtgcgctgctctgccgcctcgtgctcagcgtggacgcggtcaacatgttcaccagcatctactgtctgactgtgctcagcgtggaccgctacgtggccgtggtgcatcccatcaaggcggcccgctaccgccggcccaccgtggccaaggtagtaaacctgggcgtgtgggtgctatcgctgctcgtcatcctgcccatcgtggtcttctctcgcaccgcggccaacagcgacggcacggtggcttgcaacatgctcatgccagagcccgctcaacgctggctggtgggcttcgtgttgtacacatttctcatgggcttcctgctgcccgtgggggctatctgcctgtgctacgtgctcatcattgctaagatgcgcatggtggccctcaaggccggctggcagcagcgcaagcgctcggagcgcaagatcaccttaatggtgatgatggtggtgatggtgtttgtcatctgctggatgcctttctacgtggtgcagctggtcaacgtgtttgctgagcaggacgacgccacggtgagtcagctgtcggtcatcctcggctatgccaacagctgcgccaaccccatcctctatggctttctctcagacaacttcaagcgctctttccaacgcatcctatgcctcagctggatggacaacgccgcggaggagccggttgactattacgccaccgcgctcaagagccgtgcctacagtgtggaagacttccaacctgagaacctggagtccggcggcgtcttccgtaatggcacctgcacgtcccggatcacgacgctctgagcccgggccacgcaggggctctgagcccgggccacgcaggggccctgagccaaaagagggggagaatgagaagggaaggccgggtgcgaaagggacggtatccagggcgccagggtgctgtcgggataacgtggggctaggacactgacagcctttgatggaggaacccaagaaaggcgcgcgacaatggtagaagtgagagctttgcttataaactgggaaggctttcaggctacctttttctgggtctcccactttctgttccttcctccactgcgcttactcctctgaccctccttctattttccctaccctgcaacttctatcctttcttccgcaccgtcccgccagtgcagatcacgaactcattaacaactcattctgatcctcagcccctccagtcgttatttctgtttgtttaagctgagccacggataccgccacgggtttccctcggcgttagtccctagccgcgcggggccgctgtccaggttctgtctggtgcccctactggagtcccgggaatgaccgctctccctttgcgcagccctaccttaaggaaagttggacttgagaaagatctaagcagctggtcttttctcctactcttgggtgaaggtgcatctttccctgccctcccctgtccccctctcgccgcccgcccgccaccaccactctcactccacccagagtagagccaggtgcttagtaaaataggtcccgcgcttcgaactccaggctttctggagttcccacccaagccctcctttggagcaaagaaggagctgagaacaagccgaatgaggagtttttataagattgcggggtcggagtgtgggcgcgtaataggaatcaccctcctactgcgcgttttcaaagaccaagcgctgggcgctcccgggccgcgcgtctgcgttaggcagggcagggtagtgcagggcacaccttccccggggttcggggttcggggttcggttgcagggctgcagcccgccttggctttctccctcacccaagtttccggaggagccgacctaaaagtaacaatagataaggtttcctgctccagtgtatctcaaaagaccgggcgccaggggcgggggacctagggcgacgtcttcagagtccgccagtgttggcggtgtcgccgcaacctgcaggctcccgagtggggcctgcctggtctctagagggttgctgcctttcaagcggtgcctaagaagttattttcttgtttaacatatatatttattaatttatttgtcgtgttggaaaatgtgtctctgctttccttttctctgcttgcctagccccaggtcttttctttgggaccctgggggcgggcatggaagtggaagtaggggcaagctcttgccccactccctggccatctcaacgcctctcctcaatgctgggccctcttatctcatcctttcctctagcttttctatttttgattgtgttgagtgaagtttggagatttttcatacttttcttactatagtctcttgtttgtcttattaggataatacataaatgataatgtgggttatcctcctctccatgcacagtggaaagtcctgaactcctggctttccaggagacatatataggggaacatcaccctatatataatttgagtgtatatatatttatatatatgatgtggacatatgtatacttatcttgctccattgtcatgagtccatgagtctaagtatagccactgatggtgacaggtgtgagtctggctggaacactttcagtttcaggagtgcaagcagcactcaaacctggagctgaggaatctaattcagacagagactttaatcactgctgaagatgcccctgctccctctgggttccagcagaggtgattcttacatatgatccagttaacatcatcactttttttgaggacattgaaagtgaaataatttgtgtctgtgtttaatattaccaactacattggaagcctgagcagggcgaggaccaataattttaattatttatatttcctgtattgctttagtatgctggcttgtacatagtaggcactaaatacatgtttgttggttgattgtttaagccagagtgtattacaacaatctggagatactaaatctggggttctcaggttcactcattgacatgatatacaatggttaaaatcactattgaaaaatacgttttgtgtatatttgcttcaacaactttgtgctttcctgaaagcagtaaccaagagttaagatatccctaatgttttgcttaaactaatgaacaaatatgctttgggtcataaatcagaaagtttagatctgtcccttaataaaaatatatattactactcctttggaaaatagatttttaatggttaagaactgtgaaatttacaaatcaaaatcttaatcattatccttctaagaggatacaaatttagtgctcttaacttgttaccattgtaatattaactaaataaacagatgtattatgctgttgcaa

SEQ ID NO: 29463 - DNA, 4099 bp, Homo sapiens
  source 1..4099: mol_type = unassigned DNA
tccctgtcacgcatctctcatcactccccctcattctgcctttcctcctactcacggtctcctctccctctccctctctctctctccccctccctctttctctctctctctctttctccacctcctcccgaccccctttcccctctatttctattggcttctgtgtcccttgctcccctcttctcttcctcaccctgggaagcttctcccccctatccttgcccctgcccccccaggatgtgtcctggagatggggggtgacgtaccaggctctggttgggaagtcagggccggagaccagatgggagaggctctgtggacagccgtggccgagggcctgggagggaacctgagcccgcaagcggtctagaagtgggtgccttgtggggaccctagttaggagtgccctgggggcacctggggactgggcagggagaggggacagcagaatgataaccagcctggcggcaaggagggaagccctcaccccatgggcaggcaaatagctgactgctgaccaccctcccctcagccatggacatgcttcatccatcatcggtgtccacgacctcagaacctgagaatgcctcctcggcctggcccccagatgccaccctgggcaacgtgtcggcgggcccaagcccggcagggctggccgtcagtggcgttctgatccccctggtctacctggtggtgtgcgtggtgggcctgctgggtaactcgctggtcatctatgtggtcctgcggcacacggccagcccttcagtcaccaacgtctacatcctcaacctggcgctggccgacgagctcttcatgctggggctgcccttcctggccgcccagaacgccctgtcctactggcccttcggctccctcatgtgccgcctggtcatggcggtggatggcatcaaccagttcaccagcatattctgcctgactgtcatgagcgtggaccgctacctggccgtggtacatcccacccgctcggcccgctggcgcacagctccggtggcccgcacggtcagcgcggctgtgtgggtggcctcagccgtggtggtgctgcccgtggtggtcttctcgggagtgccccgcggcatgagcacctgccacatgcagtggcccgagccggcggcggcctggcgagccggcttcatcatctacacggccgcactgggcttcttcgggccgctgctggtcatctgcctctgctacctgctcatcgtggtgaaggtgcgctcagctgggcgccgggtgtgggcaccctcgtgccagcggcggcggcgctccgaacgcagggtcacgcgcatggtggtggccgtggtggcgctcttcgtgctctgctggatgcccttctacgtgctcaacatcgtcaacgtggtgtgcccactgcccgaggagcctgccttctttgggctctacttcctggtggtggcgctgccctatgccaacagctgtgccaaccccatcctttatggcttcctctcctaccgcttcaagcagggcttccgcagggtcctgctgcggccctcccgccgtgtgcgcagccaggagcccactgtggggcccccggagaagactgaggaggaggatgaggaggaggaggatggggaggagagcagggaggggggcaaggggaaggagatgaacggccgggtcagccagatcacgcagcctggcaccagcgggcaggagcggccgcccagcagagtggccagcaaggagcagcagctcctaccccaagaggcttccactggggagaagtccagcacgatgcgcatcagctacctgtagggcctggggaaagccaggatggcccgaggaagaggcagaagccgtgggtgtgcctagggcctacttcccaaggtgccacaggcccatgatgggatgttgaggggcctggactttgatgctattgctgccaggtcttgctgtgtgaccttgggtaggttgcttctactctctgggccttgttttctcctctgtgactcagggataggagtcatcagcctggatgagctatgtcagatgagaggtttggagggcactgttgctgggctgacctggctgagcaggcaaaaggtgggtgcagactggcctccccccagggatggagtgtcttggggcatcaactagaatcttggccctcagagggataaaccaaggccaggatttcttgggctcagagtcaggaacacaggagctgctgggggctgggctggaaacctaaacagaagaaagcctaacccggtgggaggagtggggcagaaatggtcaggccccagatcagctccctcccctcgactgtgaggccttggaccagctctgctcctctctaggcctcaggcttcacctgggtaaaacccaacaacctctacacccttttggcccaggcagtcaatgctggaggtcctgtgctcctggacgggaagagcaggtgaatttcctgctcatggaagcgaatgaagtccagcttcagggtctctcactgcctgggcttttgcaaggccctgcatctacttttgtacttgtcattttgtattcgttttcttaaagagggacctcgaactgcataagcttaggccacccaaagcctggctctgcccctgctgaggtcagccacccaatccccaaggaagctcatgttgggtcttatggctggagtaggggcccccgggggttcccaggtcttttgagggcttccaggcacctccttgtaggaagggccatccctgttcctctccttgtgacccatattctcccttcctggagaccgagacagggacccagcccatgaggactggcatggaaaggcagagtgtctgaagagcgctgtgaggagaaggaagaggaagggagaagaggaagaggaaggagaaggaagaggaagacaagggggaaaggggaggatgaggagggggaaggagaagtacagatctgtttcctggagccgtctttggcccccctgggctgagctcagtggtagcatctgtgaacctgagttgccgacaacagccccacccaaccagtactgagggaaggacacgatcagggtggaacagccagggtgcaatggcaaatgcacagagtacagacaggcacagggcctgcgtccctgaggggcctcagagtgctgccaagagggctcaggccttaataaagccctagggtggagctggctaccagggacattgggaggactggggagctccctccccatgctctatcatcctggagactacaggtcgggaggcccagggaagacaagaagaggctgaagtgggactgtggagggggaccatggggagcagccaccatccaaggctgggcctagactccctcccagagatggtccctcagagctgtggtgaggctggccctgggagggtgagacccccggtgaaatccttccgcttccccaccccttgcagagggcaggggtcctcagggaaagcacaggaaccagacttttggagacttggatcttcagcacacctcagggtcctgggctggcattggccttccgggcctcaatttccccatcaacaaatggagatgaatcccagcttggctgcctcctgggatctaacgagaaaatgagtcatgtgaggtaacttccaggctcactgcaatgggtacggtggggtgtatcagattataaagtgggggtgccctcctcacccccaggcttggcctatacccccctctccatcaagtggcctctctgtgtctgtcctttggggtgaggacactgtaggccatgagaaatgggcagttggggggtcagaggccaagggttagggaggcagggcttggggagagtgtgggaccatcagaagagaaggaagtttacaaaaccacattttgtgtggagatggaggctggaggcccggccctgggacttggtctggggtttcttgaggaagatctgagggtccaagggaggaaggatgccctggccttctggccttctctggctgatcctgccttcttgctgcctaggacaggagagtaatgtcctagaatggtccctgggaggccagttaggaaaccctttgctgcttctgtctctagctcttgtcaataaagacggtgacacctg

SEQ ID NO: 29464 - DNA, 1780 bp, Homo sapiens
  source 1..1780: mol_type = unassigned DNA
tgagtctgaggcttccatccggggacaatgtcccaccttggagctctccttgttgaacggcttggctgttcacatttatggctgttctgggtgatgtcctaggttctggggttaagaaataaatcattcagggcccctgccttcaagagccagtgttctagcgggtgggagatgggcaaatggagaatgattggggtgcctggcctccctgaactgttagggctgtgcggctcaggacagccactcaccctctctgtgctgtctcctcctgaacagtcctccaaggagtccgcccccagctttcaggcaagcttgtgccaaagataaaccagacagggaggaaaagtccctccttctcaaggatgaactagatcatgcacaggattccagctctaaagaaaagacggcacctcaattgcaggcaaatagctgactgctgaccaccctcccctcagccatggacatgcttcatccatcatcggtgtccacgacctcagaacctgagaatgcctcctcggcctggcccccagatgccaccctgggcaacgtgtcggcgggcccaagcccggcagggctggccgtcagtggcgttctgatccccctggtctacctggtggtgtgcgtggtgggcctgctgggtaactcgctggtcatctatgtggtcctgcggcacacggccagcccttcagtcaccaacgtctacatcctcaacctggcgctggccgacgagctcttcatgctggggctgcccttcctggccgcccagaacgccctgtcctactggcccttcggctccctcatgtgccgcctggtcatggcggtggatggcatcaaccagttcaccagcatattctgcctgactgtcatgagcgtggaccgctacctggccgtggtacatcccacccgctcggcccgctggcgcacagctccggtggcccgcacggtcagcgcggctgtgtgggtggcctcagccgtggtggtgctgcccgtggtggtcttctcgggagtgccccgcggcatgagcacctgccacatgcagtggcccgagccggcggcggcctggcgagccggcttcatcatctacacggccgcactgggcttcttcgggccgctgctggtcatctgcctctgctacctgctcatcgtggtgaaggtgcgctcagctgggcgccgggtgtgggcaccctcgtgccagcggcggcggcgctccgaacgcagggtcacgcgcatggtggtggccgtggtggcgctcttcgtgctctgctggatgcccttctacgtgctcaacatcgtcaacgtggtgtgcccactgcccgaggagcctgccttctttgggctctacttcctggtggtggcgctgccctatgccaacagctgtgccaaccccatcctttatggcttcctctcctaccgcttcaagcagggcttccgcagggtcctgctgcggccctcccgccgtgtgcgcagccaggagcccactgtggggcccccggagaagactgaggaggaggatgaggaggaggaggatggggaggagagcagggaggggggcaaggggaaggagatgaacggccgggtcagccagatcacgcagcctggcaccagcgggcaggagcggccgcccagcagagtggccagcaaggagcagcagctcctaccccaagaggcttccactggggagaagtccagcacgatgcgcatcagctacctgtagggcctggggaaagccaggatggcccgaggaagaggcagaagccgtgggtgtgcctagggcctactt

SEQ ID NO: 29465 - DNA, 1258 bp, Homo sapiens
  source 1..1258: mol_type = unassigned DNA
ccgagctctctggcgcagcgctagctccgccgcgctcagctgccctgcgccggcacccctggtcatgagcgccccctcgacgctgccccccgggggcgaggaagggctggggacggcctggccctctgcagccaatgccagtagcgctccggcggaggcggaggaggcggtggcggggcccggggacgcgcgggcggcgggcatggtcgctatccagtgcatctacgcgctggtgtgcctggtggggctggtgggcaacgccctggtcatcttcgtgatccttcgctacgccaagatgaagacggctaccaacatctacctgctcaacctggccgtagccgacgagctcttcatgctgagcgtgcccttcgtggcctcgtcggccgccctgcgccactggcccttcggctccgtgctgtgccgcgcggtgctcagcgtcgacggcctcaacatgttcaccagcgtcttctgtctcaccgtgctcagcgtggaccgctacgtggccgtggtgcaccctctgcgcgcggcgacctaccggcggcccagcgtggccaagctcatcaacctgggcgtgtggctggcatccctgttggtcactctccccatcgccatcttcgcagacaccagaccggctcgcggcggccaggccgtggcctgcaacctgcagtggccacacccggcctggtcggcagtcttcgtggtctacactttcctgctgggcttcctgctgcccgtgctggccattggcctgtgctacctgctcatcgtgggcaagatgcgcgccgtggccctgcgcgctggctggcagcagcgcaggcgctcggagaagaaaatcaccaggctggtgctgatggtcgtggtcgtctttgtgctctgctggatgcctttctacgtggtgcagctgctgaacctcttcgtgaccagccttgatgccaccgtcaaccacgtgtcccttatccttagctatgccaacagctgcgccaaccccattctctatggcttcctctccgacaacttccgccgattcttccagcgggttctctgcctgcgctgctgcctcctggaaggtgctggaggtgctgaggaggagcccctggactactatgccactgctctcaagagcaaaggtggggcagggtgcatgtgccccccactcccctgccagcaggaagccctgcaaccagaacccggccgcaagcgcatccccctcaccaggaccaccaccttctgaggagcccttcccctacccaccctgcgt

SEQ ID NO: 29466 - DNA, 2674 bp, Homo sapiens
  source 1..2674: mol_type = unassigned DNA
atgcctgcatgtgctggttcagggactcaccaccctggcgtcctcccttcttctcttgcagagcctgacgcaccccagggctgccgccatggagcccctgttcccagcctccacgcccagctggaacgcctcctccccgggggctgcctctggaggcggtgacaacaggacgctggtggggccggcgccctcggcaggggcccgggcggtgctggtgcccgtgctgtacctgctggtgtgtgcggccgggctgggcgggaacacgctggtcatctacgtggtgctgcgcttcgccaagatgaagaccgtcaccaacatctacattctcaacctggcagtggccgacgtcctgtacatgctggggctgcctttcctggccacgcagaacgccgcgtccttctggcccttcggccccgtcctgtgccgcctggtcatgacgctggacggcgtcaaccagttcaccagtgtcttctgcctgacagtcatgagcgtggaccgctacctggcagtggtgcacccgctgagctcggcccgctggcgccgcccgcgtgtggccaagctggcgagcgccgcggcctgggtcctgtctctgtgcatgtcgctgccgctcctggtgttcgcggacgtgcaggagggcggtacctgcaacgccagctggccggagcccgtggggctgtggggcgccgtcttcatcatctacacggccgtgctgggcttcttcgcgccgctgctggtcatctgcctgtgctacctgctcatcgtggtgaaggtgagggcggcgggcgtgcgcgtgggctgcgtgcggcggcgctcggagcggaaggtgacgcgcatggtgttggtggtggtgctggtgtttgcgggatgttggctgcccttcttcaccgtcaacatcgtcaacctggccgtggcgctgccccaggagcccgcctccgccggcctctacttcttcgtggtcatcctctcctacgccaacagctgtgccaaccccgtcctctacggcttcctctctgacaacttccgccagagcttccagaaggttctgtgcctccgcaagggctctggtgccaaggacgctgacgccacggagccgcgtccagacaggatccggcagcagcaggaggccacgccacccgcgcaccgcgccgcagccaacgggcttatgcagaccagcaagctgtgagagtgcaggcggggggtgggcggccccgtgtcacccccaggagcggaggttgcactgcggtgacccccacccatgacctgccagtcaggatgctccccggcggtggtgtgaggacagagctggctgaagccaggctggggtagacacagggcagtaggttccccaccgtgaccgaccatcccctctaaccgtctgccacacagcgggggctcccgggaggtaggggaggtggccagaccggtggggggctccgccatgccgtgcaagtgctcagggccgcctcaccctccatctggccccagcccatgccggccttccctctggggagcgacttttccagaaggccggccaggcgagagggtcttcctgacggcggagctgacctgcccggcccaccagctgcatgtcagctccgagccaccgggtccccgtccaaggctgctctgctaagttaaagacacccgaaagcgcttgactcaggtccccggagtccctggccagggccccagcccctcgcttgccctgcactgtgtggactctggggatgcaggtgtaaggggagtgtggctgggcagcccctggtcagccagggtcacgcctgtcctgggggccccaccctgctgcccgacaccccccatgggaggctgcgggcggcagttgctgtctcagagaggggagtgtgggggcttgggcgctggcctagccaggggcgaggtggggaggcggctggtgcagaggagagctgggggctgaggttggggtgaaggctgcagccctccaggctgctgggggtgcagatggctgtgccgtgctgagattggctctgtctggaggggtccagtgtggggtgcctgagggcactagggagaggtgctcctgctgcaggaggacctgagggtcagggcttggagaggacagggaacctgcggccgtctcttctgctttggggcaggggctctggcccgggagagggaacggggacaggagcagaggacggtcatccaggcgcagcggggagctgctccccaggccacagcagacagcactgctgagaggcagcggccgcgcgggtgacgcaaatggcaggccctgggaatcccgccgcctcccacctagaattgtcctacctcccccaccccaaacaccagcttttcctggcgccccaggcccagaacgtgggcccagagagccttgctggggtctctggggcaccttggccttgctctgaggctggaaggagaaggaccagggtgcggcatcactcggcctcagggacccctctgccctgcccagcactggccccgacccgtgctcccgccgtctgcccagagcaggacctcaacctcctggagggcacagggagcggctgagtgggcacaaatcctggcaggagaaaggcccaggctgaggccaggcctgggaaacatccaagcagtgaggacacgcgtgtttgacaactgctcccctgaataaatgcgaggataaatgttt

SEQ ID NO: 29467 - DNA, 2640 bp, Homo sapiens
  source 1..2640: mol_type = unassigned DNA
ccgggagcccggagccagtgccgcgcggacatcggggctcccccagcctgacgcaccccagggctgccgccatggagcccctgttcccagcctccacgcccagctggaacgcctcctccccgggggctgcctctggaggcggtgacaacaggacgctggtggggccggcgccctcggcaggggcccgggcggtgctggtgcccgtgctgtacctgctggtgtgtgcggccgggctgggcgggaacacgctggtcatctacgtggtgctgcgcttcgccaagatgaagaccgtcaccaacatctacattctcaacctggcagtggccgacgtcctgtacatgctggggctgcctttcctggccacgcagaacgccgcgtccttctggcccttcggccccgtcctgtgccgcctggtcatgacgctggacggcgtcaaccagttcaccagtgtcttctgcctgacagtcatgagcgtggaccgctacctggcagtggtgcacccgctgagctcggcccgctggcgccgcccgcgtgtggccaagctggcgagcgccgcggcctgggtcctgtctctgtgcatgtcgctgccgctcctggtgttcgcggacgtgcaggagggcggtacctgcaacgccagctggccggagcccgtggggctgtggggcgccgtcttcatcatctacacggccgtgctgggcttcttcgcgccgctgctggtcatctgcctgtgctacctgctcatcgtggtgaaggtgagggcggcgggcgtgcgcgtgggctgcgtgcggcggcgctcggagcggaaggtgacgcgcatggtgttggtggtggtgctggtgtttgcgggatgttggctgcccttcttcaccgtcaacatcgtcaacctggccgtggcgctgccccaggagcccgcctccgccggcctctacttcttcgtggtcatcctctcctacgccaacagctgtgccaaccccgtcctctacggcttcctctctgacaacttccgccagagcttccagaaggttctgtgcctccgcaagggctctggtgccaaggacgctgacgccacggagccgcgtccagacaggatccggcagcagcaggaggccacgccacccgcgcaccgcgccgcagccaacgggcttatgcagaccagcaagctgtgagagtgcaggcggggggtgggcggccccgtgtcacccccaggagcggaggttgcactgcggtgacccccacccatgacctgccagtcaggatgctccccggcggtggtgtgaggacagagctggctgaagccaggctggggtagacacagggcagtaggttccccaccgtgaccgaccatcccctctaaccgtctgccacacagcgggggctcccgggaggtaggggaggtggccagaccggtggggggctccgccatgccgtgcaagtgctcagggccgcctcaccctccatctggccccagcccatgccggccttccctctggggagcgacttttccagaaggccggccaggcgagagggtcttcctgacggcggagctgacctgcccggcccaccagctgcatgtcagctccgagccaccgggtccccgtccaaggctgctctgctaagttaaagacacccgaaagcgcttgactcaggtccccggagtccctggccagggccccagcccctcgcttgccctgcactgtgtggactctggggatgcaggtgtaaggggagtgtggctgggcagcccctggtcagccagggtcacgcctgtcctgggggccccaccctgctgcccgacaccccccatgggaggctgcgggcggcagttgctgtctcagagaggggagtgtgggggcttgggcgctggcctagccaggggcgaggtggggaggcggctggtgcagaggagagctgggggctgaggttggggtgaaggctgcagccctccaggctgctgggggtgcagatggctgtgccgtgctgagattggctctgtctggaggggtccagtgtggggtgcctgagggcactagggagaggtgctcctgctgcaggaggacctgagggtcagggcttggagaggacagggaacctgcggccgtctcttctgctttggggcaggggctctggcccgggagagggaacggggacaggagcagaggacggtcatccaggcgcagcggggagctgctccccaggccacagcagacagcactgctgagaggcagcggccgcgcgggtgacgcaaatggcaggccctgggaatcccgccgcctcccacctagaattgtcctacctcccccaccccaaacaccagcttttcctggcgccccaggcccagaacgtgggcccagagagccttgctggggtctctggggcaccttggccttgctctgaggctggaaggagaaggaccagggtgcggcatcactcggcctcagggacccctctgccctgcccagcactggccccgacccgtgctcccgccgtctgcccagagcaggacctcaacctcctggagggcacagggagcggctgagtgggcacaaatcctggcaggagaaaggcccaggctgaggccaggcctgggaaacatccaagcagtgaggacacgcgtgtttgacaactgctcccctgaataaa

SEQ ID NO: 29468 - DNA, 1085 bp, Homo sapiens
  source 1..1085: mol_type = unassigned DNA
atggagcccctgttcccagcctccacgcccagctggaacgcctcctccccgggggctgcctctggaggcggtgacaacaggacgctggtggggccggcgccctcggcaggggcccgggcggtgctggtgcccgtgctgtacctgctggtgtgtgcggccgggctgggcgggaacacgctggtcatctacgtggtgctgcgcttcgccaagatgaagaccgtcaccaacatctacattctcaacctggcagtggccgacgtcctgtacatgctggggctgcctttcctggccacgcagaacgccgcgtccttctggcccttcggccccgtcctgtgccgcctggtcatgacgctggacggcgtcaaccagttcaccagtgtcttctgcctgacagtcatgagcgtggaccgctacctggcagtggtgcacccgctgagctcggcccgctggcgccgcccgcgtgtggccaagctggcgagcgccgcggcctgggtcctgtctctgtgcatgtcgctgccgctcctggtgttcgcggacgtgcaggagggcggtacctgcaacgccagctggccggagcccgtggggctgtggggcgccgtcttcatcatctacacggccgtgctgggcttcttcgcgccgctgctgagaggcagcggccgcgcgggtgacgcaaatggcaggccctgggaatcccgccgcctcccacctagaattgtcctacctcccccaccccaaacaccagcttttcctggcgccccaggcccagaacgtgggcccagagagccttgctggggtctctggggcaccttggccttgctctgaggctggaaggagaaggaccagggtgcggcatcactcggcctcagggacccctctgccctgcccagcactggccccgacccgtgctcccgccgtctgcccagagcaggacctcaacctcctggagggcacagggagcggctgagtgggcacaaatcctggcaggagaaaggcccaggctgaggccaggcctgggaaacatccaagcagtgaggacacgcgtgtttgacaactgctcccctgaataaatgcgaggataaatgttt

SEQ ID NO: 29469 - DNA, 8492 bp, Homo sapiens
  source 1..8492: mol_type = unassigned DNA
ggagcctggaggactagcgaggaggagttgagagaacggagcggacgccatggcgaccaacatcgagcagatttttaggtctttcgtggtcagtaaattccgggaaattcaacaggagctttccagtggaaggaatgaaggccagctgaatggtgaaacaaatacacccattgaaggaaaccaggcgggtgatgcagctgcctctgccaggagtctaccaaatgaagaaatagtgcagaagatagaggaagtactttctggggtcttagatacagaactacgatataagccagacttgaaagagggctccagaaaaagtagatgcgtatctgtacaaacagatcctactgatgaaattcccactaaaaagtcaaagaagcataaaaagcacaaaaacaaaaagaagaaaaagaagaaagaaaaggaaaaaaaatataaaagacagccagaagaatctgagtcaaagacgaaatctcatgatgatgggaacatagatttagaatctgattcctttttaaagtttgattctgaaccttcagctgtggcgctggagcttcctacaagagcatttggcccatctgagaccaatgaatcccctgcagttgtgctagaacctcctgtagtatcaatggaggtatcagagccacacatcttagaaactctgaagccagctacaaaaactgcagaactgtcagttgtatctacatcagtaatctcagagcagtcagagcagtctgtggcagtaatgccagaaccatccatgacaaagattctggattcctttgcagcagcaccagtgcctactacaacactggtgttgaagtcatctgagccagttgtaacaatgtcagtggagtatcagatgaagtctgtgctgaaatctgtggagagcacatctccagagccatcaaagatcatgttggtagagcccccagtagcaaaagtgttagagccttcagaaacccttgtggtatcatcagagacacctactgaggtgtaccctgagccaagcacatcaacaacaatggattttccagagtcatctgcaattgaagcgctaagattgccagagcagcctgtagacgtaccatcggagattgcagattcatccatgacaagaccgcaggagttgccggagctgcctaagaccacagcgttggagctgcaggagtcgtcggtggcctcagcgatggagttgccggggccacctgcgacctccatgccggagttgcaggggccccctgtgactccagtgctggagttacctgggccctctgctaccccggtgccagagttgccagggcccctttctaccccagtgcctgagttgccagggccccctgcgacagcagtgcctgagttgccagggccctctgtgacaccagtgccacagttgtcgcaggaattgccagggcttccagcaccatccatggggttggagccaccacaggaggtaccagagccacctgtgatggcacaggagttgccagggctgcctttggtgacagcagcagtagagttgccagagcagcctgcggtaacagtagcaatggagttgaccgaacaacctgtgacgacgacagagttggagcagcctgtggggatgacaacggtggaacatcctgggcatcctgaggtgacaacggcaacagggttgctggggcagcctgaggcaacgatggtgctggagttgccaggacagccagtggcaacgacagcgctggagttgccggggcagccttcggtgactggggtgccagagttgccagggctgccttcggcaactagggcactggagttgtcggggcagcctgtggcaactggggcactagagttgcctgggccgctcatggcagctggggcactggagttctcggggcagtctggggcagctggagcactggagcttttggggcagcctctggcaacaggggtgctggagttgccagggcagcctggggcgccagagttgcctgggcagcctgtggcaactgtggcgctggagatctctgttcagtctgtggtgacaacatcggagctgtcaacgatgaccgtgtcgcagtccctggaggtgccctcgacgacagcgctggaatcctataatacggtagcacaggagctgcctactacattagtgggggagacttctgtaacagtaggagtggatcccttgatggccccagaatcccatatattagcttctaacaccatggagacccatatattagcatccaacaccatggactcccaaatgctagcgtccaacaccatggactcccagatgctagcatccaacaccatggactcccagatgttagcgtctagcaccatggactcccagatgttagcaactagctccatggactcccagatgttagcaactagctccatggactcccagatgttagcaactagcactatggactcccagatgttagcaaccagttccatggactcccagatgttagcaaccagctccatggactcccagatgttagcaaccagctccatggactcccagatgttagcaaccagctccatggactcccagatgttagcaaccagcaccatggattctcagatgttagcaaccagcaccatggactcccagatgttagcaactagctcaatggattcccagatgttagcatctggcactatggactctcaaatgttagcttctggcaccatggatgctcagatgttagcgtctggtaccatggatgcccagatgttagcgtctagtacccaagattctgctatgttgggttcaaaatctcctgatccctataggttagctcaggatccttacaggttagctcaggatccctataggttgggccatgacccctatagattaggtcatgatgcttacaggttaggacaagacccttatagattaggccatgatccctacagactaactcctgatccctataggatgtcacctagaccctacaggatagcacccaggtcctatagaatagcacccaggccatataggttagcacctagacccctgatgttagcatctagacgttctatgatgatgtcctatgctgcagaacgttccatgatgtcatcttacgaacgctctatgatgtcttatgagcggtctatgatgtcccctatggctgaacgctctatgatgtcagcctacgagcgctctatgatgtcagcctacgagcgctctatgatgtcccctatggctgagcgctctatgatgtcagcttatgaacgctccatgatgtcagcttatgaacgctccatgatgtccccaatggctgatcgatctatgatgtccatgggtgctgaccggtctatgatgtcgtcatactctgctgctgaccggtctatgatgtcatcgtactctgcagctgaccgatctatgatgtcatcttatactgctgatcgttcaatgatgtctatggctgctgattcttacaccgattcttacactgacacatatacagaggcatatatggtgccacctttgcctcctgaagagcccccaacaatgccaccgttgccacctgaggagccaccaatgacaccaccattgcctcctgaggaaccaccagagggtccagcattgcccactgagcagtcagcattaacagctgaaaatacttggcctacagaggtgccatcatcaccatctgaagagtctgtatcgcagcctgagcctcctgtgagtcaaagtgagatttcggagccttcagcagtgcctactgattattcagtgtcagcatcagatccctcagttttagtatcagaggctgctgtgactgttccagaaccaccaccagagccagaatcttcaattacgttaacacctgtagagtctgcagtagtagcagaagaacatgaagttgttccagagagaccagtgacttgtatggtatctgaaactcccgccatgtcagctgaaccaactgtgttagcatcagagcctcctgttatgtcagagacagcagaaacatttgattccatgagagcctcaggacatgttgcctcagaagtatctacatccttgttggttccagcagtaactactccagtgctggcagagagcattctggagccgccagccatggctgccccagagtcttcagctatggctgtcctggagtcttcggctgtgaccgtcctggagtcttcgactgtgactgtcctggagtcttcgactgtaactgtcctggagccttcggttgtgactgtcccggagcctcctgttgtggctgagccagactatgttaccattcctgtgccagttgtttctgcgctggagccttctgtgcctgttctggaaccagcggtgtcagtccttcaaccttctatgattgtttcagaaccatctgtttctgtccaggaatcgactgtgacagtttcagagcctgctgtcacagtctcagagcagactcaagtaataccaactgaggtggctatagagtccacaccaatgatactggaatctagtatcatgtcatcacatgttatgaaaggaattaatctatcctctggtgatcaaaatcttgctccagagattggcatgcaggagattgcattgcattcaggtgaagaaccacatgctgaggaacacctgaaaggtgacttttacgaaagtgaacatggtataaatatagaccttaatataaataatcatttaattgctaaagagatggaacataatacagtgtgtgctgctggtactagtcctgttggggaaattggtgaagagaaaattttgcccaccagtgagactaaacagcgcacagtattggatacctaccctggtgttagtgaagctgatgcaggagaaactctatcttctactggtccttttgctctggaacctgatgcaacaggaactagtaagggtattgaatttaccacagcatctactctcagtttagttaataaatatgatgttgatttatctttaactactcaagatactgaacatgacatggtaatttccaccagtcctagtggtggtagtgaagctgacattgaagggcctttgcctgctaaagatattcatcttgatttaccatctaataataaccttgttagtaaggatacagaagaaccattacctgtaaaagagagtgaccagacattagcagctctgctcagccctaaagaaagtagtggaggagaaaaagaagtacctccccctcctaaagagacactgcctgattcaggattttctgccaatattgaggatattaatgaagcagatttagtgagaccgttacttcctaaggacatggaacgtcttacaagccttagagctggcattgaaggacctttacttgcaagtgatgttggacgtgacagatctgctgccagcccggttgtaagtagtatgccagaaagagcttcagagtcttcttcagaggaaaaagatgattatgaaatttttgtaaaagttaaggacactcacgaaaaaagcaagaaaaataagaaccgtgataagggggagaaagagaagaaaagagactcttcattaagatctcgaagtaagcgttccaaatcttctgaacacaaatcacgcaagcgtaccagtgaatctcgttctagggcaagaaagagatcatctaagtccaagtctcatcgctctcagacacgttcacggtcacgttcaagacgcaggaggagaagcagcagatcaagatcaaagtctagaggaagaagatctgtatcaaaagagaagcgcaaaagatctccaaagcacagatccaagtctagggaaagaaaaagaaaaagatcaagctccagggataaccgaaagacagttagagctcgaagtcgaaccccaagtcgtcggagtcggagtcatactccaagtcgtcgacgaaggtctagatctgtgggtagaagaaggagctttagcatttccccaagccgccgcagccgcacccccagccgccgcagccgcacccccagccgccgcagccgcacccccagccgccgcagccgcacccccagccgccggagccgcacccctagccgtcggagccgcaccccaagccgccggagaagatcaaggtctgtggtaagaagacgaagcttcagtatctcaccagtcagattaaggcgatcaagaacacccttaagaagaaggtttagcagatctcccatccgtcgtaaaagatccaggtcttctgaacgaggcagatcacccaaacgtctgacagatttggataaggctcaattacttgaaatagccaaagctaatgcagctgccatgtgtgctaaggctggtgtccctttaccaccaaacctaaagcctgcacctccacctactatagaagagaaagttgctaaaaagtcaggaggagctactatagaagaactaactgagaaatgtaaacagatcgcacagagtaaagaagatgatgatgtaatagtgaataaacctcatgtttcggatgaagaggaagaagaacctcctttttatcatcatccctttaaactcagtgaacccaaacctatttttttcaatctgaatattgctgcagcaaaaccaactccaccaaaaagccaggtaacattaacaaaagaattccctgtatcatctggatctcaacatcggaaaaaagaagcggatagtgtttatggagaatgggttcctgtggagaaaaatggtgaagaaaacaaagatgatgataatgttttcagcagcaatttgccctcagagcctgtggacatctctacagcaatgagtgaacgggcacttgctcagaaaagactcagtgagaatgcatttgatcttgaagccatgagcatgttaaatagagctcaggaaaggattgatgcctgggctcagctgaactctattcctggccagttcacaggaagtacaggagtacaggttttgacacaagaacagttggccaatactggtgcccaagcctggattaaaaagggccaaatccttgtagctgtcttcttgccccggtcagtgccagccgtactattcacaacactgctgctaccgaggcctaggatcagttcttaagagcagccccggtaactggaggaatgggagccgttttgatgagaaaaatgggctggagagaaggagaaggattaggaaaaaacaaagaaggcaataaggaacccatcctagttgattttaagacagaccgaaaaggtcttgttgcagtaggagaaagagcacaaaagaggtctgggaacttctctgctgcaatgaaagatctgtcaggcaaacatcctgtgtctgctttgatggagatctgtaataaaagaaggtggcaaccacctgaatttctattggtccatgatagtggccctgatcatcgcaaacattttctctttagggtattgagaaatggagcccttaccagacccaattgtatgtttttcttgaataggtattgataaatggaagcgcttaccagcccagctttgccagccctaataagaagcatgctaaagccacagcagctactgtggttcttcaagcaatgggccttgtaccaaaggacctcatggctaatgccacttgcttcaggagtgcctcacgtagatagattgaggttttataataatcatttcagaattttactctgcatcacaatgtatttcctctttaatgttgtaaatatttggcaatttaagacattgtgtaaaaagcaatctgtaaaaacatctccaggctttgatttttgtaccatggaaattgtatttaaccatacagggttttggtatgtttatattgtttaccttagtgatgtatttgtttaagtggctaacatccaaacgactgtttgaaggcatcagagtaatcttcagtgtggaatgttaaataacgcttttatactgtattttgtactatgatgtaactccccttccttatggctaggctactgtaacacttgcctgtaatcagtgaagggctgtgcaccttgtactatttcacaatgggttctgctggacagataatgggccagtgttattgaggtgatcaagatctgttccacagggctaatgccaccatctcccctcaaaattttgtagaggttctaaaaagaaagtggtatgttgtgtgatgatcagcactaagtcctgcattcctgttaaagccacttgggtcataagaagggagtaaaaaatgaagtctgactagaattctattgcagaggccagtacatttagtatggcattgagttgtgatatagttttactttgatgtgcattttgaatttcagctacacctagatagacgtaaaatgataattaaaatgctgtaaccaacttatctaataaaattggcaaccagccactattttgttgactatgagaaagttaaaagtttatgttaatttttagggtctgatagaatatttcatgtgtattacagtggtattcatatgctatgtctctaaactttattttcaaaagcttaaggcccaaatacaaacttctctggaataaacgtggtgttttattttctgggttat

SEQ ID NO: 29470 - DNA, 7477 bp, Homo sapiens
  source 1..7477: mol_type = unassigned DNA
ggaggagttgagagaacggagcggacgccatggcgaccaacatcgagcagatttttaggtctttcgtggtcagtaaattccgggaaattcaacaggagctttccagtggaaggaatgaaggccagctgaatggtgaaacaaatacacccattgaaggaaaccaggcgggtgatgcagctgcctctgccaggagtctaccaaatgaagaaatagtgcagaagatagaggaagtactttctggggtcttagatacagaactacgatataagccagacttgaaagagggctccagaaaaagtagatgcgtatctgtacaaacagatcctactgatgaaattcccactaaaaagtcaaagaagcataaaaagcacaaaaacaaaaagaagaaaaagaagaaagaaaaggaaaaaaaatataaaagacagccagaagaatctgagtcaaagacgaaatctcatgatgatgggaacatagatttagaatctgattcctttttaaagtttgattctgaaccttcagctgtggcgctggagcttcctacaagagcatttggcccatctgagaccaatgaatcccctgcagttgtgctagaacctcctgtagtatcaatggaggtatcagagccacacatcttagaaactctgaagccagctacaaaaactgcagaactgtcagttgtatctacatcagtaatctcagagcagtcagagcagtctgtggcagtaatgccagaaccatccatgacaaagattctggattcctttgcagcagcaccagtgcctactacaacactggtgttgaagtcatctgagccagttgtaacaatgtcagtggagtatcagatgaagtctgtgctgaaatctgtggagagcacatctccagagccatcaaagatcatgttggtagagcccccagtagcaaaagtgttagagccttcagaaacccttgtggtatcatcagagacacctactgaggtgtaccctgagccaagcacatcaacaacaatggattttccagagtcatctgcaattgaagcgctaagattgccagagcagcctgtagacgtaccatcggagattgcagattcatccatgacaagaccgcaggagttgccggagctgcctaagaccacagcgttggagctgcaggagtcgtcggtggcctcagcgatggagttgccggggccacctgcgacctccatgccggagttgcaggggccccctgtgactccagtgctggagttacctgggccctctgctaccccggtgccagagttgccagggcccctttctaccccagtgcctgagttgccagggccccctgcgacagcagtgcctgagttgccagggccctctgtgacaccagtgccacagttgtcgcaggaattgccagggcttccagcaccatccatggggttggagccaccacaggaggtaccagagccacctgtgatggcacaggagttgccagggctgcctttggtgacagcagcagtagagttgccagagcagcctgcggtaacagtagcaatggagttgaccgaacaacctgtgacgacgacagagttggagcagcctgtggggatgacaacggtggaacatcctgggcatcctgaggtgacaacggcaacagggttgctggggcagcctgaggcaacgatggtgctggagttgccaggacagccagtggcaacgacagcgctggagttgccggggcagccttcggtgactggggtgccagagttgccagggctgccttcggcaactagggcactggagttgtcggggcagcctgtggcaactggggcactagagttgcctgggccgctcatggcagctggggcactggagttctcggggcagtctggggcagctggagcactggagcttttggggcagcctctggcaacaggggtgctggagttgccagggcagcctggggcgccagagttgcctgggcagcctgtggcaactgtggcgctggagatctctgttcagtctgtggtgacaacatcggagctgtcaacgatgaccgtgtcgcagtccctggaggtgccctcgacgacagcgctggaatcctataatacggtagcacaggagctgcctactacattagtgggggagacttctgtaacagtaggagtggatcccttgatggccccagaatcccatatattagcttctaacaccatggagacccatatattagcatccaacaccatggactcccaaatgctagcgtccaacaccatggactcccagatgctagcatccaacaccatggactcccagatgttagcgtctagcaccatggactcccagatgttagcaactagctccatggactcccagatgttagcaactagctccatggactcccagatgttagcaactagcactatggactcccagatgttagcaaccagttccatggactcccagatgttagcaaccagctccatggactcccagatgttagcaaccagctccatggactcccagatgttagcaaccagctccatggactcccagatgttagcaaccagcaccatggattctcagatgttagcaaccagcaccatggactcccagatgttagcaactagctcaatggattcccagatgttagcatctggcactatggactctcaaatgttagcttctggcaccatggatgctcagatgttagcgtctggtaccatggatgcccagatgttagcgtctagtacccaagattctgctatgttgggttcaaaatctcctgatccctataggttagctcaggatccttacaggttagctcaggatccctataggttgggccatgacccctatagattaggtcatgatgcttacaggttaggacaagacccttatagattaggccatgatccctacagactaactcctgatccctataggatgtcacctagaccctacaggatagcacccaggtcctatagaatagcacccaggccatataggttagcacctagacccctgatgttagcatctagacgttctatgatgatgtcctatgctgcagaacgttccatgatgtcatcttacgaacgctctatgatgtcttatgagcggtctatgatgtcccctatggctgaacgctctatgatgtcagcctacgagcgctctatgatgtcagcctacgagcgctctatgatgtcccctatggctgagcgctctatgatgtcagcttatgaacgctccatgatgtcagcttatgaacgctccatgatgtccccaatggctgatcgatctatgatgtccatgggtgctgaccggtctatgatgtcgtcatactctgctgctgaccggtctatgatgtcatcgtactctgcagctgaccgatctatgatgtcatcttatactgctgatcgttcaatgatgtctatggctgctgattcttacaccgattcttacactgacacatatacagaggcatatatggtgccacctttgcctcctgaagagcccccaacaatgccaccgttgccacctgaggagccaccaatgacaccaccattgcctcctgaggaaccaccagagggtccagcattgcccactgagcagtcagcattaacagctgaaaatacttggcctacagaggtgccatcatcaccatctgaagagtctgtatcgcagcctgagcctcctgtgagtcaaagtgagatttcggagccttcagcagtgcctactgattattcagtgtcagcatcagatccctcagttttagtatcagaggctgctgtgactgttccagaaccaccaccagagccagaatcttcaattacgttaacacctgtagagtctgcagtagtagcagaagaacatgaagttgttccagagagaccagtgacttgtatggtatctgaaactcccgccatgtcagctgaaccaactgtgttagcatcagagcctcctgttatgtcagagacagcagaaacatttgattccatgagagcctcaggacatgttgcctcagaagtatctacatccttgttggttccagcagtaactactccagtgctggcagagagcattctggagccgccagccatggctgccccagagtcttcagctatggctgtcctggagtcttcggctgtgaccgtcctggagtcttcgactgtgactgtcctggagtcttcgactgtaactgtcctggagccttcggttgtgactgtcccggagcctcctgttgtggctgagccagactatgttaccattcctgtgccagttgtttctgcgctggagccttctgtgcctgttctggaaccagcggtgtcagtccttcaaccttctatgattgtttcagaaccatctgtttctgtccaggaatcgactgtgacagtttcagagcctgctgtcacagtctcagagcagactcaagtaataccaactgaggtggctatagagtccacaccaatgatactggaatctagtatcatgtcatcacatgttatgaaaggaattaatctatcctctggtgatcaaaatcttgctccagagattggcatgcaggagattgcattgcattcaggtgaagaaccacatgctgaggaacacctgaaaggtgacttttacgaaagtgaacatggtataaatatagaccttaatataaataatcatttaattgctaaagagatggaacataatacagtgtgtgctgctggtactagtcctgttggggaaattggtgaagagaaaattttgcccaccagtgagactaaacagcgcacagtattggatacctaccctggtgttagtgaagctgatgcaggagaaactctatcttctactggtccttttgctctggaacctgatgcaacaggaactagtaagggtattgaatttaccacagcatctactctcagtttagttaataaatatgatgttgatttatctttaactactcaagatactgaacatgacatggtaatttccaccagtcctagtggtggtagtgaagctgacattgaagggcctttgcctgctaaagatattcatcttgatttaccatctaataataaccttgttagtaaggatacagaagaaccattacctgtaaaagagagtgaccagacattagcagctctgctcagccctaaagaaagtagtggaggagaaaaagaagtacctccccctcctaaagagacactgcctgattcaggattttctgccaatattgaggatattaatgaagcagatttagtgagaccgttacttcctaaggacatggaacgtcttacaagccttagagctggcattgaaggacctttacttgcaagtgatgttggacgtgacagatctgctgccagcccggttgtaagtagtatgccagaaagagcttcagagtcttcttcagaggaaaaagatgattatgaaatttttgtaaaagttaaggacactcacgaaaaaagcaagaaaaataagaaccgtgataagggggagaaagagaagaaaagagactcttcattaagatctcgaagtaagcgttccaaatcttctgaacacaaatcacgcaagcgtaccagtgaatctcgttctagggcaagaaagagatcatctaagtccaagtctcatcgctctcagacacgttcacggtcacgttcaagacgcaggaggagaagcagcagatcaagatcaaagtctagaggaagaagatctgtatcaaaagagaagcgcaaaagatctccaaagcacagatccaagtctagggaaagaaaaagaaaaagatcaagctccagggataaccgaaagacagttagagctcgaagtcgaaccccaagtcgtcggagtcggagtcatactccaagtcgtcgacgaaggtctagatctgtgggtagaagaaggagctttagcatttccccaagccgccgcagccgcacccccagccgccgcagccgcacccccagccgccgcagccgcacccccagccgccgcagccgcacccccagccgccggagccgcacccctagccgtcggagccgcaccccaagccgccggagaagatcaaggtctgtggtaagaagacgaagcttcagtatctcaccagtcagattaaggcgatcaagaacacccttaagaagaaggtttagcagatctcccatccgtcgtaaaagatccaggtcttctgaacgaggcagatcacccaaacgtctgacagatttggataaggctcaattacttgaaatagccaaagctaatgcagctgccatgtgtgctaaggctggtgtccctttaccaccaaacctaaagcctgcacctccacctactatagaagagaaagttgctaaaaagtcaggaggagctactatagaagaactaactgagaaatgtaaacagatcgcacagagtaaagaagatgatgatgtaatagtgaataaacctcatgtttcggatgaagaggaagaagaacctcctttttatcatcatccctttaaactcagtgaacccaaacctatttttttcaatctgaatattgctgcagcaaaaccaactccaccaaaaagccaggtaacattaacaaaagaattccctgtatcatctggatctcaacatcggaaaaaagaagcggatagtgtttatggagaatgggttcctgtggagaaaaatggtgaagaaaacaaagatgatgataatgttttcagcagcaatttgccctcagagggccgggttaaacggcagggccgggttagacgacagatgaaacaacccgcagcttctcatttgacagtaactcgatgcaattcactttgtggaaccaagccacaaagtgaaaagcatcgaattgcagagaacagtgttatcacatccctacccaacattgggccctccctgcacttgtgggaaggtagtccaaggtacaactatttagcttcccgatttgcttcaaggctctatagctctagattttggtggtagcaaatttatcgggtggagggattgatcggagagggcagatcctcaggttcaacacaagaactggattggaaaaggtcattgtaggttgatgtgagcatcttgggtacatagcccattgcccttaatgatggtttcttactgtttctctgggttgtttgtcagatagcctttaattttaattatttttccttccctttgctaccttggcccttttaaattcttgtgtttaacctaatgctcagccttggtactccattcccttctccttcccctctttgctactattaaaagtcggagaagtggaattcaaacgttgaaatttccacggggctatagttgtatcttaataatgccaagtgtcaaaacaaccccattaaaatgccgcctgattaaataatgtgctgctaaatatagtgcacatgaaaacagcaagactgtatatatatgtaaatatatatatatatctgtatctttgtatgtatctctgtatctgtacctttgctgtatcttttaataaacagtttacttttatttaa

SEQ ID NO: 29471 - DNA, 8813 bp, Homo sapiens
  source 1..8813: mol_type = unassigned DNA
ctcccggatgcatatccctgtcgaaactgaacttggcgccacctgagagcgcctgaaagccgtgtgttaaacaccgggttgcccttcttgctcttcttcctcttcgcctttaatctcaggcacttagcaagcctgttaaggctcccaaacactgctggggactgacaacttatgcggacacggtcgcctcaagagagacggctcctgtaatggcgcctgcgtcagacactaacatggcggacatagtcgtgcgcggcgcaaacgtcagcacctctaccccagccgctcagaaacagcagaggagagcagggccgtgctcactgattggtccctcggtggagcgggccggaccgggcattccctttggagccaatcaggaaggcgagagaccgaattggcccgtgcgcctcctcccgaggcatgctgggagcctggaggactagcgaggaggagttgagagaacggagcggacgccatggcgaccaacatcgagcagatttttaggtctttcgtggtcagtaaattccgggaaattcaacaggagctttccagtggaaggaatgaaggccagctgaatggtgaaacaaatacacccattgaaggaaaccaggcgggtgatgcagctgcctctgccaggagtctaccaaatgaagaaatagtgcagaagatagaggaagtactttctggggtcttagatacagaactacgatataagccagacttgaaagagggctccagaaaaagtagatgcgtatctgtacaaacagatcctactgatgaaattcccactaaaaagtcaaagaagcataaaaagcacaaaaacaaaaagaagaaaaagaagaaagaaaaggaaaaaaaatataaaagacagccagaagaatctgagtcaaagacgaaatctcatgatgatgggaacatagatttagaatctgattcctttttaaagtttgattctgaaccttcagctgtggcgctggagcttcctacaagagcatttggcccatctgagaccaatgaatcccctgcagttgtgctagaacctcctgtagtatcaatggaggtatcagagccacacatcttagaaactctgaagccagctacaaaaactgcagaactgtcagttgtatctacatcagtaatctcagagcagtcagagcagtctgtggcagtaatgccagaaccatccatgacaaagattctggattcctttgcagcagcaccagtgcctactacaacactggtgttgaagtcatctgagccagttgtaacaatgtcagtggagtatcagatgaagtctgtgctgaaatctgtggagagcacatctccagagccatcaaagatcatgttggtagagcccccagtagcaaaagtgttagagccttcagaaacccttgtggtatcatcagagacacctactgaggtgtaccctgagccaagcacatcaacaacaatggattttccagagtcatctgcaattgaagcgctaagattgccagagcagcctgtagacgtaccatcggagattgcagattcatccatgacaagaccgcaggagttgccggagctgcctaagaccacagcgttggagctgcaggagtcgtcggtggcctcagcgatggagttgccggggccacctgcgacctccatgccggagttgcaggggccccctgtgactccagtgctggagttacctgggccctctgctaccccggtgccagagttgccagggcccctttctaccccagtgcctgagttgccagggccccctgcgacagcagtgcctgagttgccagggccctctgtgacaccagtgccacagttgtcgcaggaattgccagggcttccagcaccatccatggggttggagccaccacaggaggtaccagagccacctgtgatggcacaggagttgccagggctgcctttggtgacagcagcagtagagttgccagagcagcctgcggtaacagtagcaatggagttgaccgaacaacctgtgacgacgacagagttggagcagcctgtggggatgacaacggtggaacatcctgggcatcctgaggtgacaacggcaacagggttgctggggcagcctgaggcaacgatggtgctggagttgccaggacagccagtggcaacgacagcgctggagttgccggggcagccttcggtgactggggtgccagagttgccagggctgccttcggcaactagggcactggagttgtcggggcagcctgtggcaactggggcactagagttgcctgggccgctcatggcagctggggcactggagttctcggggcagtctggggcagctggagcactggagcttttggggcagcctctggcaacaggggtgctggagttgccagggcagcctggggcgccagagttgcctgggcagcctgtggcaactgtggcgctggagatctctgttcagtctgtggtgacaacatcggagctgtcaacgatgaccgtgtcgcagtccctggaggtgccctcgacgacagcgctggaatcctataatacggtagcacaggagctgcctactacattagtgggggagacttctgtaacagtaggagtggatcccttgatggccccagaatcccatatattagcttctaacaccatggagacccatatattagcatccaacaccatggactcccaaatgctagcgtccaacaccatggactcccagatgctagcatccaacaccatggactcccagatgttagcgtctagcaccatggactcccagatgttagcaactagctccatggactcccagatgttagcaactagctccatggactcccagatgttagcaactagcactatggactcccagatgttagcaaccagttccatggactcccagatgttagcaaccagctccatggactcccagatgttagcaaccagctccatggactcccagatgttagcaaccagctccatggactcccagatgttagcaaccagcaccatggattctcagatgttagcaaccagcaccatggactcccagatgttagcaactagctcaatggattcccagatgttagcatctggcactatggactctcaaatgttagcttctggcaccatggatgctcagatgttagcgtctggtaccatggatgcccagatgttagcgtctagtacccaagattctgctatgttgggttcaaaatctcctgatccctataggttagctcaggatccttacaggttagctcaggatccctataggttgggccatgacccctatagattaggtcatgatgcttacaggttaggacaagacccttatagattaggccatgatccctacagactaactcctgatccctataggatgtcacctagaccctacaggatagcacccaggtcctatagaatagcacccaggccatataggttagcacctagacccctgatgttagcatctagacgttctatgatgatgtcctatgctgcagaacgttccatgatgtcatcttacgaacgctctatgatgtcttatgagcggtctatgatgtcccctatggctgaacgctctatgatgtcagcctacgagcgctctatgatgtcagcctacgagcgctctatgatgtcccctatggctgagcgctctatgatgtcagcttatgaacgctccatgatgtcagcttatgaacgctccatgatgtccccaatggctgatcgatctatgatgtccatgggtgctgaccggtctatgatgtcgtcatactctgctgctgaccggtctatgatgtcatcgtactctgcagctgaccgatctatgatgtcatcttatactgctgatcgttcaatgatgtctatggctgctgattcttacaccgattcttacactgacacatatacagaggcatatatggtgccacctttgcctcctgaagagcccccaacaatgccaccgttgccacctgaggagccaccaatgacaccaccattgcctcctgaggaaccaccagagggtccagcattgcccactgagcagtcagcattaacagctgaaaatacttggcctacagaggtgccatcatcaccatctgaagagtctgtatcgcagcctgagcctcctgtgagtcaaagtgagatttcggagccttcagcagtgcctactgattattcagtgtcagcatcagatccctcagttttagtatcagaggctgctgtgactgttccagaaccaccaccagagccagaatcttcaattacgttaacacctgtagagtctgcagtagtagcagaagaacatgaagttgttccagagagaccagtgacttgtatggtatctgaaactcccgccatgtcagctgaaccaactgtgttagcatcagagcctcctgttatgtcagagacagcagaaacatttgattccatgagagcctcaggacatgttgcctcagaagtatctacatccttgttggttccagcagtaactactccagtgctggcagagagcattctggagccgccagccatggctgccccagagtcttcagctatggctgtcctggagtcttcggctgtgaccgtcctggagtcttcgactgtgactgtcctggagtcttcgactgtaactgtcctggagccttcggttgtgactgtcccggagcctcctgttgtggctgagccagactatgttaccattcctgtgccagttgtttctgcgctggagccttctgtgcctgttctggaaccagcggtgtcagtccttcaaccttctatgattgtttcagaaccatctgtttctgtccaggaatcgactgtgacagtttcagagcctgctgtcacagtctcagagcagactcaagtaataccaactgaggtggctatagagtccacaccaatgatactggaatctagtatcatgtcatcacatgttatgaaaggaattaatctatcctctggtgatcaaaatcttgctccagagattggcatgcaggagattgcattgcattcaggtgaagaaccacatgctgaggaacacctgaaaggtgacttttacgaaagtgaacatggtataaatatagaccttaatataaataatcatttaattgctaaagagatggaacataatacagtgtgtgctgctggtactagtcctgttggggaaattggtgaagagaaaattttgcccaccagtgagactaaacagcgcacagtattggatacctaccctggtgttagtgaagctgatgcaggagaaactctatcttctactggtccttttgctctggaacctgatgcaacaggaactagtaagggtattgaatttaccacagcatctactctcagtttagttaataaatatgatgttgatttatctttaactactcaagatactgaacatgacatggtaatttccaccagtcctagtggtggtagtgaagctgacattgaagggcctttgcctgctaaagatattcatcttgatttaccatctaataataaccttgttagtaaggatacagaagaaccattacctgtaaaagagagtgaccagacattagcagctctgctcagccctaaagaaagtagtggaggagaaaaagaagtacctccccctcctaaagagacactgcctgattcaggattttctgccaatattgaggatattaatgaagcagatttagtgagaccgttacttcctaaggacatggaacgtcttacaagccttagagctggcattgaaggacctttacttgcaagtgatgttggacgtgacagatctgctgccagcccggttgtaagtagtatgccagaaagagcttcagagtcttcttcagaggaaaaagatgattatgaaatttttgtaaaagttaaggacactcacgaaaaaagcaagaaaaataagaaccgtgataagggggagaaagagaagaaaagagactcttcattaagatctcgaagtaagcgttccaaatcttctgaacacaaatcacgcaagcgtaccagtgaatctcgttctagggcaagaaagagatcatctaagtccaagtctcatcgctctcagacacgttcacggtcacgttcaagacgcaggaggagaagcagcagatcaagatcaaagtctagaggaagaagatctgtatcaaaagagaagcgcaaaagatctccaaagcacagatccaagtctagggaaagaaaaagaaaaagatcaagctccagggataaccgaaagacagttagagctcgaagtcgaaccccaagtcgtcggagtcggagtcatactccaagtcgtcgacgaaggtctagatctgtgggtagaagaaggagctttagcatttccccaagccgccgcagccgcacccccagccgccgcagccgcacccccagccgccgcagccgcacccccagccgccgcagccgcacccccagccgccggagccgcacccctagccgtcggagccgcaccccaagccgccggagaagatcaaggtctgtggtaagaagacgaagcttcagtatctcaccagtcagattaaggcgatcaagaacacccttaagaagaaggtttagcagatctcccatccgtcgtaaaagatccaggtcttctgaacgaggcagatcacccaaacgtctgacagatttggataaggctcaattacttgaaatagccaaagctaatgcagctgccatgtgtgctaaggctggtgtccctttaccaccaaacctaaagcctgcacctccacctactatagaagagaaagttgctaaaaagtcaggaggagctactatagaagaactaactgagaaatgtaaacagatcgcacagagtaaagaagatgatgatgtaatagtgaataaacctcatgtttcggatgaagaggaagaagaacctcctttttatcatcatccctttaaactcagtgaacccaaacctatttttttcaatctgaatattgctgcagcaaaaccaactccaccaaaaagccaggtaacattaacaaaagaattccctgtatcatctggatctcaacatcggaaaaaagaagcggatagtgtttatggagaatgggttcctgtggagaaaaatggtgaagaaaacaaagatgatgataatgttttcagcagcaatttgccctcagagcctgtggacatctctacagcaatgagtgaacgggcacttgctcagaaaagactcagtgagaatgcatttgatcttgaagccatgagcatgttaaatagagctcaggaaaggattgatgcctgggctcagctgaactctattcctggccagttcacaggaagtacaggagtacaggttttgacacaagaacagttggccaatactggtgcccaagcctggattaaaaaggatcagttcttaagagcagccccggtaactggaggaatgggagccgttttgatgagaaaaatgggctggagagaaggagaaggattaggaaaaaacaaagaaggcaataaggaacccatcctagttgattttaagacagaccgaaaaggtcttgttgcagtaggagaaagagcacaaaagaggtctgggaacttctctgctgcaatgaaagatctgtcaggcaaacatcctgtgtctgctttgatggagatctgtaataaaagaaggtggcaaccacctgaatttctattggtccatgatagtggccctgatcatcgcaaacattttctctttagggtattgagaaatggagcccttaccagacccaattgtatgtttttcttgaataggtattgataaatggaagcgcttaccagcccagctttgccagccctaataagaagcatgctaaagccacagcagctactgtggttcttcaagcaatgggccttgtaccaaaggacctcatggctaatgccacttgcttcaggagtgcctcacgtagatagattgaggttttataataatcatttcagaattttactctgcatcacaatgtatttcctctttaatgttgtaaatatttggcaatttaagacattgtgtaaaaagcaatctgtaaaaacatctccaggctttgatttttgtaccatggaaattgtatttaaccatacagggttttggtatgtttatattgtttaccttagtgatgtatttgtttaagtggctaacatccaaacgactgtttgaaggcatcagagtaatcttcagtgtggaatgttaaataacgcttttatactgtattttgtactatgatgtaactccccttccttatggctaggctactgtaacacttgcctgtaatcagtgaagggctgtgcaccttgtactatttcacaatgggttctgctggacagataatgggccagtgttattgaggtgatcaagatctgttccacagggctaatgccaccatctcccctcaaaattttgtagaggttctaaaaagaaagtggtatgttgtgtgatgatcagcactaagtcctgcattcctgttaaagccacttgggtcataagaagggagtaaaaaatgaagtctgactagaattctattgcagaggccagtacatttagtatggcattgagttgtgatatagttttactttgatgtgcattttgaatttcagctacacctagatagacgtaaaatgataattaaaatgctgtaaccaacttatctaataaaattggcaaccagccactattttgttgactatgagaaagttaaaagtttatgttaatttttagggtctgatagaatatttcatgtgtattacagtggtattcatatgctatgtctctaaactttattttcaaaagcttaaggcccaaatacaaacttctctggaataaa

SEQ ID NO: 29472 - DNA, 5489 bp, Homo sapiens
  source 1..5489: mol_type = unassigned DNA
gggaaaggaggtcgccgcccggggtcgcccgggcttgcgggtcgccgcgcttcctctgcgggcgctgcgggaggcgagggccgcctcggcggaggaagccgaccccggggtctccgccagcccgccggcgccgcctccgagccgcctcggccgtagcctcggcccgggcgggaggcggcggccgccggcgaggcgaggcggcccgcgccctgcctgtcaggccaccggcccggcccgcgggctgcccccgatgcggaggcgctgtcgccggggccatgcagcaggcgccgcagccttacgagttcttcagcgaggagaacagtccgaaatggcggggactgttggtctcggccctgcggaaggttcaggaacaagtgcatcccactctctcagctaatgaagagtctctctattatattgaagagctgatttttcagctgcttaataaattatgcatggcccagccaaggactgttcaagatgtagaggagcgagttcagaagacctttcctcacccaattgataaatgggccattgctgatgcacaatctgctatagaaaaacgaaaacgaagaaatcctcttttactgcctgtggacaaaatccatccttcgttgaaggaagtattagggtacaaagtggactaccatgtatccctatatattgtggctgtactagagtatatctcagctgatattttaaaattggctggtaattatgtttttaatatccggcattatgaaatatctcagcaggacattaaagtgtcaatgtgtgcggataaggttttgatggacatgtttgatcaggatgacataggtttggtttctctctgtgaagatgaacctagttcttctggtgaattaaactactatgatcttgtcagaactgaaatcgcagaagaaagacagtatctacgggaattaaatatgatcataaaagtgtttcgagaagcctttctttctgatagaaagctgtttaaaccttctgatatcgaaaagatttttagtaacatttcagatatacatgaattgactgtgaaacttttaggtttgattgaagacacagttgaaatgactgatgaaagcagtcctcatcccttagctggcagctgttttgaagatttggcagaagagcaagcatttgatccttatgaaacattatcacaggacattctttcaccagagtttcatgaacatttcaataaattgatggccagacctgcagttgctctacactttcagtccattgctgatggttttaaagaggcagttcgttatgtccttccacgtcttatgctggtgccagtgtatcactgttggcactactttgagttactaaagcaattgaaagcatgtagtgaagaacaagaagacagagaatgtttgaaccaagctattactgctctcatgaatctccaaggtagcatggaccgaatttacaagcagtattcacctagacgtcgacctggagatcctgtttgccctttttatagtcaccaattaagaagcaaacacctggctatcaaaaaaatgaatgaaattcagaaaaatatcgatggatgggaaggcaaagatattggacagtgttgtaatgaattcattatggagggaccattgacaagaatcggtgccaaacatgaacggcatatttttctgtttgatggcttaatgatcagttgtaaacctaatcatggccagactcggcttccaggttacagtagtgcagaatacaggttaaaagaaaaatttgtcatgaggaaaatacaaatttgtgataaagaagatacttgtgagcacaagcatgcatttgaattagtatccaaagatgagaacagcataatatttgctgctaagtctgctgaagaaaaaaacaactggatggcagcccttatttctcttcattatcgtagtactctagatcgaatgttagattcagtattattgaaagaagaaaatgagcaaccactgagattaccaagtcctgaagtatatcgttttgtagtaaaagactctgaggaaaacattgtttttgaagacaacttgcaaagtagaagtggcatccccattattaaaggaggaactgtagtgaaattaattgaaaggttaacatatcatatgtatgcagatcccaattttgttcgtacttttcttaccacatatcgttcattttgtaaaccacaggaattgctgagcttactgattgaacggtttgaaattccagagccagaacctactgacgcagacaaattggcaatagagaaaggcgagcagccaatcagtgcagaccttaaaagatttcgcaaggaatatgtccaaccagtacaacttaggatcttaaatgtatttcggcattgggttgaacatcatttttatgactttgaaagagacttggaattgcttgaaagactagaatccttcatttcaagtgtaagagggaaagctatgaaaaaatgggtagagtcaattgctaagatcatcaggaggaagaagcaagctcaggcaaacggagtaagccataatattacctttgaaagtccacctccaccaattgaatggcatatcagcaaaccaggacagtttgaaacatttgatctcatgacacttcatccaatagaaattgcacgtcagctgacacttttggagtctgatctttacaggaaagttcaaccgtctgaacttgtagggagtgtgtggaccaaagaagataaagaaataaattctccaaatttattaaaaatgattcgccataccacaaatctcaccctctggtttgaaaaatgcattgtggaagcagaaaattttgaagaacgggtggcagtactaagtagaattatagaaattctgcaagtttttcaagatttgaataatttcaatggcgtattggagatagtcagtgcagtaaattcagtgtcagtatacagactagaccatacctttgaggcactgcaggaaaggaaaaggaaaattttggacgaagctgtggaattaagtcaagatcactttaaaaaatacctagtaaaacttaagtcaatcaatccaccttgtgtgcctttttttggaatatatttaacaaatattctgaagaccgaagaagggaataatgattttttaaaaaagaaagggaaagatttaatcaatttcagtaagaggaggaaagtagctgaaattactggagaaattcagcagtatcagaatcagccttactgtttacggatagaaccagatatgaggagattctttgaaaaccttaaccccatgggaagtgcatctgaaaaagagtttacagattatttgttcaacaagtcactagaaattgaacctcgaaactgcaaacagccacctcgatttcctaggaaatcaactttttccttaaaatctcctggaataaggcctaacacaggccgacatggctctacctcaggtactttacgaggtcacccaacaccattagaaagagaaccatgtaaaataagctttagtcggattgctgaaactgagctggaatcaacagtgtcagcaccaacctctccaaatacaccatctactccaccagtatctgcttcttcagaccttagtgtatttttagatgtggatctcaacagctcctgtggcagcaatagcatctttgctccagtgcttttgccacattcaaagtctttctttagttcatgtggtagtttacataaactaagtgaagagcccctgattcctcctcctcttcctcctcgaaaaaagtttgatcatgatgcttcaaattccaagggaaatatgaaatctgatgatgatcctcctgctattccaccgagacagcctcctcctccaaaggtaaaacccagagttcctgttcctactggtgcatttgatgggcctctgcatagtccacctccgccaccaccaagagatcctcttcctgatacccctccaccagttccccttcggcctccagaacactttataaactgtccatttaatcttcagccacctccactggggcatcttcacagagattcagactggctcagagacattagtacgtgtccaaattcgccaagcactcctcctagcacaccctctccaagggtaccgcgtcgatgctatgtgctcagttctagtcagaataatcttgctcatcctccagctccccctgttccaccaaggcagaattcaagccctcatctgccaaaactgccaccaaagacttacaaacgggagctttcgcaccccccattgtacagactgcctttgctagaaaatgcagaaactccccaatgaccttagccatatgtagtcattgacactggaatggtatttgtaaagttttttttttaatttattcaaaaaaagacatagtattttagtactttttacaaataatgctcttacaaaaatgctactgatcaaataagcttttaagaattggaaaaataaaaatacaaaagtccttcaccattatcctcaggtgatcagtagcattgccttgtcttggatcctcagtgctgccaaaaggccagtataaagaatttatatttgcactgtaaactctgcaaaaatatggtttaaagtgacatgattgcactgaaaagggatagtgcttttgtgaaatttttcaaatttgagtaatagatgcctttttaaggcagtgaatttacacaaatatgggaggggtatatggtgttactgatttttaaacctctttgaccatcttctagtttttacttctagtttttacatctaggagaattgtgaataacaccaactgttcttaaactctttaatgccatgtcttaaatgccggtatttgctgctgaagacaaaaatgaaaagtaggatgaaaataatagaatggcactgtaagtgtttattattttgtcaaaatgtaaacaaagactacataacccaatgatggagggaaaaagggcatgtatctcattcagatgtgccttttgtttttgcagactatgacgtctttagctaatgaattgcctattgttatggaaaacagttaatatgccatgtatgtacagttttgtttatattgtatatttaaagatactgctaataacctatataaatttaagtgacttgaggcctataatacaatctgctactttactaattcataaattcaaaaaaaattctatggcataggaaccaactgccttgccttcaagacctagtaactttctctataaatctcgtgttaactgaaattttttttaaatatattttttagattggtaatatttaaaccagcaaatacttaaagctttattaaacattttaatcagataagtgagtaaagcttttatttgccatttggatgccttcgttcaaagtgatagagtgttttgctgatagtgctgtagcagcagttgtaaagtagccaaaagccacgttgtttatttactggtttgtggccttttactgtgctttgtatcagagttcttaacaagattaataaatcaccccagtcttaatttttaaaag

SEQ ID NO: 29473 - DNA, 3960 bp, Homo sapiens
  source 1..3960: mol_type = unassigned DNA
gatgcggaggcgctgtcgccggggccatgcagcaggcgccgcagccttacgagttcttcagcgaggagaacagtccgaaatggcggggactgttggtctcggccctgcggaaggttcaggaacaagtgcatcccactctctcagctaatgaagagtctctctattatattgaagagctgatttttcagctgcttaataaattatgcatggcccagccaaggactgttcaagatgtagaggagcgagttcagaagacctttcctcacccaattgataaatgggccattgctgatgcacaatctgctatagaaaaacgaaaacgaagaaatcctcttttactgcctgtggacaaaatccatccttcgttgaaggaagtattagggtacaaagtggactaccatgtatccctatatattgtggctgtactagagtatatctcagctgatattttaaaattggctggtaattatgtttttaatatccggcattatgaaatatctcagcaggacattaaagtgtcaatgtgtgcggataaggttttgatggacatgtttgatcaggatgacataggtttggtttctctctgtgaagatgaacctagttcttctggtgaattaaactactatgatcttgtcagaactgaaatcgcagaagaaagacagtatctacgggaattaaatatgatcataaaagtgtttcgagaagcctttctttctgatagaaagctgtttaaaccttctgatatcgaaaagatttttagtaacatttcagatatacatgaattgactgtgaaacttttaggtttgattgaagacacagttgaaatgactgatgaaagcagtcctcatcccttagctggcagctgttttgaagatttggcagaagagcaagcatttgatccttatgaaacattatcacaggacattctttcaccagagtttcatgaacatttcaataaattgatggccagacctgcagttgctctacactttcagcaattgaaagcatgtagtgaagaacaagaagacagagaatgtttgaaccaagctattactgctctcatgaatctccaaggtagcatggaccgaatttacaagcagtattcacctagacgtcgacctggagatcctgtttgccctttttatagtcaccaattaagaagcaaacacctggctatcaaaaaaatgaatgaaattcagaaaaatatcgatggatgggaaggcaaagatattggacagtgttgtaatgaattcattatggagggaccattgacaagaatcggtgccaaacatgaacggcatatttttctgtttgatggcttaatgatcagttgtaaacctaatcatggccagactcggcttccaggttacagtagtgcagaatacaggttaaaagaaaaatttgtcatgaggaaaatacaaatttgtgataaagaagatacttgtgagcacaagcatgcatttgaattagtatccaaagatgagaacagcataatatttgctgctaagtctgctgaagaaaaaaacaactggatggcagcccttatttctcttcattatcgtagtactctagatcgaatgttagattcagtattattgaaagaagaaaatgagcaaccactgagattaccaagtcctgaagtatatcgttttgtagtaaaagactctgaggaaaacattgtttttgaagacaacttgcaaagtagaagtggcatccccattattaaaggaggaactgtagtgaaattaattgaaaggttaacatatcatatgtatgcagatcccaattttgttcgtacttttcttaccacatatcgttcattttgtaaaccacaggaattgctgagcttactgattgaacggtttgaaattccagagccagaacctactgacgcagacaaattggcaatagagaaaggcgagcagccaatcagtgcagaccttaaaagatttcgcaaggaatatgtccaaccagtacaacttaggatcttaaatgtatttcggcattgggttgaacatcatttttatgactttgaaagagacttggaattgcttgaaagactagaatccttcatttcaagtgtaagagggaaagctatgaaaaaatgggtagagtcaattgctaagatcatcaggaggaagaagcaagctcaggcaaacggagtaagccataatattacctttgaaagtccacctccaccaattgaatggcatatcagcaaaccaggacagtttgaaacatttgatctcatgacacttcatccaatagaaattgcacgtcagctgacacttttggagtctgatctttacaggaaagttcaaccgtctgaacttgtagggagtgtgtggaccaaagaagataaagaaataaattctccaaatttattaaaaatgattcgccataccacaaatctcaccctctggtttgaaaaatgcattgtggaagcagaaaattttgaagaacgggtggcagtactaagtagaattatagaaattctgcaagtttttcaagatttgaataatttcaatggcgtattggagatagtcagtgcagtaaattcagtgtcagtatacagactagaccatacctttgaggcactgcaggaaaggaaaaggaaaattttggacgaagctgtggaattaagtcaagatcactttaaaaaatacctagtaaaacttaagtcaatcaatccaccttgtgtgcctttttttggaatatatttaacaaatattctgaagaccgaagaagggaataatgattttttaaaaaagaaagggaaagatttaatcaatttcagtaagaggaggaaagtagctgaaattactggagaaattcagcagtatcagaatcagccttactgtttacggatagaaccagatatgaggagattctttgaaaaccttaaccccatgggaagtgcatctgaaaaagagtttacagattatttgttcaacaagtcactagaaattgaacctcgaaactgcaaacagccacctcgatttcctaggaaatcaactttttccttaaaatctcctggaataaggcctaacacaggccgacatggctctacctcaggtactttacgaggtcacccaacaccattagaaagagaaccatgtaaaataagctttagtcggattgctgaaactgagctggaatcaacagtgtcagcaccaacctctccaaatacaccatctactccaccagtatctgcttcttcagaccttagtgtatttttagatgtggatctcaacagctcctgtggcagcaatagcatctttgctccagtgcttttgccacattcaaagtctttctttagttcatgtggtagtttacataaactaagtgaagagcccctgattcctcctcctcttcctcctcgaaaaaagtttgatcatgatgcttcaaattccaagggaaatatgaaatctgatgatgatcctcctgctattccaccgagacagcctcctcctccaaaggtaaaacccagagttcctgttcctactggtgcatttgatgggcctctgcatagtccacctccgccaccaccaagagatcctcttcctgatacccctccaccagttccccttcggcctccagaacactttataaactgtccatttaatcttcagccacctccactggggcatcttcacagagattcagactggctcagagacattagtacgtgtccaaattcgccaagcactcctcctagcacaccctctccaagggtaccgcgtcgatgctatgtgctcagttctagtcagaataatcttgctcatcctccagctccccctgttccaccaaggcagaattcaagccctcatctgccaaaactgccaccaaagacttacaaacgggagctttcgcaccccccattgtacagactgcctttgctagaaaatgcagaaactccccaatgaccttagccatatgtagtcattgacactggaatgg

SEQ ID NO: 29474 - DNA, 4454 bp, Homo sapiens
  source 1..4454: mol_type = unassigned DNA
gcgaggcagccagcgagggagagagcgagcgggcgagccggagcgaggaagggaaagcgcaagagagagcgcacacgcacacacccgccgcgcgcactcgcgcacggacccgcacggggacagctcggaagtcatcagttccatgggcgagatgctgctgctggcgagatgtctgctgctagtcctcgtctcctcgctgctggtatgctcgggactggcgtgcggaccgggcagggggttcgggaagaggaggcaccccaaaaagctgacccctttagcctacaagcagtttatccccaatgtggccgagaagaccctaggcgccagcggaaggtatgaagggaagatctccagaaactccgagcgatttaaggaactcacccccaattacaaccccgacatcatatttaaggatgaagaaaacaccggagcggacaggctgatgactcagaggtgtaaggacaagttgaacgctttggccatctcggtgatgaaccagtggccaggagtgaaactgcgggtgaccgagggctgggacgaagatggccaccactcagaggagtctctgcactacgagggccgcgcagtggacatcaccacgtctgaccgcgaccgcagcaagtacggcatgctggcccgcctggcggtggaggccggcttcgactgggtgtactacgagtccaaggcacatatccactgctcggtgaaagcagagaactcggtggcggccaaatcgggaggctgcttcccgggctcggccacggtgcacctggagcagggcggcaccaagctggtgaaggacctgagccccggggaccgcgtgctggcggcggacgaccagggccggctgctctacagcgacttcctcactttcctggaccgcgacgacggcgccaagaaggtcttctacgtgatcgagacgcgggagccgcgcgagcgcctgctgctcaccgccgcgcacctgctctttgtggcgccgcacaacgactcggccaccggggagcccgaggcgtcctcgggctcggggccgccttccgggggcgcactggggcctcgggcgctgttcgccagccgcgtgcgcccgggccagcgcgtgtacgtggtggccgagcgtgacggggaccgccggctcctgcccgccgctgtgcacagcgtgaccctaagcgaggaggccgcgggcgcctacgcgccgctcacggcccagggcaccattctcatcaaccgggtgctggcctcgtgctacgcggtcatcgaggagcacagctgggcgcaccgggccttcgcgcccttccgcctggcgcacgcgctcctggctgcactggcgcccgcgcgcacggaccgcggcggggacagcggcggcggggaccgcgggggcggcggcggcagagtagccctaaccgctccaggtgctgccgacgctccgggtgcgggggccaccgcgggcatccactggtactcgcagctgctctaccaaataggcacctggctcctggacagcgaggccctgcacccgctgggcatggcggtcaagtccagctgaagccggggggccgggggaggggcgcgggagggggcggggcggggcagcaacagcaacgcaaagcaaaaagacactcggaaaaggcgcacgaaccagactgagttataataagaataagaataataaagtaggacagtccaaagtagactctaaggaaacaaggaccccgggaagttttgttgttgtgcttagttgatatatattttttgaatttttttggttattgttttattttggttattttttcctcctctcctggctatttatttgtttggtatgaatagatgttttaaataatatgaaccggaccttcaagagccttaaatagtttgtttcttggataatttattatgatcatgtgaactgtactcacgggggaaagattattttgtgaggccaagcaacctgctcagagtctatttttctacatgtccctcgtcccggctgtcagaaagcaaacctctgtccccgccatccctcccttccatctcctgcttctcagcaagtgcaaactcaaacgtgcttcatgggggtccacaaattatatttttatacacagaattgtaaattagattttttgagagatcaatacttaactgaattacatttcatttttgaaatagtgtaaaatatgaaaatatattattttaatttaactagtttccgatgtaacagccatctcctctgttgtctttatggtttcatattccctttgtattcaccattttgccacattcttggaagccaagactgttacacacacaacatacacacacacttttctttttcttttcttttcttttttttttttttttttttttttggacaaactggaagaactgttatttttaacttcaaagaatttattagaaaataatattttttaaaagcgcacatagtgacgagcccacgaggatggagcctgcagtttgtacagagaaaacaaaggatgtttttgcattaataaattgagaaataacgctgtaaatttactaaaatgtatttttgaatattttgtaatagttttatagaaataaaatgtgccatgcacagaacgcttagtatctaataactaagaattcctgttgcagccctttttcttttagtttttggcttctttgtttgggaaacctagcgctgacaggagctcccaatattctatttagatgtgttgcttatactgtgaactcagactgactgacttaggtaaccaaagtaggcacacaaaccaacttgtttcttctcatggctggagaaacctcagctctgtttgtatttattgtgtgaagctctttctacactcccaaaggttgggagtgccattcgtggggactgtgctgtccccctcaccccaccccttaactagcaaagcctgatgtgtaagcccagaggaggtggcctggggatggccaccaacaaccttctcttaggactcctgtgtgtggttgctgggcagacccctggcctgaccctgtttgtgcttctctgatctgtagggaggaggctcattgctgctttctgaggtcctgttgtgtcccttccagaaagcatccttagaagagaggacccggtttgatcttctctgaagctcctatcctcttttcttgagggtccccttaaatctgagtggcaagcccacagtggcgagggccagtcgctggaatgtcggggctgctgttgaggtcctcaggctacactggttgtctgtgtcacatggcggtcgggcgtggactttgatccctgttgagagagcatgctgctgtgggcgctgggctggggaaggtccttccatgcttcatgctgccttggaggtttggccaagagggtctctgcccttggcggttgtcagggtcccaggtggaggactactcccagttctttggcttacggaaggtgtctgccatgctttgtgctttgggccgaatcgtctgagcaggctgggccttggaagagttgcgctgcatgagcttggggcctcccagcagctgcagcctgtgtagaaggtggtccaggcttagggaacaggagtgaacagacttcagccccacctggcaggggctggctcccgaggttgggcccagtccctgagggtctgctctgctacgggtctgcccttgagtggccttccgtggagggtgtgtgaccaggtggatggcgcagggcctctggagccctctcctcaggagcagtcctcagcctttttctgtaaaagacttttctttggtgttctaggtggtcagcaggttccaggctggtgtttacaatctcggaggaagtgcgatggtttctgttcttttgacagttcagtctgatttcaagtcagtcgaaagcgaaccagaagcaccgggcacagcagctcctctggctgtgtagacagacctggcaatgtggccgtgcagcccagacgatcagagagaagccaggcgttgaccaagccccaaggtgcctgaggccatggtgcaactctgctggtgactggggcaccttggagcagagcttcacccggatgggaaatcctcactcctgggtggcactccctcctggacaggcccggtggcagagtgtccgtgctgctgggtgctgtccccagccctcctggtccatcttcttaagatgcgtccactgctttatatttaaaattctctttttcacaggcaaggaaaggaaaccactgcttagagacactaggtacagggcatcaagagggtgcagcccagccccgccaggacgaggcgccgacttctcattcagggttgacggagccaagagtttgtgcaaaatgtatgcatggtggttgctgccagcctccctcatgactaaatgcatatctattcctgtcaaaacgtgtatcacaatgtacttgaaactgttatctttgtgctctattgtttgaataattaaagaaattacagag

SEQ ID NO: 29475 - DNA, 3517 bp, Homo sapiens
  source 1..3517: mol_type = unassigned DNA
ttgcagacgacttgtcctgccaccaccatgagttctgaatgtgatggtggttccaaagctgtgatgaatggcttggcacctggcagcaatgggcaagacaaagcaactgccgaccctttacgcgcacgctctatttctgctgttaaaatcattcctgtgaagacagtgaaaaacgcctcaggcctagttctccctacagacatggatcttacaaaaatctgcactgggaagggagcggtgactctccgggcctcgtcttcctacagggaaaccccaagcagtagccctgcgagccctcaggaaacccggcaacacgaaagcaaaccaggtctggagccagagccttcttcagcagatgagtggaggctttcttccagtgctgatgccaatggaaatgcccagccctcttcactcgctgccaagggctacagaagtgtgcatcccaaccttccttctgacaagtcccaggatgccacttcctccagtgcagcccagccggaggtaatagttgtccctctctacctggttaatactgacagagggcaagaaggcactgccagacctccaacacctctggggcctcttggctgcgtccccacaatcccagcgactgcctctgccgcctcacctctgaccttcccgactctagatgatttcattccccctcatctgcagaggtggccccaccacagccagccagcccgcgcctctggctcctttgcccccattagccagacgccaccatccttctcaccaccacctccgctggtccctcctgccccggaggacctccgcagagtctcggagcctgacctcacgggagctgtttcgagtaccgattccagtcctctactaaatgaagtttcttcttcccttattggaactgattcccaagcctttccatcagttagcaagccttcatccgcctatccctccacaacgattgtcaatcctactattgtgctcttgcaacacaatcgagaacagcaaaaacgactcagtagcctttcagatcctgtctcagaaagaagagtgggagagcaggactcagcaccaacccaggaaaaacccacctcacctggcaaggctattgaaaaaagagcaaaggatgacagtaggcgggtggtgaagagcactcaggacttaagcgatgtttccatggatgaagtgggcatcccactccggaacactgagagatcaaaagactggtacaagactatgtttaaacagatccacaaactgaacagagacactcctgaagaaaacccttatttccctacgtacaaattccctgaacttcctgaaatccagcaaacttccgaagagacaaagtcttgctctgtcatgtcacccaggctggagtgcagtggtacagtcatagctcactgcagcctcaaactcctagactcaagcaatcctcccacctcagcctcccaagtagctgggactgcagatgatgattcagatctgtactctcccagatactcattttctgaagacacaaaatctcccctttctgtgcctcgctcaaaaagtgagatgagctacattgatggtgagaaggtagtcaagaggtcggccacactacccctcccagcccgctcttcctcactgaagtcaagctcagaaagaaatgactgggaacccccagataagaaagtagacacaagaaaatatcgtgcagagcccaagagcatttacgaatatcagcctggcaagtcttccgttctgaccaacgaaaagatgagtcgggatataagcccagaagagatagatttaaagaatgaaccttggtataaattcttttcggaattggagtttgggaaaccgcctcccaaaaagatatgggattatactcctggagactgctctatccttcctagagaggatagaaagactaatctagacaaagatctcagcctctgccagacagagttagaggcagatttagaaaaaatggagacgcttaataaagcacccagtgcaaacgtgccacagagctcagccatcagccctactccggaaatttcttcagagactcctggatatatatattcttccaacttccatgcagtgaagagggaatcagacggggctcctggggatctcactagcttggagaatgagagacaaatttataaaagtgtcttggaaggtggtgacatccctcttcagggcctgagtgggctcaagcgaccatccagctctgcttccactaaagattcagaatcgccaagacattttataccagctgattacttggaatccacggaagaatttattcgaagacgtcatgatgataaagagaaacttttagcggaccagagacgacttaaacgcgagcaagaagaggctgatattgcagctcgacgccacacaggcgtcattccgacgcaccatcagtttatcactaatgagcgctttggggacctcctcaatatagacgatactgcaaaaaggaaatctgggtcagagatgagacctgccagagccaaatttgactttaaagctcagacactaaaggagcttcctctgcagaagggagatattgtttacatttataagcaaattgatcagaactggtatgaaggagaacaccacggccgggtgggaatcttcccacgcacctacatcgagcttcttcctcctgctgagaaggcacagcccaaaaagttgacaccagtgcaggttttggaatatggagaagctattgctaagtttaactttaatggtgatacacaagtagaaatgtccttcagaaagggtgagaggatcacactgctccggcaggtagatgagaactggtacgaagggaggatcccggggacatcccgacaaggcatcttccccatcacctacgtggatgtgatcaagcgaccactggtgaaaaaccctgtggattacatggacctgcctttctcctcctccccaagtcgcagtgccactgcaagcccacagccatggcgcgaagagagtggacaatatgagaggaaagcagagaggggggcaggcgaaagaggccctggtggacccaagatctctaagaagagctgcttgaagccttcagacgtggtcaggtgcctgagtactgaacagagactctcagatctcaacacccctgaggagagccggcccggcaagcccctgggtagcgcttttccaggaagtgaggctgagcagacagagcggcatagaggtggcgagcaggcggggaggaaagctgctcggagaggtgggagccagcaacctcaagcccagcagcgaagagtcacccccgacaggagtcaaacctcacaagatttatttagctatcaagcattatatagctatataccacagaatgatgatgagttggaactccgcgatggagatatcgttgatgtcatggaaaaatgtgacgatggatggtttgttggtacttcaagaaggacaaagcagtttggtacttttccaggcaactatgtaaaacctttgtatctataagaagactgaaaaccatggagattatttttattgg

SEQ ID NO: 29476 - DNA, 5858 bp, Homo sapiens
  source 1..5858: mol_type = unassigned DNA
agcgctgagtcccagaaaaacagagcggggccagctgcagcgtgtagtgcgagtggggcggacgcgcgcagcccgcccgcccggcgaccagcaaggagttggcatcctttggaagagttcgtgaaagctttctgcccagagctcctggaccaatgcatcttcccaccaccttaaaccactgagcagttcagagccccagttgcagacgacttgtcctgccaccaccatgagttctgaatgtgatggtggttccaaagctgtgatgaatggcttggcacctggcagcaatgggcaagacaaagcaactgccgaccctttacgcgcacgctctatttctgctgttaaaatcattcctgtgaagacagtgaaaaacgcctcaggcctagttctccctacagacatggatcttacaaaaatctgcactgggaagggagcggtgactctccgggcctcgtcttcctacagggaaaccccaagcagtagccctgcgagccctcaggaaacccggcaacacgaaagcaaaccaggtctggagccagagccttcttcagcagatgagtggaggctttcttccagtgctgatgccaatggaaatgcccagccctcttcactcgctgccaagggctacagaagtgtgcatcccaaccttccttctgacaagtcccaggattccagtcctctactaaatgaagtttcttcttcccttattggaactgattcccaagcctttccatcagttagcaagccttcatccgcctatccctccacaacgattgtcaatcctactattgtgctcttgcaacacaatcgagaacagcaaaaacgactcagtagcctttcagatcctgtctcagaaagaagagtgggagagcaggactcagcaccaacccaggaaaaacccacctcacctggcaaggctattgaaaaaagagcaaaggatgacagtaggcgggtggtgaagagcactcaggacttaagcgatgtttccatggatgaagtgggcatcccactccggaacactgagagatcaaaagactggtacaagactatgtttaaacagatccacaaactgaacagagatgatgattcagatctgtactctcccagatactcattttctgaagacacaaaatctcccctttctgtgcctcgctcaaaaagtgagatgagctacattgatggtgagaaggtagtcaagaggtcggccacactacccctcccagcccgctcttcctcactgaagtcaagctcagaaagaaatgactgggaacccccagataagaaagtagacacaagaaaatatcgtgcagagcccaagagcatttacgaatatcagcctggcaagtcttccgttctgaccaacgaaaagatgagctcagccatcagccctactccggaaatttcttcagagactcctggatatatatattcttccaacttccatgcagtgaagagggaatcagacggggctcctggggatctcactagcttggagaatgagagacaaatttataaaagtgtcttggaaggtggtgacatccctcttcagggcctgagtgggctcaagcgaccatccagctctgcttccactaaagattcagaatcgccaagacattttataccagctgattacttggaatccacggaagaatttattcgaagacgtcatgatgataaagagaaacttttagcggaccagagacgacttaaacgcgagcaagaagaggctgatattgcagctcgacgccacacaggcgtcattccgacgcaccatcagtttatcactaatgagcgctttggggacctcctcaatatagacgatactgcaaaaaggaaatctgggtcagagatgagacctgccagagccaaatttgactttaaagctcagacactaaaggagcttcctctgcagaagggagatattgtttacatttataagcaaattgatcagaactggtatgaaggagaacaccacggccgggtgggaatcttcccacgcacctacatcgagcttcttcctcctgctgagaaggcacagcccaaaaagttgacaccagtgcaggttttggaatatggagaagctattgctaagtttaactttaatggtgatacacaagtagaaatgtccttcagaaagggtgagaggatcacactgctccggcaggtagatgagaactggtacgaagggaggatcccggggacatcccgacaaggcatcttccccatcacctacgtggatgtgatcaagcgaccactggtgaaaaaccctgtggattacatggacctgcctttctcctcctccccaagtcgcagtgccactgcaagcccacagcaacctcaagcccagcagcgaagagtcacccccgacaggagtcaaacctcacaagatttatttagctatcaagcattatatagctatataccacagaatgatgatgagttggaactccgcgatggagatatcgttgatgtcatggaaaaatgtgacgatggatggtttgttggtacttcaagaaggacaaagcagtttggtacttttccaggcaactatgtaaaacctttgtatctataagaagactgaaaaccatggagattatttttattggaggaggaagcatcattcatgaaccgatctttttagttgagtcagtaggaaaattaatacagtggataaagtaagaagcaaaagacagggacagagaagtgttgtgtttaaaacccaagcctgtctaaggttactgtgtattagacagggccgaactagtgtgctgagcaaaaagaattgaagcaaattgtatttacttagccgcttctgggagccacttcagcctttcccctcccctccacttcttgggtaatctgacctgaagcatagtccaggagcagagttagccagaaatgcctcctgctgccccagccttagagagctcccatctcaatcattgagcctgaaggcttcaagcccaagaatgcaacaagacccccagcctacatttctcagctcccctggagccagctgatcctgtaacgctgctggaggtcagtctgagctaccaagactgtccctagacaaaggtggagtcccccacactgcccaagaccaaatccctcactcaacctgctgaggtgtggatggggaaacagaggcaaaactgaggcacctgatgcattcagcctgctgtgcagcagtgccattgactgccctgatgttcagagagaaacgcacacaaggtttgcccatgagaattggggagcagatggccaagcagataggttatgtctgttttctgagtgatgaagtcaggaagccctgtggctctggaggccacttgtggttcattcttttcccatatccttggcttttagaaatggttaccttcaggacagtgcagctgcatttatcagagcactattgctaagttttcttttctggcttgtgtttttctgggacagtttagaattgggaggcctattctcatagaacaccaaaaatgatgttcagtgattcatttaacatacaccaatgtactctggctgctggggggacaaccataagcaagacatgcccagggtttgccgtggctccagatctactccctgtaggagttcaaggatcacacaaacggtagtaaccagggttgtgaatctgagtacaccctggcaaggcttctcttcagactgaagcagcaattctgccactaccagcagcaaccaggacgtctgttctttgtgggggccagatcagaagagagaggcccctgtgacgcccgggctgcttggtcacaactctgtccaattcaaggatgtttatcggcctctcttagatcctgagtgagacaaatacagaaatgacccattccctgcccaccagaaactcagaggtgattggggagactgacacaggaaaatgaacttaatcaagagagactgtgatatgtgctaagaagggtgtgagggagggagagatgaattttccctggagggatcctagaaagcattgtcatattgccatctccattagctcacttttaaacaactagggtgctggaagaacctttgtctgagggtagttcatagctggaaatacttggaatattttccagagtctctaaactctcatcttcccccacagatacacatccaagctcacaaataggagtagcaattctaggtggtagggttgtgtacggaacccctggctgtctgcatatatctcagaattaccccaggaccattgtcccaaagtctagagtctttacaggtaggcaaaatttgttttcaatgcctgtgcctcagctgctgtcacaaatacccatcttaggatcccatcagcttcccatcccccaccagacagccacagtaccctcactttctccctattgttctttcaaatcctgttctcaggaaagaaactgccactaattcattcacactaaggtgtaaatgattgataataggaatgagttacctcttcccacagacatttgtttttaagtatgacagagcagggccttaatcccaagggaaaaggttatggaactggagggggtgagctttctgggtagaaggagacttcctgaatttccttaaaacccagtaagagtaagacctgttgttttggaaggtctgctccaccatctaagagcactgtttttttttttttgttgttgttgttgttttacggtctctgagggaatatagtaaaaatgcatatgcacgtgcaatttgcacggcagcatttcaccgattgtggactgtattggctaatgtgtttcctggtctttagatgcaaaccattaataacactatcttatctcatagttttttcaggggtgcttcttgattagtagggaattttgaacacctctttaaatacagctagaaaataaaaccaatttgtaaagccacatttgcatatgatgccagcctcacgcatttgtatatctccagaaattcaggtatgcctcaccaatttgcccgtctttaataaaatcttgtgttaaaatttgcatcacgtcgccttcctatgtatgacgaaacaagaaacagagatttccaattgctcttttgtcttcagacatttagtaatataaagtacctatttttatgctgaaatgtttatacaggtttattaatagcaagtgcaactaactggcggcatgccttgcaacacattttgatatattagccatgcttccgggtaaaggcaagccccaaactccttatcttttgcagtctctctgggatcagtaaaagaaaaaaaaaataatgtgcttaagaagtgggactgtaaatatgtatatttaactttgtatagcccatgtacctaccttgtatagaaaaataattttaaaaatttgaatggaagggggtaaaggaagtcatgaagtttttttgcatttttatttaaatgaaggaattccaaataactcacctacagatttttagcacaaaaatagccattgtaaagtgttaaaatttacgataagtattctattggggaggaaaggtaactctgatctcagttacagtttttttttcctttttaatttcattattttgggtttttggtttttgcagtcctatttatctgcagtcgtattaagtcctattgctagaataggttactacaaaaaaggttatattctgaaagaaaaataactgacattatatataaccaattaatttaaagtattgccatttaaattacacactgagagcatgtcctatgcagacatagatttttctgttcatttatttttcttcattgcagtggattgatttgataaatagatgtgttgaattactacatttgctgtacatattatttaataaactttattcagaattgcgtggca

SEQ ID NO: 29477 - DNA, 6016 bp, Homo sapiens
  source 1..6016: mol_type = unassigned DNA
gcagcgtgtagtgcgagtggggcggacgcgcgcagcccgcccgcccggcgaccagcaaggagttggcatcctttggaagagttcgtgaaagctttctgcccagagctcctggaccaatgcatcttcccaccaccttaaaccactgagcagttcagagccccagttgcagacgacttgtcctgccaccaccatgagttctgaatgtgatggtggttccaaagctgtgatgaatggcttggcacctggcagcaatgggcaagacaaagcaactgccgaccctttacgcgcacgctctatttctgctgttaaaatcattcctgtgaagacagtgaaaaacgcctcaggcctagttctccctacagacatggatcttacaaaaatctgcactgggaagggagcggtgactctccgggcctcgtcttcctacagggaaaccccaagcagtagccctgcgagccctcaggaaacccggcaacacgaaagcaaaccagatgagtggaggctttcttccagtgctgatgccaatggaaatgcccagccctcttcactcgctgccaagggctacagaagtgtgcatcccaaccttccttctgacaagtcccaggattccagtcctctactaaatgaagtttcttcttcccttattggaactgattcccaagcctttccatcagttagcaagccttcatccgcctatccctccacaacgattgtcaatcctactattgtgctcttgcaacacaatcgagaacagcaaaaacgactcagtagcctttcagatcctgtctcagaaagaagagtgggagagcaggactcagcaccaacccaggaaaaacccacctcacctggcaaggctattgaaaaaagagcaaaggatgacagtaggcgggtggtgaagagcactcaggacttaagcgatgtttccatggatgaagtgggcatcccactccggaacactgagagatcaaaagactggtacaagactatgtttaaacagatccacaaactgaacagagacactcctgaagaaaacccttatttccctacgtacaaattccctgaacttcctgaaatccagcaaacttccgaagaggacaatccttacactcccacctaccagtttcctgcatctactcctagtcctaaatctgaagatgatgattcagatctgtactctcccagatactcattttctgaagacacaaaatctcccctttctgtgcctcgctcaaaaagtgagatgagctacattgatggtgagaaggtagtcaagaggtcggccacactacccctcccagcccgctcttcctcactgaagtcaagctcagaaagaaatgactgggaacccccagataagaaagtagacacaagaaaatatcgtgcagagcccaagagcatttacgaatatcagcctggcaagtcttccgttctgaccaacgaaaagatgagtcgggatataagcccagaagagatagatttaaagaatgaaccttggtataaattcttttcggaattggagtttgggaaaccgagctcagccatcagccctactccggaaatttcttcagagactcctggatatatatattcttccaacttccatgcagtgaagagggaatcagacggggctcctggggatctcactagcttggagaatgagagacaaatttataaaagtgtcttggaaggtggtgacatccctcttcagggcctgagtgggctcaagcgaccatccagctctgcttccactaaagattcagaatcgccaagacattttataccagctgattacttggaatccacggaagaatttattcgaagacgtcatgatgataaagagaaacttttagcggaccagagacgacttaaacgcgagcaagaagaggctgatattgcagctcgacgccacacaggcgtcattccgacgcaccatcagtttatcactaatgagcgctttggggacctcctcaatatagacgatactgcaaaaaggaaatctgggtcagagatgagacctgccagagccaaatttgactttaaagctcagacactaaaggagcttcctctgcagaagggagatattgtttacatttataagcaaattgatcagaactggtatgaaggagaacaccacggccgggtgggaatcttcccacgcacctacatcgagcttcttcctcctgctgagaaggcacagcccaaaaagttgacaccagtgcaggttttggaatatggagaagctattgctaagtttaactttaatggtgatacacaagtagaaatgtccttcagaaagggtgagaggatcacactgctccggcaggtagatgagaactggtacgaagggaggatcccggggacatcccgacaaggcatcttccccatcacctacgtggatgtgatcaagcgaccactggtgaaaaaccctgtggattacatggacctgcctttctcctcctccccaagtcgcagtgccactgcaagcccacagcaacctcaagcccagcagcgaagagtcacccccgacaggagtcaaacctcacaagatttatttagctatcaagcattatatagctatataccacagaatgatgatgagttggaactccgcgatggagatatcgttgatgtcatggaaaaatgtgacgatggatggtttgttggtacttcaagaaggacaaagcagtttggtacttttccaggcaactatgtaaaacctttgtatctataagaagactgaaaaccatggagattatttttattggaggaggaagcatcattcatgaaccgatctttttagttgagtcagtaggaaaattaatacagtggataaagtaagaagcaaaagacagggacagagaagtgttgtgtttaaaacccaagcctgtctaaggttactgtgtattagacagggccgaactagtgtgctgagcaaaaagaattgaagcaaattgtatttacttagccgcttctgggagccacttcagcctttcccctcccctccacttcttgggtaatctgacctgaagcatagtccaggagcagagttagccagaaatgcctcctgctgccccagccttagagagctcccatctcaatcattgagcctgaaggcttcaagcccaagaatgcaacaagacccccagcctacatttctcagctcccctggagccagctgatcctgtaacgctgctggaggtcagtctgagctaccaagactgtccctagacaaaggtggagtcccccacactgcccaagaccaaatccctcactcaacctgctgaggtgtggatggggaaacagaggcaaaactgaggcacctgatgcattcagcctgctgtgcagcagtgccattgactgccctgatgttcagagagaaacgcacacaaggtttgcccatgagaattggggagcagatggccaagcagataggttatgtctgttttctgagtgatgaagtcaggaagccctgtggctctggaggccacttgtggttcattcttttcccatatccttggcttttagaaatggttaccttcaggacagtgcagctgcatttatcagagcactattgctaagttttcttttctggcttgtgtttttctgggacagtttagaattgggaggcctattctcatagaacaccaaaaatgatgttcagtgattcatttaacatacaccaatgtactctggctgctggggggacaaccataagcaagacatgcccagggtttgccgtggctccagatctactccctgtaggagttcaaggatcacacaaacggtagtaaccagggttgtgaatctgagtacaccctggcaaggcttctcttcagactgaagcagcaattctgccactaccagcagcaaccaggacgtctgttctttgtgggggccagatcagaagagagaggcccctgtgacgcccgggctgcttggtcacaactctgtccaattcaaggatgtttatcggcctctcttagatcctgagtgagacaaatacagaaatgacccattccctgcccaccagaaactcagaggtgattggggagactgacacaggaaaatgaacttaatcaagagagactgtgatatgtgctaagaagggtgtgagggagggagagatgaattttccctggagggatcctagaaagcattgtcatattgccatctccattagctcacttttaaacaactagggtgctggaagaacctttgtctgagggtagttcatagctggaaatacttggaatattttccagagtctctaaactctcatcttcccccacagatacacatccaagctcacaaataggagtagcaattctaggtggtagggttgtgtacggaacccctggctgtctgcatatatctcagaattaccccaggaccattgtcccaaagtctagagtctttacaggtaggcaaaatttgttttcaatgcctgtgcctcagctgctgtcacaaatacccatcttaggatcccatcagcttcccatcccccaccagacagccacagtaccctcactttctccctattgttctttcaaatcctgttctcaggaaagaaactgccactaattcattcacactaaggtgtaaatgattgataataggaatgagttacctcttcccacagacatttgtttttaagtatgacagagcagggccttaatcccaagggaaaaggttatggaactggagggggtgagctttctgggtagaaggagacttcctgaatttccttaaaacccagtaagagtaagacctgttgttttggaaggtctgctccaccatctaagagcactgtttttttttttttgttgttgttgttgttttacggtctctgagggaatatagtaaaaatgcatatgcacgtgcaatttgcacggcagcatttcaccgattgtggactgtattggctaatgtgtttcctggtctttagatgcaaaccattaataacactatcttatctcatagttttttcaggggtgcttcttgattagtagggaattttgaacacctctttaaatacagctagaaaataaaaccaatttgtaaagccacatttgcatatgatgccagcctcacgcatttgtatatctccagaaattcaggtatgcctcaccaatttgcccgtctttaataaaatcttgtgttaaaatttgcatcacgtcgccttcctatgtatgacgaaacaagaaacagagatttccaattgctcttttgtcttcagacatttagtaatataaagtacctatttttatgctgaaatgtttatacaggtttattaatagcaagtgcaactaactggcggcatgccttgcaacacattttgatatattagccatgcttccgggtaaaggcaagccccaaactccttatcttttgcagtctctctgggatcagtaaaagaaaaaaaaaataatgtgcttaagaagtgggactgtaaatatgtatatttaactttgtatagcccatgtacctaccttgtatagaaaaataattttaaaaatttgaatggaagggggtaaaggaagtcatgaagtttttttgcatttttatttaaatgaaggaattccaaataactcacctacagatttttagcacaaaaatagccattgtaaagtgttaaaatttacgataagtattctattggggaggaaaggtaactctgatctcagttacagtttttttttcctttttaatttcattattttgggtttttggtttttgcagtcctatttatctgcagtcgtattaagtcctattgctagaataggttactacaaaaaaggttatattctgaaagaaaaataactgacattatatataaccaattaatttaaagtattgccatttaaattacacactgagagcatgtcctatgcagacatagatttttctgttcatttatttttcttcattgcagtggattgatttgataaatagatgtgttgaattactacatttgctgtacatattatttaataaactttattcagaattgcgtggc

SEQ ID NO: 29478 - DNA, 6193 bp, Homo sapiens
  source 1..6193: mol_type = unassigned DNA
gcagcgtgtagtgcgagtggggcggacgcgcgcagcccgcccgcccggcgaccagcaaggagttggcatcctttggaagagttcgtgaaagctttctgcccagagctcctggaccaatgcatcttcccaccaccttaaaccactgagcagttcagagccccagttgcagacgacttgtcctgccaccaccatgagttctgaatgtgatggtggttccaaagctgtgatgaatggcttggcacctggcagcaatgggcaagacaaagcaactgccgaccctttacgcgcacgctctatttctgctgttaaaatcattcctgtgaagacagtgaaaaacgcctcaggcctagttctccctacagacatggatcttacaaaaatctgcactgggaagggagcggtgactctccgggcctcgtcttcctacagggaaaccccaagcagtagccctgcgagccctcaggaaacccggcaacacgaaagcaaaccaggtctggagccagagccttcttcagcagatgagtggaggctttcttccagtgctgatgccaatggaaatgcccagccctcttcactcgctgccaagggctacagaagtgtgcatcccaaccttccttctgacaagtcccagaggtggccccaccacagccagccagcccgcgcctctggctcctttgcccccattagccagacgccaccatccttctcaccaccacctccgctggtccctcctgccccggaggacctccgcagagtctcggagcctgacctcacgggagctgtttcgagtaccgattccagtcctctactaaatgaagtttcttcttcccttattggaactgattcccaagcctttccatcagttagcaagccttcatccgcctatccctccacaacgattgtcaatcctactattgtgctcttgcaacacaatcgagaacagcaaaaacgactcagtagcctttcagatcctgtctcagaaagaagagtgggagagcaggactcagcaccaacccaggaaaaacccacctcacctggcaaggctattgaaaaaagagcaaaggatgacagtaggcgggtggtgaagagcactcaggacttaagcgatgtttccatggatgaagtgggcatcccactccggaacactgagagatcaaaagactggtacaagactatgtttaaacagatccacaaactgaacagagatgatgattcagatctgtactctcccagatactcattttctgaagacacaaaatctcccctttctgtgcctcgctcaaaaagtgagatgagctacattgatggtgagaaggtagtcaagaggtcggccacactacccctcccagcccgctcttcctcactgaagtcaagctcagaaagaaatgactgggaacccccagataagaaagtagacacaagaaaatatcgtgcagagcccaagagcatttacgaatatcagcctggcaagtcttccgttctgaccaacgaaaagatgagtcgggatataagcccagaagagatagatttaaagaatgaaccttggtataaattcttttcggaattggagtttgggaaaccgcctcccaaaaagatatgggattatactcctggagactgctctatccttcctagagaggatagaaagagctcagccatcagccctactccggaaatttcttcagagactcctggatatatatattcttccaacttccatgcagtgaagagggaatcagacggggctcctggggatctcactagcttggagaatgagagacaaatttataaaagtgtcttggaaggtggtgacatccctcttcagggcctgagtgggctcaagcgaccatccagctctgcttccactaaagattcagaatcgccaagacattttataccagctgattacttggaatccacggaagaatttattcgaagacgtcatgatgataaagagaaacttttagcggaccagagacgacttaaacgcgagcaagaagaggctgatattgcagctcgacgccacacaggcgtcattccgacgcaccatcagtttatcactaatgagcgctttggggacctcctcaatatagacgatactgcaaaaaggaaatctgggtcagagatgagacctgccagagccaaatttgactttaaagctcagacactaaaggagcttcctctgcagaagggagatattgtttacatttataagcaaattgatcagaactggtatgaaggagaacaccacggccgggtgggaatcttcccacgcacctacatcgagcttcttcctcctgctgagaaggcacagcccaaaaagttgacaccagtgcaggttttggaatatggagaagctattgctaagtttaactttaatggtgatacacaagtagaaatgtccttcagaaagggtgagaggatcacactgctccggcaggtagatgagaactggtacgaagggaggatcccggggacatcccgacaaggcatcttccccatcacctacgtggatgtgatcaagcgaccactggtgaaaaaccctgtggattacatggacctgcctttctcctcctccccaagtcgcagtgccactgcaagcccacagctttctcatcattcattgagagcaggaccagatctcacagaatctgaaaagagctatgtgcaacctcaagcccagcagcgaagagtcacccccgacaggagtcaaacctcacaagatttatttagctatcaagcattatatagctatataccacagaatgatgatgagttggaactccgcgatggagatatcgttgatgtcatggaaaaatgtgacgatggatggtttgttggtacttcaagaaggacaaagcagtttggtacttttccaggcaactatgtaaaacctttgtatctataagaagactgaaaaccatggagattatttttattggaggaggaagcatcattcatgaaccgatctttttagttgagtcagtaggaaaattaatacagtggataaagtaagaagcaaaagacagggacagagaagtgttgtgtttaaaacccaagcctgtctaaggttactgtgtattagacagggccgaactagtgtgctgagcaaaaagaattgaagcaaattgtatttacttagccgcttctgggagccacttcagcctttcccctcccctccacttcttgggtaatctgacctgaagcatagtccaggagcagagttagccagaaatgcctcctgctgccccagccttagagagctcccatctcaatcattgagcctgaaggcttcaagcccaagaatgcaacaagacccccagcctacatttctcagctcccctggagccagctgatcctgtaacgctgctggaggtcagtctgagctaccaagactgtccctagacaaaggtggagtcccccacactgcccaagaccaaatccctcactcaacctgctgaggtgtggatggggaaacagaggcaaaactgaggcacctgatgcattcagcctgctgtgcagcagtgccattgactgccctgatgttcagagagaaacgcacacaaggtttgcccatgagaattggggagcagatggccaagcagataggttatgtctgttttctgagtgatgaagtcaggaagccctgtggctctggaggccacttgtggttcattcttttcccatatccttggcttttagaaatggttaccttcaggacagtgcagctgcatttatcagagcactattgctaagttttcttttctggcttgtgtttttctgggacagtttagaattgggaggcctattctcatagaacaccaaaaatgatgttcagtgattcatttaacatacaccaatgtactctggctgctggggggacaaccataagcaagacatgcccagggtttgccgtggctccagatctactccctgtaggagttcaaggatcacacaaacggtagtaaccagggttgtgaatctgagtacaccctggcaaggcttctcttcagactgaagcagcaattctgccactaccagcagcaaccaggacgtctgttctttgtgggggccagatcagaagagagaggcccctgtgacgcccgggctgcttggtcacaactctgtccaattcaaggatgtttatcggcctctcttagatcctgagtgagacaaatacagaaatgacccattccctgcccaccagaaactcagaggtgattggggagactgacacaggaaaatgaacttaatcaagagagactgtgatatgtgctaagaagggtgtgagggagggagagatgaattttccctggagggatcctagaaagcattgtcatattgccatctccattagctcacttttaaacaactagggtgctggaagaacctttgtctgagggtagttcatagctggaaatacttggaatattttccagagtctctaaactctcatcttcccccacagatacacatccaagctcacaaataggagtagcaattctaggtggtagggttgtgtacggaacccctggctgtctgcatatatctcagaattaccccaggaccattgtcccaaagtctagagtctttacaggtaggcaaaatttgttttcaatgcctgtgcctcagctgctgtcacaaatacccatcttaggatcccatcagcttcccatcccccaccagacagccacagtaccctcactttctccctattgttctttcaaatcctgttctcaggaaagaaactgccactaattcattcacactaaggtgtaaatgattgataataggaatgagttacctcttcccacagacatttgtttttaagtatgacagagcagggccttaatcccaagggaaaaggttatggaactggagggggtgagctttctgggtagaaggagacttcctgaatttccttaaaacccagtaagagtaagacctgttgttttggaaggtctgctccaccatctaagagcactgtttttttttttttgttgttgttgttgttttacggtctctgagggaatatagtaaaaatgcatatgcacgtgcaatttgcacggcagcatttcaccgattgtggactgtattggctaatgtgtttcctggtctttagatgcaaaccattaataacactatcttatctcatagttttttcaggggtgcttcttgattagtagggaattttgaacacctctttaaatacagctagaaaataaaaccaatttgtaaagccacatttgcatatgatgccagcctcacgcatttgtatatctccagaaattcaggtatgcctcaccaatttgcccgtctttaataaaatcttgtgttaaaatttgcatcacgtcgccttcctatgtatgacgaaacaagaaacagagatttccaattgctcttttgtcttcagacatttagtaatataaagtacctatttttatgctgaaatgtttatacaggtttattaatagcaagtgcaactaactggcggcatgccttgcaacacattttgatatattagccatgcttccgggtaaaggcaagccccaaactccttatcttttgcagtctctctgggatcagtaaaagaaaaaaaaaataatgtgcttaagaagtgggactgtaaatatgtatatttaactttgtatagcccatgtacctaccttgtatagaaaaataattttaaaaatttgaatggaagggggtaaaggaagtcatgaagtttttttgcatttttatttaaatgaaggaattccaaataactcacctacagatttttagcacaaaaatagccattgtaaagtgttaaaatttacgataagtattctattggggaggaaaggtaactctgatctcagttacagtttttttttcctttttaatttcattattttgggtttttggtttttgcagtcctatttatctgcagtcgtattaagtcctattgctagaataggttactacaaaaaaggttatattctgaaagaaaaataactgacattatatataaccaattaatttaaagtattgccatttaaattacacactgagagcatgtcctatgcagacatagatttttctgttcatttatttttcttcattgcagtggattgatttgataaatagatgtgttgaattactacatttgctgtacatattatttaataaactttattcagaattgcgtggc

SEQ ID NO: 29479 - DNA, 3015 bp, Homo sapiens
  source 1..3015: mol_type = unassigned DNA
atgagttctgaatgtgatggtggttccaaagctgtgatgaatggcttggcacctggcagcaatgggcaagacaaagcaactgccgaccctttacgcgcacgctctatttctgctgttaaaatcattcctgtgaagacagtgaaaaacgcctcaggcctagttctccctacagacatggatcttacaaaaatctgcactgggaagggagcggtgactctccgggcctcgtcttcctacagggaaaccccaagcagtagccctgcgagccctcaggaaacccggcaacacgaaagcaaaccagatgagtggaggctttcttccagtgctgatgccaatggaaatgcccagccctcttcactcgctgccaagggctacagaagtgtgcatcccaaccttccttctgacaagtcccaggatgccacttcctccagtgcagcccagccggaggtaatagttgtccctctctacctggttaatactgacagagggcaagaaggcactgccagacctccaacacctctggggcctcttggctgcgtccccacaatcccagcgactgcctctgccgcctcacctctgaccttcccgactctagatgatttcattccccctcatctgcagaggtggccccaccacagccagccagcccgcgcctctggctcctttgcccccattagccagacgccaccatccttctcaccaccacctccgctggtccctcctgccccggaggacctccgcagagtctcggagcctgacctcacgggagctgtttcgagtaccgattccagtcctctactaaatgaagtttcttcttcccttattggaactgattcccaagcctttccatcagttagcaagccttcatccgcctatccctccacaacgattgtcaatcctactattgtgctcttgcaacacaatcgagaacagcaaaaacgactcagtagcctttcagatcctgtctcagaaagaagagtgggagagcaggactcagcaccaacccaggaaaaacccacctcacctggcaaggctattgaaaaaagagcaaaggatgacagtaggcgggtggtgaagagcactcaggacttaagcgatgtttccatggatgaagtgggcatcccactccggaacactgagagatcaaaagactggtacaagactatgtttaaacagatccacaaactgaacagagacactcctgaagaaaacccttatttccctacgtacaaattccctgaacttcctgaaatccagcaaacttccgaagatgatgattcagatctgtactctcccagatactcattttctgaagacacaaaatctcccctttctgtgcctcgctcaaaaagtgagatgagctacattgatggtgagaaggtagtcaagaggtcggccacactacccctcccagcccgctcttcctcactgaagtcaagctcagaaagaaatgactgggaacccccagataagaaagtagacacaagaaaatatcgtgcagagcccaagagcatttacgaatatcagcctggcaagtcttccgttctgaccaacgaaaagatgagtcgggatataagcccagaagagatagatttaaagaatgaaccttggtataaattcttttcggaattggagtttgggaaaccgcctcccaaaaagatatgggattatactcctggagactgctctatccttcctagagaggatagaaagactaatctagacaaagatctcagcctctgccagacagagttagaggcagatttagaaaaaatggagacgcttaataaagcacccagtgcaaacgtgccacagagctcagccatcagccctactccggaaatttcttcagagactcctggatatatatattcttccaacttccatgcagtgaagagggaatcagacggggctcctggggatctcactagcttggagaatgagagacaaatttataaaagtgtcttggaaggtggtgacatccctcttcagggcctgagtgggctcaagcgaccatccagctctgcttccactaaagattcagaatcgccaagacattttataccagctgattacttggaatccacggaagaatttattcgaagacgtcatgatgataaagagaaacttttagcggaccagagacgacttaaacgcgagcaagaagaggctgatattgcagctcgacgccacacaggcgtcattccgacgcaccatcagtttatcactaatgagcgctttggggacctcctcaatatagacgatactgcaaaaaggaaatctgggtcagagatgagacctgccagagccaaatttgactttaaagctcagacactaaaggagcttcctctgcagaagggagatattgtttacatttataagcaaattgatcagaactggtatgaaggagaacaccacggccgggtgggaatcttcccacgcacctacatcgagcttcttcctcctgctgagaaggcacagcccaaaaagttgacaccagtgcaggttttggaatatggagaagctattgctaagtttaactttaatggtgatacacaagtagaaatgtccttcagaaagggtgagaggatcacactgctccggcaggtagatgagaactggtacgaagggaggatcccggggacatcccgacaaggcatcttccccatcacctacgtggatgtgatcaagcgaccactggtgaaaaaccctgtggattacatggacctgcctttctcctcctccccaagtcgcagtgccactgcaagcccacagcaacctcaagcccagcagcgaagagtcacccccgacaggagtcaaacctcacaagatttatttagctatcaagcattatatagctatataccacagaatgatgatgagttggaactccgcgatggagatatcgttgatgtcatggaaaaatgtgacgatggatggtttgttggtacttcaagaaggacaaagcagtttggtacttttccaggcaactatgtaaaacctttgtatctataa

SEQ ID NO: 29480 - DNA, 3940 bp, Homo sapiens
  source 1..3940: mol_type = unassigned DNA
ttgcagacgacttgtcctgccaccaccatgagttctgaatgtgatggtggttccaaagctgtgatgaatggcttggcacctggcagcaatgggcaagacaaagcaactgccgaccctttacgcgcacgctctatttctgctgttaaaatcattcctgtgaagacagtgaaaaacgcctcaggcctagttctccctacagacatggatcttacaaaaatctgcactgggaagggagcggtgactctccgggcctcgtcttcctacagggaaaccccaagcagtagccctgcgagccctcaggaaacccggcaacacgaaagcaaaccaggtctggagccagagccttcttcagcagatgagtggaggctttcttccagtgctgatgccaatggaaatgcccagccctcttcactcgctgccaagggctacagaagtgtgcatcccaaccttccttctgacaagtcccaggatgccacttcctccagtgcagcccagccggaggtaatagttgtccctctctacctggttaatactgacagagggcaagaaggcactgccagacctccaacacctctggggcctcttggctgcgtccccacaatcccagcgactgcctctgccgcctcacctctgaccttcccgactctagatgatttcattccccctcatctgcagaggtggccccaccacagccagccagcccgcgcctctggctcctttgcccccattagccagacgccaccatccttctcaccaccacctccgctggtccctcctgccccggaggacctccgcagagtctcggagcctgacctcacgggagctgtttcgagtaccgattccagtcctctactaaatgaagtttcttcttcccttattggaactgattcccaagcctttccatcagttagcaagccttcatccgcctatccctccacaacgattgtcaatcctactattgtgctcttgcaacacaatcgagaacagcaaaaacgactcagtagcctttcagatcctgtctcagaaagaagagtgggagagcaggactcagcaccaacccaggaaaaacccacctcacctggcaaggctattgaaaaaagagcaaaggatgacagtaggcgggtggtgaagagcactcaggacttaagcgatgtttccatggatgaagtgggcatcccactccggaacactgagagatcaaaagactggtacaagactatgtttaaacagatccacaaactgaacagagacactcctgaagaaaacccttatttccctacgtacaaattccctgaacttcctgaaatccagcaaacttccgaagaggacaatccttacactcccacctaccagtttcctgcatctactcctagtcctaaatctgaagatgatgattcagatctgtactctcccagatactcattttctgaagacacaaaatctcccctttctgtgcctcgctcaaaaagtgagatgagctacattgatggtgagaaggtagtcaagaggtcggccacactacccctcccagcccgctcttcctcactgaagtcaagctcagaaagaaatgactgggaacccccagataagaaagtagacacaagaaaatatcgtgcagagcccaagagcatttacgaatatcagcctggcaagtcttccgttctgaccaacgaaaagatgagtcgggatataagcccagaagagatagatttaaagaatgaaccttggtataaattcttttcggaattggagtttgggaaaccgcctcccaaaaagatatgggattatactcctggagactgctctatccttcctagagaggatagaaagactaatctagacaaagatctcagcctctgccagacagagttagaggcagatttagaaaaaatggagacgcttaataaagcacccagtgcaaacgtgccacagagctcagccatcagccctactccggaaatttcttcagagactcctggatatatatattcttccaacttccatgcagtgaagagggaatcagacggggctcctggggatctcactagcttggagaatgagagacaaatttataaaagtgtcttggaaggtggtgacatccctcttcagggcctgagtgggctcaagcgaccatccagctctgcttccactaaagattcagaatcgccaagacattttataccagctgattacttggaatccacggaagaatttattcgaagacgtcatgatgataaagagaaacttttagcggaccagagacgacttaaacgcgagcaagaagaggctgatattgcagctcgacgccacacaggcgtcattccgacgcaccatcagtttatcactaatgagcgctttggggacctcctcaatatagacgatactgcaaaaaggaaatctgggtcagagatgagacctgccagagccaaatttgactttaaagctcagacactaaaggagcttcctctgcagaagggagatattgtttacatttataagcaaattgatcagaactggtatgaaggagaacaccacggccgggtgggaatcttcccacgcacctacatcgagcttcttcctcctgctgagaaggcacagcccaaaaagttgacaccagtgcaggttttggaatatggagaagctattgctaagtttaactttaatggtgatacacaagtagaaatgtccttcagaaagggtgagaggatcacactgctccggcaggtagatgagaactggtacgaagggaggatcccggggacatcccgacaaggcatcttccccatcacctacgtggatgtgatcaagcgaccactggtgaaaaaccctgtggattacatggacctgcctttctcctcctccccaagtcgcagtgccactgcaagcccacagttttccagtcacagcaagctcatcacgccagccccctcatctctgccccactcccgccgagccctgtcccccgagatgcacgctgtcacctctgagtggatctcactgactgtgggggtcccaggcaggcgttctctggccctgaccccacccttgcctcctctgccagaggcttctatctataacactgaccacctcgccttgtcaccaagggccagtccctccctgtctctcagcctcccccatttgagttggtcagatcgtcccaccccacgatcagtagcttctccactggccctaccttccccacacaaaacctactccctagcacctacttcccaggcctcccttcacatgaatggagacggtggtgtccacacgccatcttcaggcatccaccaagatagcttcttgcagctgccgctggggagctctgatagtgtcatctcccagcttagtgatgcctttagcagccagagcaagaggcagccatggcgcgaagagagtggacaatatgagaggaaagcagagaggggggcaggcgaaagaggccctggtggacccaagatctctaagaagagctgcttgaagccttcagacgtggtcaggtgcctgagtactgaacagagactctcagatctcaacacccctgaggagagccggcccggcaagcccctgggtagcgcttttccaggaagtgaggctgagcagacagagcggcatagaggtggcgagcaggcggggaggaaagctgctcggagaggtgggagccagcaacctcaagcccagcagcgaagagtcacccccgacaggagtcaaacctcacaagatttatttagctatcaagcattatatagctatataccacagaatgatgatgagttggaactccgcgatggagatatcgttgatgtcatggaaaaatgtgacgatggatggtttgttggtacttcaagaaggacaaagcagtttggtacttttccaggcaactatgtaaaacctttgtatctataagaagactgaaaaccatggagattatttttattgg

SEQ ID NO: 29481 - DNA, 7276 bp, Homo sapiens
  source 1..7276: mol_type = unassigned DNA
gcagcgtgtagtgcgagtggggcggacgcgcgcagcccgcccgcccggcgaccagcaaggagttggcatcctttggaagagttcgtgaaagctttctgcccagagctcctggaccaatgcatcttcccaccaccttaaaccactgagcagttcagagccccagttgcagacgacttgtcctgccaccaccatgagttctgaatgtgatggtggttccaaagctgtgatgaatggcttggcacctggcagcaatgggcaagacaaagcaactgccgaccctttacgcgcacgctctatttctgctgttaaaatcattcctgtgaagacagtgaaaaacgcctcaggcctagttctccctacagacatggatcttacaaaaatctgcactgggaagggagcggtgactctccgggcctcgtcttcctacagggaaaccccaagcagtagccctgcgagccctcaggaaacccggcaacacgaaagcaaaccaggtctggagccagagccttcttcagcagatgagtggaggctttcttccagtgctgatgccaatggaaatgcccagccctcttcactcgctgccaagggctacagaagtgtgcatcccaaccttccttctgacaagtcccaggatgccacttcctccagtgcagcccagccggaggtaatagttgtccctctctacctggttaatactgacagagggcaagaaggcactgccagacctccaacacctctggggcctcttggctgcgtccccacaatcccagcgactgcctctgccgcctcacctctgaccttcccgactctagatgatttcattccccctcatctgcagaggtggccccaccacagccagccagcccgcgcctctggctcctttgcccccattagccagacgccaccatccttctcaccaccacctccgctggtccctcctgccccggaggacctccgcagagtctcggagcctgacctcacgggagctgtttcgagtaccgattccagtcctctactaaatgaagtttcttcttcccttattggaactgattcccaagcctttccatcagttagcaagccttcatccgcctatccctccacaacgattgtcaatcctactattgtgctcttgcaacacaatcgagaacagcaaaaacgactcagtagcctttcagatcctgtctcagaaagaagagtgggagagcaggactcagcaccaacccaggaaaaacccacctcacctggcaaggctattgaaaaaagagcaaaggatgacagtaggcgggtggtgaagagcactcaggacttaagcgatgtttccatggatgaagtgggcatcccactccggaacactgagagatcaaaagactggtacaagactatgtttaaacagatccacaaactgaacagagatgatgattcagatctgtactctcccagatactcattttctgaagacacaaaatctcccctttctgtgcctcgctcaaaaagtgagatgagctacattgatggtgagaaggtagtcaagaggtcggccacactacccctcccagcccgctcttcctcactgaagtcaagctcagaaagaaatgactgggaacccccagataagaaagtagacacaagaaaatatcgtgcagagcccaagagcatttacgaatatcagcctggcaagtcttccgttctgaccaacgaaaagatgagtcgggatataagcccagaagagatagatttaaagaatgaaccttggtataaattcttttcggaattggagtttgggaaaccgcctcccaaaaagatatgggattatactcctggagactgctctatccttcctagagaggatagaaagactaatctagacaaagatctcagcctctgccagacagagttagaggcagatttagaaaaaatggagacgcttaataaagcacccagtgcaaacgtgccacagagctcagccatcagccctactccggaaatttcttcagagactcctggatatatatattcttccaacttccatgcagtgaagagggaatcagacggggctcctggggatctcactagcttggagaatgagagacaaatttataaaagtgtcttggaaggtggtgacatccctcttcagggcctgagtgggctcaagcgaccatccagctctgcttccactaaagattcagaatcgccaagacattttataccagctgattacttggaatccacggaagaatttattcgaagacgtcatgatgataaagagaaacttttagcggaccagagacgacttaaacgcgagcaagaagaggctgatattgcagctcgacgccacacaggcgtcattccgacgcaccatcagtttatcactaatgagcgctttggggacctcctcaatatagacgatactgcaaaaaggaaatctgggtcagagatgagacctgccagagccaaatttgactttaaagctcagacactaaaggagcttcctctgcagaagggagatattgtttacatttataagcaaattgatcagaactggtatgaaggagaacaccacggccgggtgggaatcttcccacgcacctacatcgagcttcttcctcctgctgagaaggcacagcccaaaaagttgacaccagtgcaggttttggaatatggagaagctattgctaagtttaactttaatggtgatacacaagtagaaatgtccttcagaaagggtgagaggatcacactgctccggcaggtagatgagaactggtacgaagggaggatcccggggacatcccgacaaggcatcttccccatcacctacgtggatgtgatcaagcgaccactggtgaaaaaccctgtggattacatggacctgcctttctcctcctccccaagtcgcagtgccactgcaagcccacagttttccagtcacagcaagctcatcacgccagccccctcatctctgccccactcccgccgagccctgtcccccgagatgcacgctgtcacctctgagtggatctcactgactgtgggggtcccaggcaggcgttctctggccctgaccccacccttgcctcctctgccagaggcttctatctataacactgaccacctcgccttgtcaccaagggccagtccctccctgtctctcagcctcccccatttgagttggtcagatcgtcccaccccacgatcagtagcttctccactggccctaccttccccacacaaaacctactccctagcacctacttcccaggcctcccttcacatgaatggagacggtggtgtccacacgccatcttcaggcatccaccaagatagcttcttgcagctgccgctggggagctctgatagtgtcatctcccagcttagtgatgcctttagcagccagagcaagaggcagccatggcgcgaagagagtggacaatatgagaggaaagcagagaggggggcaggcgaaagaggccctggtggacccaagatctctaagaagagctgcttgaagccttcagacgtggtcaggtgcctgagtactgaacagagactctcagatctcaacacccctgaggagagccggcccggcaagcccctgggtagcgcttttccaggaagtgaggctgagcagacagagcggcatagaggtggcgagcaggcggggaggaaagctgctcggagaggtgggagccagctttctcatcattcattgagagcaggaccagatctcacagaatctgaaaagagctatgtgcaacctcaagcccagcagcgaagagtcacccccgacaggagtcaaacctcacaagatttatttagctatcaagcattatatagctatataccacagaatgatgatgagttggaactccgcgatggagatatcgttgatgtcatggaaaaatgtgacgatggatggtttgttggtacttcaagaaggacaaagcagtttggtacttttccaggcaactatgtaaaacctttgtatctataagaagactgaaaaccatggagattatttttattggaggaggaagcatcattcatgaaccgatctttttagttgagtcagtaggaaaattaatacagtggataaagtaagaagcaaaagacagggacagagaagtgttgtgtttaaaacccaagcctgtctaaggttactgtgtattagacagggccgaactagtgtgctgagcaaaaagaattgaagcaaattgtatttacttagccgcttctgggagccacttcagcctttcccctcccctccacttcttgggtaatctgacctgaagcatagtccaggagcagagttagccagaaatgcctcctgctgccccagccttagagagctcccatctcaatcattgagcctgaaggcttcaagcccaagaatgcaacaagacccccagcctacatttctcagctcccctggagccagctgatcctgtaacgctgctggaggtcagtctgagctaccaagactgtccctagacaaaggtggagtcccccacactgcccaagaccaaatccctcactcaacctgctgaggtgtggatggggaaacagaggcaaaactgaggcacctgatgcattcagcctgctgtgcagcagtgccattgactgccctgatgttcagagagaaacgcacacaaggtttgcccatgagaattggggagcagatggccaagcagataggttatgtctgttttctgagtgatgaagtcaggaagccctgtggctctggaggccacttgtggttcattcttttcccatatccttggcttttagaaatggttaccttcaggacagtgcagctgcatttatcagagcactattgctaagttttcttttctggcttgtgtttttctgggacagtttagaattgggaggcctattctcatagaacaccaaaaatgatgttcagtgattcatttaacatacaccaatgtactctggctgctggggggacaaccataagcaagacatgcccagggtttgccgtggctccagatctactccctgtaggagttcaaggatcacacaaacggtagtaaccagggttgtgaatctgagtacaccctggcaaggcttctcttcagactgaagcagcaattctgccactaccagcagcaaccaggacgtctgttctttgtgggggccagatcagaagagagaggcccctgtgacgcccgggctgcttggtcacaactctgtccaattcaaggatgtttatcggcctctcttagatcctgagtgagacaaatacagaaatgacccattccctgcccaccagaaactcagaggtgattggggagactgacacaggaaaatgaacttaatcaagagagactgtgatatgtgctaagaagggtgtgagggagggagagatgaattttccctggagggatcctagaaagcattgtcatattgccatctccattagctcacttttaaacaactagggtgctggaagaacctttgtctgagggtagttcatagctggaaatacttggaatattttccagagtctctaaactctcatcttcccccacagatacacatccaagctcacaaataggagtagcaattctaggtggtagggttgtgtacggaacccctggctgtctgcatatatctcagaattaccccaggaccattgtcccaaagtctagagtctttacaggtaggcaaaatttgttttcaatgcctgtgcctcagctgctgtcacaaatacccatcttaggatcccatcagcttcccatcccccaccagacagccacagtaccctcactttctccctattgttctttcaaatcctgttctcaggaaagaaactgccactaattcattcacactaaggtgtaaatgattgataataggaatgagttacctcttcccacagacatttgtttttaagtatgacagagcagggccttaatcccaagggaaaaggttatggaactggagggggtgagctttctgggtagaaggagacttcctgaatttccttaaaacccagtaagagtaagacctgttgttttggaaggtctgctccaccatctaagagcactgtttttttttttttgttgttgttgttgttttacggtctctgagggaatatagtaaaaatgcatatgcacgtgcaatttgcacggcagcatttcaccgattgtggactgtattggctaatgtgtttcctggtctttagatgcaaaccattaataacactatcttatctcatagttttttcaggggtgcttcttgattagtagggaattttgaacacctctttaaatacagctagaaaataaaaccaatttgtaaagccacatttgcatatgatgccagcctcacgcatttgtatatctccagaaattcaggtatgcctcaccaatttgcccgtctttaataaaatcttgtgttaaaatttgcatcacgtcgccttcctatgtatgacgaaacaagaaacagagatttccaattgctcttttgtcttcagacatttagtaatataaagtacctatttttatgctgaaatgtttatacaggtttattaatagcaagtgcaactaactggcggcatgccttgcaacacattttgatatattagccatgcttccgggtaaaggcaagccccaaactccttatcttttgcagtctctctgggatcagtaaaagaaaaaaaaaataatgtgcttaagaagtgggactgtaaatatgtatatttaactttgtatagcccatgtacctaccttgtatagaaaaataattttaaaaatttgaatggaagggggtaaaggaagtcatgaagtttttttgcatttttatttaaatgaaggaattccaaataactcacctacagatttttagcacaaaaatagccattgtaaagtgttaaaatttacgataagtattctattggggaggaaaggtaactctgatctcagttacagtttttttttcctttttaatttcattattttgggtttttggtttttgcagtcctatttatctgcagtcgtattaagtcctattgctagaataggttactacaaaaaaggttatattctgaaagaaaaataactgacattatatataaccaattaatttaaagtattgccatttaaattacacactgagagcatgtcctatgcagacatagatttttctgttcatttatttttcttcattgcagtggattgatttgataaatagatgtgttgaattactacatttgctgtacatattatttaataaactttattcagaattgcgtggc

SEQ ID NO: 29482 - DNA, 2436 bp, Homo sapiens
  source 1..2436: mol_type = unassigned DNA
atgagttctgaatgtgatggtggttccaaagctgtgatgaatggcttggcacctggcagcaatgggcaagacaaagacatggatcttacaaaaatctgcactgggaagggagcggtgactctccgggcctcgtcttcctacagggaaaccccaagcagtagccctgcgagccctcaggaaacccggcaacacgaaagcaaaccaggtctggagccagagccttcttcagcagatgagtggaggctttcttccagtgctgatgccaatggaaatgcccagccctcttcactcgctgccaagggctacagaagtgtgcatcccaaccttccttctgacaagtcccaggattccagtcctctactaaatgaagtttcttcttcccttattggaactgattcccaagcctttccatcagttagcaagccttcatccgcctatccctccacaacgattgtcaatcctactattgtgctcttgcaacacaatcgagaacagcaaaaacgactcagtagcctttcagatcctgtctcagaaagaagagtgggagagcaggactcagcaccaacccaggaaaaacccacctcacctggcaaggctattgaaaaaagagcaaaggatgacagtaggcgggtggtgaagagcactcaggacttaagcgatgtttccatggatgaagtgggcatcccactccggaacactgagagatcaaaagactggtacaagactatgtttaaacagatccacaaactgaacagagatgatgattcagatctgtactctcccagatactcattttctgaagacacaaaatctcccctttctgtgcctcgctcaaaaagtgagatgagctacattgatggtgagaaggtagtcaagaggtcggccacactacccctcccagcccgctcttcctcactgaagtcaagctcagaaagaaatgactgggaacccccagataagaaagtagacacaagaaaatatcgtgcagagcccaagagcatttacgaatatcagcctggcaagtcttccgttctgaccaacgaaaagatgagtcgggatataagcccagaagagatagatttaaagaatgaaccttggtataaattcttttcggaattggagtttgggaaaccgactaatctagacaaagatctcagcctctgccagacagagttagaggcagatttagaaaaaatggagacgcttaataaagcacccagtgcaaacgtgccacagagctcagccatcagccctactccggaaatttcttcagagactcctggatatatatattcttccaacttccatgcagtgaagagggaatcagacggggctcctggggatctcactagcttggagaatgagagacaaatttataaaagtgtcttggaaggtggtgacatccctcttcagggcctgagtgggctcaagcgaccatccagctctgcttccactaaagattcagaatcgccaagacattttataccagctgattacttggaatccacggaagaatttattcgaagacgtcatgatgataaagagaaacttttagcggaccagagacgacttaaacgcgagcaagaagaggctgatattgcagctcgacgccacacaggcgtcattccgacgcaccatcagtttatcactaatgagcgctttggggacctcctcaatatagacgatactgcaaaaaggaaatctgggtcagagatgagacctgccagagccaaatttgactttaaagctcagacactaaaggagcttcctctgcagaagggagatattgtttacatttataagcaaattgatcagaactggtatgaaggagaacaccacggccgggtgggaatcttcccacgcacctacatcgagcttcttcctcctgctgagaaggcacagcccaaaaagttgacaccagtgcaggttttggaatatggagaagctattgctaagtttaactttaatggtgatacacaagtagaaatgtccttcagaaagggtgagaggatcacactgctccggcaggtagatgagaactggtacgaagggaggatcccggggacatcccgacaaggcatcttccccatcacctacgtggatgtgatcaagcgaccactggtgaaaaaccctgtggattacatggacctgcctttctcctcctccccaagtcgcagtgccactgcaagcccacagcaacctcaagcccagcagcgaagagtcacccccgacaggagtcaaacctcacaagatttatttagctatcaagcattatatagctatataccacagaatgatgatgagttggaactccgcgatggagatatcgttgatgtcatggaaaaatgtgacgatggatggtttgttggtacttcaagaaggacaaagcagtttggtacttttccaggcaactatgtaaaacctttgtatctataa

SEQ ID NO: 29483 - DNA, 2055 bp, Homo sapiens
  source 1..2055: mol_type = unassigned DNA
atgagttctgaatgtgatggtggttccaaagctgtgatgaatggcttggcacctggcagcaatgggcaagacaaagacatggatcttacaaaaatctgcactgggaagggagcggtgactctccgggcctcgtcttcctacagggaaaccccaagcagtagccctgcgagccctcaggaaacccggcaacacgaaagcaaaccagatgagtggaggctttcttccagtgctgatgccaatggaaatgcccagccctcttcactcgctgccaagggctacagaagtgtgcatcccaaccttccttctgacaagtcccaggattccagtcctctactaaatgaagtttcttcttcccttattggaactgattcccaagcctttccatcagttagcaagccttcatccgcctatccctccacaacgattgtcaatcctactattgtgctcttgcaacacaatcgagaacagcaaaaacgactcagtagcctttcagatcctgtctcagaaagaagagtgggagagcaggactcagcaccaacccaggaaaaacccacctcacctggcaaggctattgaaaaaagagcaaaggatgacagtaggcgggtggtgaagagcactcaggacttaagcgatgtttccatggatgaagtgggcatcccactccggaacactgagagatcaaaagactggtacaagactatgtttaaacagatccacaaactgaacagagatgatgattcagatctgtactctcccagatactcattttctgaagacacaaaatctcccctttctgtgcctcgctcaaaaagtgagatgagctacattgatggtgagaaggtagtcaagaggtcggccacactacccctcccagcccgctcttcctcactgaagtcaagctcagaaagaaatgactgggaacccccagataagaaagtagacacaagaaaatatcgtgcagagcccaagagcatttacgaatatcagcctggcaagtcttccgttctgaccaacgaaaagatgagctcagccatcagccctactccggaaatttcttcagagactcctggatatatatattcttccaacttccatgcagtgaagagggaatcagacggggctcctggggatctcactagcttggagaatgagagacaaatttataaaagtgtcttggaaggtggtgacatccctcttcagggcctgagtgggctcaagcgaccatccagctctgcttccactaaagattcagaatcgccaagacattttataccagctgattacttggaatccacggaagaatttattcgaagacgtcatgatgataaagagatgagacctgccagagccaaatttgactttaaagctcagacactaaaggagcttcctctgcagaagggagatattgtttacatttataagcaaattgatcagaactggtatgaaggagaacaccacggccgggtgggaatcttcccacgcacctacatcgagcttcttcctcctgctgagaaggcacagcccaaaaagttgacaccagtgcaggttttggaatatggagaagctattgctaagtttaactttaatggtgatacacaagtagaaatgtccttcagaaagggtgagaggatcacactgctccggcaggtagatgagaactggtacgaagggaggatcccggggacatcccgacaaggcatcttccccatcacctacgtggatgtgatcaagcgaccactggtgaaaaaccctgtggattacatggacctgcctttctcctcctccccaagtcgcagtgccactgcaagcccacagcaacctcaagcccagcagcgaagagtcacccccgacaggagtcaaacctcacaagatttatttagctatcaagcattatatagctatataccacagaatgatgatgagttggaactccgcgatggagatatcgttgatgtcatggaaaaatgtgacgatggatggtttgttggtacttcaagaaggacaaagcagtttggtacttttccaggcaactatgtaaaacctttgtatctataa

SEQ ID NO: 29484 - DNA, 6033 bp, Homo sapiens
  source 1..6033: mol_type = unassigned DNA
ttgcagacgacttgtcctgccaccaccatgagttctgaatgtgatggtggttccaaagctgtgatgaatggcttggcacctggcagcaatgggcaagacaaagcaactgccgaccctttacgcgcacgctctatttctgctgttaaaatcattcctgtgaagacagtgaaaaacgcctcaggcctagttctccctacagacatggatcttacaaaaatctgcactgggaagggagcggtgactctccgggcctcgtcttcctacagggaaaccccaagcagtagccctgcgagccctcaggaaacccggcaacacgaaagcaaaccaggtctggagccagagccttcttcagcagatgagtggaggctttcttccagtgctgatgccaatggaaatgcccagccctcttcactcgctgccaagggctacagaagtgtgcatcccaaccttccttctgacaagtcccagaggtggccccaccacagccagccagcccgcgcctctggctcctttgcccccattagccagacgccaccatccttctcaccaccacctccgctggtccctcctgccccggaggacctccgcagagtctcggagcctgacctcacgggagctgtttcgagtaccgattccagtcctctactaaatgaagtttcttcttcccttattggaactgattcccaagcctttccatcagttagcaagccttcatccgcctatccctccacaacgattgtcaatcctactattgtgctcttgcaacacaatcgagaacagcaaaaacgactcagtagcctttcagatcctgtctcagaaagaagagtgggagagcaggactcagcaccaacccaggaaaaacccacctcacctggcaaggctattgaaaaaagagcaaaggatgacagtaggcgggtggtgaagagcactcaggacttaagcgatgtttccatggatgaagtgggcatcccactccggaacactgagagatcaaaagactggtacaagactatgtttaaacagatccacaaactgaacagagatgatgattcagatctgtactctcccagatactcattttctgaagacacaaaatctcccctttctgtgcctcgctcaaaaagtgagatgagctacattgatggtgagaaggtagtcaagaggtcggccacactacccctcccagcccgctcttcctcactgaagtcaagctcagaaagaaatgactgggaacccccagataagaaagtagacacaagaaaatatcgtgcagagcccaagagcatttacgaatatcagcctggcaagtcttccgttctgaccaacgaaaagatgagtcgggatataagcccagaagagatagatttaaagaatgaaccttggtataaattcttttcggaattggagtttgggaaaccgcctcccaaaaagatatgggattatactcctggagactgctctatccttcctagagaggatagaaagagctcagccatcagccctactccggaaatttcttcagagactcctggatatatatattcttccaacttccatgcagtgaagagggaatcagacggggctcctggggatctcactagcttggagaatgagagacaaatttataaaagtgtcttggaaggtggtgacatccctcttcagggcctgagtgggctcaagcgaccatccagctctgcttccactaaagattcagaatcgccaagacattttataccagctgattacttggaatccacggaagaatttattcgaagacgtcatgatgataaagagaaacttttagcggaccagagacgacttaaacgcgagcaagaagaggctgatattgcagctcgacgccacacaggcgtcattccgacgcaccatcagtttatcactaatgagcgctttggggacctcctcaatatagacgatactgcaaaaaggaaatctgggtcagagatgagacctgccagagccaaatttgactttaaagctcagacactaaaggagcttcctctgcagaagggagatattgtttacatttataagcaaattgatcagaactggtatgaaggagaacaccacggccgggtgggaatcttcccacgcacctacatcgagcttcttcctcctgctgagaaggcacagcccaaaaagttgacaccagtgcaggttttggaatatggagaagctattgctaagtttaactttaatggtgatacacaagtagaaatgtccttcagaaagggtgagaggatcacactgctccggcaggtagatgagaactggtacgaagggaggatcccggggacatcccgacaaggcatcttccccatcacctacgtggatgtgatcaagcgaccactggtgaaaaaccctgtggattacatggacctgcctttctcctcctccccaagtcgcagtgccactgcaagcccacagctttctcatcattcattgagagcaggaccagatctcacagaatctgaaaagagctatgtgcaacctcaagcccagcagcgaagagtcacccccgacaggagtcaaacctcacaagatttatttagctatcaagcattatatagctatataccacagaatgatgatgagttggaactccgcgatggagatatcgttgatgtcatggaaaaatgtgacgatggatggtttgttggtacttcaagaaggacaaagcagtttggtacttttccaggcaactatgtaaaacctttgtatctataagaagactgaaaaccatggagattatttttattggaggaggaagcatcattcatgaaccgatctttttagttgagtcagtaggaaaattaatacagtggataaagtaagaagcaaaagacagggacagagaagtgttgtgtttaaaacccaagcctgtctaaggttactgtgtattagacagggccgaactagtgtgctgagcaaaaagaattgaagcaaattgtatttacttagccgcttctgggagccacttcagcctttcccctcccctccacttcttgggtaatctgacctgaagcatagtccaggagcagagttagccagaaatgcctcctgctgccccagccttagagagctcccatctcaatcattgagcctgaaggcttcaagcccaagaatgcaacaagacccccagcctacatttctcagctcccctggagccagctgatcctgtaacgctgctggaggtcagtctgagctaccaagactgtccctagacaaaggtggagtcccccacactgcccaagaccaaatccctcactcaacctgctgaggtgtggatggggaaacagaggcaaaactgaggcacctgatgcattcagcctgctgtgcagcagtgccattgactgccctgatgttcagagagaaacgcacacaaggtttgcccatgagaattggggagcagatggccaagcagataggttatgtctgttttctgagtgatgaagtcaggaagccctgtggctctggaggccacttgtggttcattcttttcccatatccttggcttttagaaatggttaccttcaggacagtgcagctgcatttatcagagcactattgctaagttttcttttctggcttgtgtttttctgggacagtttagaattgggaggcctattctcatagaacaccaaaaatgatgttcagtgattcatttaacatacaccaatgtactctggctgctggggggacaaccataagcaagacatgcccagggtttgccgtggctccagatctactccctgtaggagttcaaggatcacacaaacggtagtaaccagggttgtgaatctgagtacaccctggcaaggcttctcttcagactgaagcagcaattctgccactaccagcagcaaccaggacgtctgttctttgtgggggccagatcagaagagagaggcccctgtgacgcccgggctgcttggtcacaactctgtccaattcaaggatgtttatcggcctctcttagatcctgagtgagacaaatacagaaatgacccattccctgcccaccagaaactcagaggtgattggggagactgacacaggaaaatgaacttaatcaagagagactgtgatatgtgctaagaagggtgtgagggagggagagatgaattttccctggagggatcctagaaagcattgtcatattgccatctccattagctcacttttaaacaactagggtgctggaagaacctttgtctgagggtagttcatagctggaaatacttggaatattttccagagtctctaaactctcatcttcccccacagatacacatccaagctcacaaataggagtagcaattctaggtggtagggttgtgtacggaacccctggctgtctgcatatatctcagaattaccccaggaccattgtcccaaagtctagagtctttacaggtaggcaaaatttgttttcaatgcctgtgcctcagctgctgtcacaaatacccatcttaggatcccatcagcttcccatcccccaccagacagccacagtaccctcactttctccctattgttctttcaaatcctgttctcaggaaagaaactgccactaattcattcacactaaggtgtaaatgattgataataggaatgagttacctcttcccacagacatttgtttttaagtatgacagagcagggccttaatcccaagggaaaaggttatggaactggagggggtgagctttctgggtagaaggagacttcctgaatttccttaaaacccagtaagagtaagacctgttgttttggaaggtctgctccaccatctaagagcactgtttttttttttttgttgttgttgttgttttacggtctctgagggaatatagtaaaaatgcatatgcacgtgcaatttgcacggcagcatttcaccgattgtggactgtattggctaatgtgtttcctggtctttagatgcaaaccattaataacactatcttatctcatagttttttcaggggtgcttcttgattagtagggaattttgaacacctctttaaatacagctagaaaataaaaccaatttgtaaagccacatttgcatatgatgccagcctcacgcatttgtatatctccagaaattcaggtatgcctcaccaatttgcccgtctttaataaaatcttgtgttaaaatttgcatcacgtcgccttcctatgtatgacgaaacaagaaacagagatttccaattgctcttttgtcttcagacatttagtaatataaagtacctatttttatgctgaaatgtttatacaggtttattaatagcaagtgcaactaactggcggcatgccttgcaacacattttgatatattagccatgcttccgggtaaaggcaagccccaaactccttatcttttgcagtctctctgggatcagtaaaagaaaaaaaaaataatgtgcttaagaagtgggactgtaaatatgtatatttaactttgtatagcccatgtacctaccttgtatagaaaaataattttaaaaatttgaatggaagggggtaaaggaagtcatgaagtttttttgcatttttatttaaatgaaggaattccaaataactcacctacagatttttagcacaaaaatagccattgtaaagtgttaaaatttacgataagtattctattggggaggaaaggtaactctgatctcagttacagtttttttttcctttttaatttcattattttgggtttttggtttttgcagtcctatttatctgcagtcgtattaagtcctattgctagaataggttactacaaaaaaggttatattctgaaagaaaaataactgacattatatataaccaattaatttaaagtattgccatttaaattacacactgagagcatgtcctatgcagacatagatttttctgttcatttatttttcttcattgcagtggattgatttgataaatagatgtgttgaattactacatttgctgtacatattatttaataaactttattcagaattgcgtggcata

SEQ ID NO: 29485 - DNA, 6931 bp, Homo sapiens
  source 1..6931: mol_type = unassigned DNA
gcagcgtgtagtgcgagtggggcggacgcgcgcagcccgcccgcccggcgaccagcaaggagttggcatcctttggaagagttcgtgaaagctttctgcccagagctcctggaccaatgcatcttcccaccaccttaaaccactgagcagttcagagccccagttgcagacgacttgtcctgccaccaccatgagttctgaatgtgatggtggttccaaagctgtgatgaatggcttggcacctggcagcaatgggcaagacaaagcaactgccgaccctttacgcgcacgctctatttctgctgttaaaatcattcctgtgaagacagtgaaaaacgcctcaggcctagttctccctacagacatggatcttacaaaaatctgcactgggaagggagcggtgactctccgggcctcgtcttcctacagggaaaccccaagcagtagccctgcgagccctcaggaaacccggcaacacgaaagcaaaccaggtctggagccagagccttcttcagcagatgagtggaggctttcttccagtgctgatgccaatggaaatgcccagccctcttcactcgctgccaagggctacagaagtgtgcatcccaaccttccttctgacaagtcccaggatgccacttcctccagtgcagcccagccggaggtaatagttgtccctctctacctggttaatactgacagagggcaagaaggcactgccagacctccaacacctctggggcctcttggctgcgtccccacaatcccagcgactgcctctgccgcctcacctctgaccttcccgactctagatgatttcattccccctcatctgcagaggtggccccaccacagccagccagcccgcgcctctggctcctttgcccccattagccagacgccaccatccttctcaccaccacctccgctggtccctcctgccccggaggacctccgcagagtctcggagcctgacctcacgggagctgtttcgagtaccgattccagtcctctactaaatgaagtttcttcttcccttattggaactgattcccaagcctttccatcagttagcaagccttcatccgcctatccctccacaacgattgtcaatcctactattgtgctcttgcaacacaatcgagaacagcaaaaacgactcagtagcctttcagatcctgtctcagaaagaagagtgggagagcaggactcagcaccaacccaggaaaaacccacctcacctggcaaggctattgaaaaaagagcaaaggatgacagtaggcgggtggtgaagagcactcaggacttaagcgatgtttccatggatgaagtgggcatcccactccggaacactgagagatcaaaagactggtacaagactatgtttaaacagatccacaaactgaacagagacactcctgaagaaaacccttatttccctacgtacaaattccctgaacttcctgaaatccagcaaacttccgaagagacaaagtcttgctctgtcatgtcacccaggctggagtgcagtggtacagtcatagctcactgcagcctcaaactcctagactcaagcaatcctcccacctcagcctcccaagtagctgggactgcagatgatgattcagatctgtactctcccagatactcattttctgaagacacaaaatctcccctttctgtgcctcgctcaaaaagtgagatgagctacattgatggtgagaaggtagtcaagaggtcggccacactacccctcccagcccgctcttcctcactgaagtcaagctcagaaagaaatgactgggaacccccagataagaaagtagacacaagaaaatatcgtgcagagcccaagagcatttacgaatatcagcctggcaagtcttccgttctgaccaacgaaaagatgagtcgggatataagcccagaagagatagatttaaagaatgaaccttggtataaattcttttcggaattggagtttgggaaaccgcctcccaaaaagatatgggattatactcctggagactgctctatccttcctagagaggatagaaagactaatctagacaaagatctcagcctctgccagacagagttagaggcagatttagaaaaaatggagacgcttaataaagcacccagtgcaaacgtgccacagagctcagccatcagccctactccggaaatttcttcagagactcctggatatatatattcttccaacttccatgcagtgaagagggaatcagacggggctcctggggatctcactagcttggagaatgagagacaaatttataaaagtgtcttggaaggtggtgacatccctcttcagggcctgagtgggctcaagcgaccatccagctctgcttccactaaagattcagaatcgccaagacattttataccagctgattacttggaatccacggaagaatttattcgaagacgtcatgatgataaagagaaacttttagcggaccagagacgacttaaacgcgagcaagaagaggctgatattgcagctcgacgccacacaggcgtcattccgacgcaccatcagtttatcactaatgagcgctttggggacctcctcaatatagacgatactgcaaaaaggaaatctgggtcagagatgagacctgccagagccaaatttgactttaaagctcagacactaaaggagcttcctctgcagaagggagatattgtttacatttataagcaaattgatcagaactggtatgaaggagaacaccacggccgggtgggaatcttcccacgcacctacatcgagcttcttcctcctgctgagaaggcacagcccaaaaagttgacaccagtgcaggttttggaatatggagaagctattgctaagtttaactttaatggtgatacacaagtagaaatgtccttcagaaagggtgagaggatcacactgctccggcaggtagatgagaactggtacgaagggaggatcccggggacatcccgacaaggcatcttccccatcacctacgtggatgtgatcaagcgaccactggtgaaaaaccctgtggattacatggacctgcctttctcctcctccccaagtcgcagtgccactgcaagcccacagccatggcgcgaagagagtggacaatatgagaggaaagcagagaggggggcaggcgaaagaggccctggtggacccaagatctctaagaagagctgcttgaagccttcagacgtggtcaggtgcctgagtactgaacagagactctcagatctcaacacccctgaggagagccggcccggcaagcccctgggtagcgcttttccaggaagtgaggctgagcagacagagcggcatagaggtggcgagcaggcggggaggaaagctgctcggagaggtgggagccagcaacctcaagcccagcagcgaagagtcacccccgacaggagtcaaacctcacaagatttatttagctatcaagcattatatagctatataccacagaatgatgatgagttggaactccgcgatggagatatcgttgatgtcatggaaaaatgtgacgatggatggtttgttggtacttcaagaaggacaaagcagtttggtacttttccaggcaactatgtaaaacctttgtatctataagaagactgaaaaccatggagattatttttattggaggaggaagcatcattcatgaaccgatctttttagttgagtcagtaggaaaattaatacagtggataaagtaagaagcaaaagacagggacagagaagtgttgtgtttaaaacccaagcctgtctaaggttactgtgtattagacagggccgaactagtgtgctgagcaaaaagaattgaagcaaattgtatttacttagccgcttctgggagccacttcagcctttcccctcccctccacttcttgggtaatctgacctgaagcatagtccaggagcagagttagccagaaatgcctcctgctgccccagccttagagagctcccatctcaatcattgagcctgaaggcttcaagcccaagaatgcaacaagacccccagcctacatttctcagctcccctggagccagctgatcctgtaacgctgctggaggtcagtctgagctaccaagactgtccctagacaaaggtggagtcccccacactgcccaagaccaaatccctcactcaacctgctgaggtgtggatggggaaacagaggcaaaactgaggcacctgatgcattcagcctgctgtgcagcagtgccattgactgccctgatgttcagagagaaacgcacacaaggtttgcccatgagaattggggagcagatggccaagcagataggttatgtctgttttctgagtgatgaagtcaggaagccctgtggctctggaggccacttgtggttcattcttttcccatatccttggcttttagaaatggttaccttcaggacagtgcagctgcatttatcagagcactattgctaagttttcttttctggcttgtgtttttctgggacagtttagaattgggaggcctattctcatagaacaccaaaaatgatgttcagtgattcatttaacatacaccaatgtactctggctgctggggggacaaccataagcaagacatgcccagggtttgccgtggctccagatctactccctgtaggagttcaaggatcacacaaacggtagtaaccagggttgtgaatctgagtacaccctggcaaggcttctcttcagactgaagcagcaattctgccactaccagcagcaaccaggacgtctgttctttgtgggggccagatcagaagagagaggcccctgtgacgcccgggctgcttggtcacaactctgtccaattcaaggatgtttatcggcctctcttagatcctgagtgagacaaatacagaaatgacccattccctgcccaccagaaactcagaggtgattggggagactgacacaggaaaatgaacttaatcaagagagactgtgatatgtgctaagaagggtgtgagggagggagagatgaattttccctggagggatcctagaaagcattgtcatattgccatctccattagctcacttttaaacaactagggtgctggaagaacctttgtctgagggtagttcatagctggaaatacttggaatattttccagagtctctaaactctcatcttcccccacagatacacatccaagctcacaaataggagtagcaattctaggtggtagggttgtgtacggaacccctggctgtctgcatatatctcagaattaccccaggaccattgtcccaaagtctagagtctttacaggtaggcaaaatttgttttcaatgcctgtgcctcagctgctgtcacaaatacccatcttaggatcccatcagcttcccatcccccaccagacagccacagtaccctcactttctccctattgttctttcaaatcctgttctcaggaaagaaactgccactaattcattcacactaaggtgtaaatgattgataataggaatgagttacctcttcccacagacatttgtttttaagtatgacagagcagggccttaatcccaagggaaaaggttatggaactggagggggtgagctttctgggtagaaggagacttcctgaatttccttaaaacccagtaagagtaagacctgttgttttggaaggtctgctccaccatctaagagcactgtttttttttttttgttgttgttgttgttttacggtctctgagggaatatagtaaaaatgcatatgcacgtgcaatttgcacggcagcatttcaccgattgtggactgtattggctaatgtgtttcctggtctttagatgcaaaccattaataacactatcttatctcatagttttttcaggggtgcttcttgattagtagggaattttgaacacctctttaaatacagctagaaaataaaaccaatttgtaaagccacatttgcatatgatgccagcctcacgcatttgtatatctccagaaattcaggtatgcctcaccaatttgcccgtctttaataaaatcttgtgttaaaatttgcatcacgtcgccttcctatgtatgacgaaacaagaaacagagatttccaattgctcttttgtcttcagacatttagtaatataaagtacctatttttatgctgaaatgtttatacaggtttattaatagcaagtgcaactaactggcggcatgccttgcaacacattttgatatattagccatgcttccgggtaaaggcaagccccaaactccttatcttttgcagtctctctgggatcagtaaaagaaaaaaaaaataatgtgcttaagaagtgggactgtaaatatgtatatttaactttgtatagcccatgtacctaccttgtatagaaaaataattttaaaaatttgaatggaagggggtaaaggaagtcatgaagtttttttgcatttttatttaaatgaaggaattccaaataactcacctacagatttttagcacaaaaatagccattgtaaagtgttaaaatttacgataagtattctattggggaggaaaggtaactctgatctcagttacagtttttttttcctttttaatttcattattttgggtttttggtttttgcagtcctatttatctgcagtcgtattaagtcctattgctagaataggttactacaaaaaaggttatattctgaaagaaaaataactgacattatatataaccaattaatttaaagtattgccatttaaattacacactgagagcatgtcctatgcagacatagatttttctgttcatttatttttcttcattgcagtggattgatttgataaatagatgtgttgaattactacatttgctgtacatattatttaataaactttattcagaattgcgtggc

SEQ ID NO: 29486 - DNA, 7354 bp, Homo sapiens
  source 1..7354: mol_type = unassigned DNA
gcagcgtgtagtgcgagtggggcggacgcgcgcagcccgcccgcccggcgaccagcaaggagttggcatcctttggaagagttcgtgaaagctttctgcccagagctcctggaccaatgcatcttcccaccaccttaaaccactgagcagttcagagccccagttgcagacgacttgtcctgccaccaccatgagttctgaatgtgatggtggttccaaagctgtgatgaatggcttggcacctggcagcaatgggcaagacaaagcaactgccgaccctttacgcgcacgctctatttctgctgttaaaatcattcctgtgaagacagtgaaaaacgcctcaggcctagttctccctacagacatggatcttacaaaaatctgcactgggaagggagcggtgactctccgggcctcgtcttcctacagggaaaccccaagcagtagccctgcgagccctcaggaaacccggcaacacgaaagcaaaccaggtctggagccagagccttcttcagcagatgagtggaggctttcttccagtgctgatgccaatggaaatgcccagccctcttcactcgctgccaagggctacagaagtgtgcatcccaaccttccttctgacaagtcccaggatgccacttcctccagtgcagcccagccggaggtaatagttgtccctctctacctggttaatactgacagagggcaagaaggcactgccagacctccaacacctctggggcctcttggctgcgtccccacaatcccagcgactgcctctgccgcctcacctctgaccttcccgactctagatgatttcattccccctcatctgcagaggtggccccaccacagccagccagcccgcgcctctggctcctttgcccccattagccagacgccaccatccttctcaccaccacctccgctggtccctcctgccccggaggacctccgcagagtctcggagcctgacctcacgggagctgtttcgagtaccgattccagtcctctactaaatgaagtttcttcttcccttattggaactgattcccaagcctttccatcagttagcaagccttcatccgcctatccctccacaacgattgtcaatcctactattgtgctcttgcaacacaatcgagaacagcaaaaacgactcagtagcctttcagatcctgtctcagaaagaagagtgggagagcaggactcagcaccaacccaggaaaaacccacctcacctggcaaggctattgaaaaaagagcaaaggatgacagtaggcgggtggtgaagagcactcaggacttaagcgatgtttccatggatgaagtgggcatcccactccggaacactgagagatcaaaagactggtacaagactatgtttaaacagatccacaaactgaacagagacactcctgaagaaaacccttatttccctacgtacaaattccctgaacttcctgaaatccagcaaacttccgaagaggacaatccttacactcccacctaccagtttcctgcatctactcctagtcctaaatctgaagatgatgattcagatctgtactctcccagatactcattttctgaagacacaaaatctcccctttctgtgcctcgctcaaaaagtgagatgagctacattgatggtgagaaggtagtcaagaggtcggccacactacccctcccagcccgctcttcctcactgaagtcaagctcagaaagaaatgactgggaacccccagataagaaagtagacacaagaaaatatcgtgcagagcccaagagcatttacgaatatcagcctggcaagtcttccgttctgaccaacgaaaagatgagtcgggatataagcccagaagagatagatttaaagaatgaaccttggtataaattcttttcggaattggagtttgggaaaccgcctcccaaaaagatatgggattatactcctggagactgctctatccttcctagagaggatagaaagactaatctagacaaagatctcagcctctgccagacagagttagaggcagatttagaaaaaatggagacgcttaataaagcacccagtgcaaacgtgccacagagctcagccatcagccctactccggaaatttcttcagagactcctggatatatatattcttccaacttccatgcagtgaagagggaatcagacggggctcctggggatctcactagcttggagaatgagagacaaatttataaaagtgtcttggaaggtggtgacatccctcttcagggcctgagtgggctcaagcgaccatccagctctgcttccactaaagattcagaatcgccaagacattttataccagctgattacttggaatccacggaagaatttattcgaagacgtcatgatgataaagagaaacttttagcggaccagagacgacttaaacgcgagcaagaagaggctgatattgcagctcgacgccacacaggcgtcattccgacgcaccatcagtttatcactaatgagcgctttggggacctcctcaatatagacgatactgcaaaaaggaaatctgggtcagagatgagacctgccagagccaaatttgactttaaagctcagacactaaaggagcttcctctgcagaagggagatattgtttacatttataagcaaattgatcagaactggtatgaaggagaacaccacggccgggtgggaatcttcccacgcacctacatcgagcttcttcctcctgctgagaaggcacagcccaaaaagttgacaccagtgcaggttttggaatatggagaagctattgctaagtttaactttaatggtgatacacaagtagaaatgtccttcagaaagggtgagaggatcacactgctccggcaggtagatgagaactggtacgaagggaggatcccggggacatcccgacaaggcatcttccccatcacctacgtggatgtgatcaagcgaccactggtgaaaaaccctgtggattacatggacctgcctttctcctcctccccaagtcgcagtgccactgcaagcccacagttttccagtcacagcaagctcatcacgccagccccctcatctctgccccactcccgccgagccctgtcccccgagatgcacgctgtcacctctgagtggatctcactgactgtgggggtcccaggcaggcgttctctggccctgaccccacccttgcctcctctgccagaggcttctatctataacactgaccacctcgccttgtcaccaagggccagtccctccctgtctctcagcctcccccatttgagttggtcagatcgtcccaccccacgatcagtagcttctccactggccctaccttccccacacaaaacctactccctagcacctacttcccaggcctcccttcacatgaatggagacggtggtgtccacacgccatcttcaggcatccaccaagatagcttcttgcagctgccgctggggagctctgatagtgtcatctcccagcttagtgatgcctttagcagccagagcaagaggcagccatggcgcgaagagagtggacaatatgagaggaaagcagagaggggggcaggcgaaagaggccctggtggacccaagatctctaagaagagctgcttgaagccttcagacgtggtcaggtgcctgagtactgaacagagactctcagatctcaacacccctgaggagagccggcccggcaagcccctgggtagcgcttttccaggaagtgaggctgagcagacagagcggcatagaggtggcgagcaggcggggaggaaagctgctcggagaggtgggagccagcaacctcaagcccagcagcgaagagtcacccccgacaggagtcaaacctcacaagatttatttagctatcaagcattatatagctatataccacagaatgatgatgagttggaactccgcgatggagatatcgttgatgtcatggaaaaatgtgacgatggatggtttgttggtacttcaagaaggacaaagcagtttggtacttttccaggcaactatgtaaaacctttgtatctataagaagactgaaaaccatggagattatttttattggaggaggaagcatcattcatgaaccgatctttttagttgagtcagtaggaaaattaatacagtggataaagtaagaagcaaaagacagggacagagaagtgttgtgtttaaaacccaagcctgtctaaggttactgtgtattagacagggccgaactagtgtgctgagcaaaaagaattgaagcaaattgtatttacttagccgcttctgggagccacttcagcctttcccctcccctccacttcttgggtaatctgacctgaagcatagtccaggagcagagttagccagaaatgcctcctgctgccccagccttagagagctcccatctcaatcattgagcctgaaggcttcaagcccaagaatgcaacaagacccccagcctacatttctcagctcccctggagccagctgatcctgtaacgctgctggaggtcagtctgagctaccaagactgtccctagacaaaggtggagtcccccacactgcccaagaccaaatccctcactcaacctgctgaggtgtggatggggaaacagaggcaaaactgaggcacctgatgcattcagcctgctgtgcagcagtgccattgactgccctgatgttcagagagaaacgcacacaaggtttgcccatgagaattggggagcagatggccaagcagataggttatgtctgttttctgagtgatgaagtcaggaagccctgtggctctggaggccacttgtggttcattcttttcccatatccttggcttttagaaatggttaccttcaggacagtgcagctgcatttatcagagcactattgctaagttttcttttctggcttgtgtttttctgggacagtttagaattgggaggcctattctcatagaacaccaaaaatgatgttcagtgattcatttaacatacaccaatgtactctggctgctggggggacaaccataagcaagacatgcccagggtttgccgtggctccagatctactccctgtaggagttcaaggatcacacaaacggtagtaaccagggttgtgaatctgagtacaccctggcaaggcttctcttcagactgaagcagcaattctgccactaccagcagcaaccaggacgtctgttctttgtgggggccagatcagaagagagaggcccctgtgacgcccgggctgcttggtcacaactctgtccaattcaaggatgtttatcggcctctcttagatcctgagtgagacaaatacagaaatgacccattccctgcccaccagaaactcagaggtgattggggagactgacacaggaaaatgaacttaatcaagagagactgtgatatgtgctaagaagggtgtgagggagggagagatgaattttccctggagggatcctagaaagcattgtcatattgccatctccattagctcacttttaaacaactagggtgctggaagaacctttgtctgagggtagttcatagctggaaatacttggaatattttccagagtctctaaactctcatcttcccccacagatacacatccaagctcacaaataggagtagcaattctaggtggtagggttgtgtacggaacccctggctgtctgcatatatctcagaattaccccaggaccattgtcccaaagtctagagtctttacaggtaggcaaaatttgttttcaatgcctgtgcctcagctgctgtcacaaatacccatcttaggatcccatcagcttcccatcccccaccagacagccacagtaccctcactttctccctattgttctttcaaatcctgttctcaggaaagaaactgccactaattcattcacactaaggtgtaaatgattgataataggaatgagttacctcttcccacagacatttgtttttaagtatgacagagcagggccttaatcccaagggaaaaggttatggaactggagggggtgagctttctgggtagaaggagacttcctgaatttccttaaaacccagtaagagtaagacctgttgttttggaaggtctgctccaccatctaagagcactgtttttttttttttgttgttgttgttgttttacggtctctgagggaatatagtaaaaatgcatatgcacgtgcaatttgcacggcagcatttcaccgattgtggactgtattggctaatgtgtttcctggtctttagatgcaaaccattaataacactatcttatctcatagttttttcaggggtgcttcttgattagtagggaattttgaacacctctttaaatacagctagaaaataaaaccaatttgtaaagccacatttgcatatgatgccagcctcacgcatttgtatatctccagaaattcaggtatgcctcaccaatttgcccgtctttaataaaatcttgtgttaaaatttgcatcacgtcgccttcctatgtatgacgaaacaagaaacagagatttccaattgctcttttgtcttcagacatttagtaatataaagtacctatttttatgctgaaatgtttatacaggtttattaatagcaagtgcaactaactggcggcatgccttgcaacacattttgatatattagccatgcttccgggtaaaggcaagccccaaactccttatcttttgcagtctctctgggatcagtaaaagaaaaaaaaaataatgtgcttaagaagtgggactgtaaatatgtatatttaactttgtatagcccatgtacctaccttgtatagaaaaataattttaaaaatttgaatggaagggggtaaaggaagtcatgaagtttttttgcatttttatttaaatgaaggaattccaaataactcacctacagatttttagcacaaaaatagccattgtaaagtgttaaaatttacgataagtattctattggggaggaaaggtaactctgatctcagttacagtttttttttcctttttaatttcattattttgggtttttggtttttgcagtcctatttatctgcagtcgtattaagtcctattgctagaataggttactacaaaaaaggttatattctgaaagaaaaataactgacattatatataaccaattaatttaaagtattgccatttaaattacacactgagagcatgtcctatgcagacatagatttttctgttcatttatttttcttcattgcagtggattgatttgataaatagatgtgttgaattactacatttgctgtacatattatttaataaactttattcagaattgcgtggc

SEQ ID NO: 29487 - DNA, 5927 bp, Homo sapiens
  source 1..5927: mol_type = unassigned DNA
gcagcgtgtagtgcgagtggggcggacgcgcgcagcccgcccgcccggcgaccagcaaggagttggcatcctttggaagagttcgtgaaagctttctgcccagagctcctggaccaatgcatcttcccaccaccttaaaccactgagcagttcagagccccagttgcagacgacttgtcctgccaccaccatgagttctgaatgtgatggtggttccaaagctgtgatgaatggcttggcacctggcagcaatgggcaagacaaagacatggatcttacaaaaatctgcactgggaagggagcggtgactctccgggcctcgtcttcctacagggaaaccccaagcagtagccctgcgagccctcaggaaacccggcaacacgaaagcaaaccaggtctggagccagagccttcttcagcagatgagtggaggctttcttccagtgctgatgccaatggaaatgcccagccctcttcactcgctgccaagggctacagaagtgtgcatcccaaccttccttctgacaagtcccaggatgccacttcctccagtgcagcccagccggaggtaatagttgtccctctctacctggttaatactgacagagggcaagaaggcactgccagacctccaacacctctggggcctcttggctgcgtccccacaatcccagcgactgcctctgccgcctcacctctgaccttcccgactctagatgatttcattccccctcatctgcagaggtggccccaccacagccagccagcccgcgcctctggctcctttgcccccattagccagacgccaccatccttctcaccaccacctccgctggtccctcctgccccggaggacctccgcagagtctcggagcctgacctcacgggagctgtttcgagtaccgattccagtcctctactaaatgaagtttcttcttcccttattggaactgattcccaagcctttccatcagttagcaagccttcatccgcctatccctccacaacgattgtcaatcctactattgtgctcttgcaacacaatcgagaacagcaaaaacgactcagtagcctttcagatcctgtctcagaaagaagagtgggagagcaggactcagcaccaacccaggaaaaacccacctcacctggcaaggctattgaaaaaagagcaaaggatgacagtaggcgggtggtgaagagcactcaggacttaagcgatgtttccatggatgaagtgggcatcccactccggaacactgagagatcaaaagactggtacaagactatgtttaaacagatccacaaactgaacagagatgatgattcagatctgtactctcccagatactcattttctgaagacacaaaatctcccctttctgtgcctcgctcaaaaagtgagatgagctacattgatggtgagaaggtagtcaagaggtcggccacactacccctcccagcccgctcttcctcactgaagtcaagctcagaaagaaatgactgggaacccccagataagaaagtagacacaagaaaatatcgtgcagagcccaagagcatttacgaatatcagcctggcaagtcttccgttctgaccaacgaaaagatgagctcagccatcagccctactccggaaatttcttcagagactcctggatatatatattcttccaacttccatgcagtgaagagggaatcagacggggctcctggggatctcactagcttggagaatgagagacaaatttataaaagtgtcttggaaggtggtgacatccctcttcagggcctgagtgggctcaagcgaccatccagctctgcttccactaaagattcagaatcgccaagacattttataccagctgattacttggaatccacggaagaatttattcgaagacgtcatgatgataaagagatgagacctgccagagccaaatttgactttaaagctcagacactaaaggagcttcctctgcagaagggagatattgtttacatttataagcaaattgatcagaactggtatgaaggagaacaccacggccgggtgggaatcttcccacgcacctacatcgagcttcttcctcctgctgagaaggcacagcccaaaaagttgacaccagtgcaggttttggaatatggagaagctattgctaagtttaactttaatggtgatacacaagtagaaatgtccttcagaaagggtgagaggatcacactgctccggcaggtagatgagaactggtacgaagggaggatcccggggacatcccgacaaggcatcttccccatcacctacgtggatgtgatcaagcgaccactggtgaaaaaccctgtggattacatggacctgcctttctcctcctccccaagtcgcagtgccactgcaagcccacagcaacctcaagcccagcagcgaagagtcacccccgacaggagtcaaacctcacaagatttatttagctatcaagcattatatagctatataccacagaatgatgatgagttggaactccgcgatggagatatcgttgatgtcatggaaaaatgtgacgatggatggtttgttggtacttcaagaaggacaaagcagtttggtacttttccaggcaactatgtaaaacctttgtatctataagaagactgaaaaccatggagattatttttattggaggaggaagcatcattcatgaaccgatctttttagttgagtcagtaggaaaattaatacagtggataaagtaagaagcaaaagacagggacagagaagtgttgtgtttaaaacccaagcctgtctaaggttactgtgtattagacagggccgaactagtgtgctgagcaaaaagaattgaagcaaattgtatttacttagccgcttctgggagccacttcagcctttcccctcccctccacttcttgggtaatctgacctgaagcatagtccaggagcagagttagccagaaatgcctcctgctgccccagccttagagagctcccatctcaatcattgagcctgaaggcttcaagcccaagaatgcaacaagacccccagcctacatttctcagctcccctggagccagctgatcctgtaacgctgctggaggtcagtctgagctaccaagactgtccctagacaaaggtggagtcccccacactgcccaagaccaaatccctcactcaacctgctgaggtgtggatggggaaacagaggcaaaactgaggcacctgatgcattcagcctgctgtgcagcagtgccattgactgccctgatgttcagagagaaacgcacacaaggtttgcccatgagaattggggagcagatggccaagcagataggttatgtctgttttctgagtgatgaagtcaggaagccctgtggctctggaggccacttgtggttcattcttttcccatatccttggcttttagaaatggttaccttcaggacagtgcagctgcatttatcagagcactattgctaagttttcttttctggcttgtgtttttctgggacagtttagaattgggaggcctattctcatagaacaccaaaaatgatgttcagtgattcatttaacatacaccaatgtactctggctgctggggggacaaccataagcaagacatgcccagggtttgccgtggctccagatctactccctgtaggagttcaaggatcacacaaacggtagtaaccagggttgtgaatctgagtacaccctggcaaggcttctcttcagactgaagcagcaattctgccactaccagcagcaaccaggacgtctgttctttgtgggggccagatcagaagagagaggcccctgtgacgcccgggctgcttggtcacaactctgtccaattcaaggatgtttatcggcctctcttagatcctgagtgagacaaatacagaaatgacccattccctgcccaccagaaactcagaggtgattggggagactgacacaggaaaatgaacttaatcaagagagactgtgatatgtgctaagaagggtgtgagggagggagagatgaattttccctggagggatcctagaaagcattgtcatattgccatctccattagctcacttttaaacaactagggtgctggaagaacctttgtctgagggtagttcatagctggaaatacttggaatattttccagagtctctaaactctcatcttcccccacagatacacatccaagctcacaaataggagtagcaattctaggtggtagggttgtgtacggaacccctggctgtctgcatatatctcagaattaccccaggaccattgtcccaaagtctagagtctttacaggtaggcaaaatttgttttcaatgcctgtgcctcagctgctgtcacaaatacccatcttaggatcccatcagcttcccatcccccaccagacagccacagtaccctcactttctccctattgttctttcaaatcctgttctcaggaaagaaactgccactaattcattcacactaaggtgtaaatgattgataataggaatgagttacctcttcccacagacatttgtttttaagtatgacagagcagggccttaatcccaagggaaaaggttatggaactggagggggtgagctttctgggtagaaggagacttcctgaatttccttaaaacccagtaagagtaagacctgttgttttggaaggtctgctccaccatctaagagcactgtttttttttttttgttgttgttgttgttttacggtctctgagggaatatagtaaaaatgcatatgcacgtgcaatttgcacggcagcatttcaccgattgtggactgtattggctaatgtgtttcctggtctttagatgcaaaccattaataacactatcttatctcatagttttttcaggggtgcttcttgattagtagggaattttgaacacctctttaaatacagctagaaaataaaaccaatttgtaaagccacatttgcatatgatgccagcctcacgcatttgtatatctccagaaattcaggtatgcctcaccaatttgcccgtctttaataaaatcttgtgttaaaatttgcatcacgtcgccttcctatgtatgacgaaacaagaaacagagatttccaattgctcttttgtcttcagacatttagtaatataaagtacctatttttatgctgaaatgtttatacaggtttattaatagcaagtgcaactaactggcggcatgccttgcaacacattttgatatattagccatgcttccgggtaaaggcaagccccaaactccttatcttttgcagtctctctgggatcagtaaaagaaaaaaaaaataatgtgcttaagaagtgggactgtaaatatgtatatttaactttgtatagcccatgtacctaccttgtatagaaaaataattttaaaaatttgaatggaagggggtaaaggaagtcatgaagtttttttgcatttttatttaaatgaaggaattccaaataactcacctacagatttttagcacaaaaatagccattgtaaagtgttaaaatttacgataagtattctattggggaggaaaggtaactctgatctcagttacagtttttttttcctttttaatttcattattttgggtttttggtttttgcagtcctatttatctgcagtcgtattaagtcctattgctagaataggttactacaaaaaaggttatattctgaaagaaaaataactgacattatatataaccaattaatttaaagtattgccatttaaattacacactgagagcatgtcctatgcagacatagatttttctgttcatttatttttcttcattgcagtggattgatttgataaatagatgtgttgaattactacatttgctgtacatattatttaataaactttattcagaattgcgtggca

SEQ ID NO: 29488 - DNA, 6490 bp, Homo sapiens
  source 1..6490: mol_type = unassigned DNA
gcagcgtgtagtgcgagtggggcggacgcgcgcagcccgcccgcccggcgaccagcaaggagttggcatcctttggaagagttcgtgaaagctttctgcccagagctcctggaccaatgcatcttcccaccaccttaaaccactgagcagttcagagccccagttgcagacgacttgtcctgccaccaccatgagttctgaatgtgatggtggttccaaagctgtgatgaatggcttggcacctggcagcaatgggcaagacaaagcaactgccgaccctttacgcgcacgctctatttctgctgttaaaatcattcctgtgaagacagtgaaaaacgcctcaggcctagttctccctacagacatggatcttacaaaaatctgcactgggaagggagcggtgactctccgggcctcgtcttcctacagggaaaccccaagcagtagccctgcgagccctcaggaaacccggcaacacgaaagcaaaccagatgagtggaggctttcttccagtgctgatgccaatggaaatgcccagccctcttcactcgctgccaagggctacagaagtgtgcatcccaaccttccttctgacaagtcccaggatgccacttcctccagtgcagcccagccggaggtaatagttgtccctctctacctggttaatactgacagagggcaagaaggcactgccagacctccaacacctctggggcctcttggctgcgtccccacaatcccagcgactgcctctgccgcctcacctctgaccttcccgactctagatgatttcattccccctcatctgcagaggtggccccaccacagccagccagcccgcgcctctggctcctttgcccccattagccagacgccaccatccttctcaccaccacctccgctggtccctcctgccccggaggacctccgcagagtctcggagcctgacctcacgggagctgtttcgagtaccgattccagtcctctactaaatgaagtttcttcttcccttattggaactgattcccaagcctttccatcagttagcaagccttcatccgcctatccctccacaacgattgtcaatcctactattgtgctcttgcaacacaatcgagaacagcaaaaacgactcagtagcctttcagatcctgtctcagaaagaagagtgggagagcaggactcagcaccaacccaggaaaaacccacctcacctggcaaggctattgaaaaaagagcaaaggatgacagtaggcgggtggtgaagagcactcaggacttaagcgatgtttccatggatgaagtgggcatcccactccggaacactgagagatcaaaagactggtacaagactatgtttaaacagatccacaaactgaacagagacactcctgaagaaaacccttatttccctacgtacaaattccctgaacttcctgaaatccagcaaacttccgaagatgatgattcagatctgtactctcccagatactcattttctgaagacacaaaatctcccctttctgtgcctcgctcaaaaagtgagatgagctacattgatggtgagaaggtagtcaagaggtcggccacactacccctcccagcccgctcttcctcactgaagtcaagctcagaaagaaatgactgggaacccccagataagaaagtagacacaagaaaatatcgtgcagagcccaagagcatttacgaatatcagcctggcaagtcttccgttctgaccaacgaaaagatgagtcgggatataagcccagaagagatagatttaaagaatgaaccttggtataaattcttttcggaattggagtttgggaaaccgcctcccaaaaagatatgggattatactcctggagactgctctatccttcctagagaggatagaaagactaatctagacaaagatctcagcctctgccagacagagttagaggcagatttagaaaaaatggagacgcttaataaagcacccagtgcaaacgtgccacagagctcagccatcagccctactccggaaatttcttcagagactcctggatatatatattcttccaacttccatgcagtgaagagggaatcagacggggctcctggggatctcactagcttggagaatgagagacaaatttataaaagtgtcttggaaggtggtgacatccctcttcagggcctgagtgggctcaagcgaccatccagctctgcttccactaaagattcagaatcgccaagacattttataccagctgattacttggaatccacggaagaatttattcgaagacgtcatgatgataaagagaaacttttagcggaccagagacgacttaaacgcgagcaagaagaggctgatattgcagctcgacgccacacaggcgtcattccgacgcaccatcagtttatcactaatgagcgctttggggacctcctcaatatagacgatactgcaaaaaggaaatctgggtcagagatgagacctgccagagccaaatttgactttaaagctcagacactaaaggagcttcctctgcagaagggagatattgtttacatttataagcaaattgatcagaactggtatgaaggagaacaccacggccgggtgggaatcttcccacgcacctacatcgagcttcttcctcctgctgagaaggcacagcccaaaaagttgacaccagtgcaggttttggaatatggagaagctattgctaagtttaactttaatggtgatacacaagtagaaatgtccttcagaaagggtgagaggatcacactgctccggcaggtagatgagaactggtacgaagggaggatcccggggacatcccgacaaggcatcttccccatcacctacgtggatgtgatcaagcgaccactggtgaaaaaccctgtggattacatggacctgcctttctcctcctccccaagtcgcagtgccactgcaagcccacagcaacctcaagcccagcagcgaagagtcacccccgacaggagtcaaacctcacaagatttatttagctatcaagcattatatagctatataccacagaatgatgatgagttggaactccgcgatggagatatcgttgatgtcatggaaaaatgtgacgatggatggtttgttggtacttcaagaaggacaaagcagtttggtacttttccaggcaactatgtaaaacctttgtatctataagaagactgaaaaccatggagattatttttattggaggaggaagcatcattcatgaaccgatctttttagttgagtcagtaggaaaattaatacagtggataaagtaagaagcaaaagacagggacagagaagtgttgtgtttaaaacccaagcctgtctaaggttactgtgtattagacagggccgaactagtgtgctgagcaaaaagaattgaagcaaattgtatttacttagccgcttctgggagccacttcagcctttcccctcccctccacttcttgggtaatctgacctgaagcatagtccaggagcagagttagccagaaatgcctcctgctgccccagccttagagagctcccatctcaatcattgagcctgaaggcttcaagcccaagaatgcaacaagacccccagcctacatttctcagctcccctggagccagctgatcctgtaacgctgctggaggtcagtctgagctaccaagactgtccctagacaaaggtggagtcccccacactgcccaagaccaaatccctcactcaacctgctgaggtgtggatggggaaacagaggcaaaactgaggcacctgatgcattcagcctgctgtgcagcagtgccattgactgccctgatgttcagagagaaacgcacacaaggtttgcccatgagaattggggagcagatggccaagcagataggttatgtctgttttctgagtgatgaagtcaggaagccctgtggctctggaggccacttgtggttcattcttttcccatatccttggcttttagaaatggttaccttcaggacagtgcagctgcatttatcagagcactattgctaagttttcttttctggcttgtgtttttctgggacagtttagaattgggaggcctattctcatagaacaccaaaaatgatgttcagtgattcatttaacatacaccaatgtactctggctgctggggggacaaccataagcaagacatgcccagggtttgccgtggctccagatctactccctgtaggagttcaaggatcacacaaacggtagtaaccagggttgtgaatctgagtacaccctggcaaggcttctcttcagactgaagcagcaattctgccactaccagcagcaaccaggacgtctgttctttgtgggggccagatcagaagagagaggcccctgtgacgcccgggctgcttggtcacaactctgtccaattcaaggatgtttatcggcctctcttagatcctgagtgagacaaatacagaaatgacccattccctgcccaccagaaactcagaggtgattggggagactgacacaggaaaatgaacttaatcaagagagactgtgatatgtgctaagaagggtgtgagggagggagagatgaattttccctggagggatcctagaaagcattgtcatattgccatctccattagctcacttttaaacaactagggtgctggaagaacctttgtctgagggtagttcatagctggaaatacttggaatattttccagagtctctaaactctcatcttcccccacagatacacatccaagctcacaaataggagtagcaattctaggtggtagggttgtgtacggaacccctggctgtctgcatatatctcagaattaccccaggaccattgtcccaaagtctagagtctttacaggtaggcaaaatttgttttcaatgcctgtgcctcagctgctgtcacaaatacccatcttaggatcccatcagcttcccatcccccaccagacagccacagtaccctcactttctccctattgttctttcaaatcctgttctcaggaaagaaactgccactaattcattcacactaaggtgtaaatgattgataataggaatgagttacctcttcccacagacatttgtttttaagtatgacagagcagggccttaatcccaagggaaaaggttatggaactggagggggtgagctttctgggtagaaggagacttcctgaatttccttaaaacccagtaagagtaagacctgttgttttggaaggtctgctccaccatctaagagcactgtttttttttttttgttgttgttgttgttttacggtctctgagggaatatagtaaaaatgcatatgcacgtgcaatttgcacggcagcatttcaccgattgtggactgtattggctaatgtgtttcctggtctttagatgcaaaccattaataacactatcttatctcatagttttttcaggggtgcttcttgattagtagggaattttgaacacctctttaaatacagctagaaaataaaaccaatttgtaaagccacatttgcatatgatgccagcctcacgcatttgtatatctccagaaattcaggtatgcctcaccaatttgcccgtctttaataaaatcttgtgttaaaatttgcatcacgtcgccttcctatgtatgacgaaacaagaaacagagatttccaattgctcttttgtcttcagacatttagtaatataaagtacctatttttatgctgaaatgtttatacaggtttattaatagcaagtgcaactaactggcggcatgccttgcaacacattttgatatattagccatgcttccgggtaaaggcaagccccaaactccttatcttttgcagtctctctgggatcagtaaaagaaaaaaaaaataatgtgcttaagaagtgggactgtaaatatgtatatttaactttgtatagcccatgtacctaccttgtatagaaaaataattttaaaaatttgaatggaagggggtaaaggaagtcatgaagtttttttgcatttttatttaaatgaaggaattccaaataactcacctacagatttttagcacaaaaatagccattgtaaagtgttaaaatttacgataagtattctattggggaggaaaggtaactctgatctcagttacagtttttttttcctttttaatttcattattttgggtttttggtttttgcagtcctatttatctgcagtcgtattaagtcctattgctagaataggttactacaaaaaaggttatattctgaaagaaaaataactgacattatatataaccaattaatttaaagtattgccatttaaattacacactgagagcatgtcctatgcagacatagatttttctgttcatttatttttcttcattgcagtggattgatttgataaatagatgtgttgaattactacatttgctgtacatattatttaataaactttattcagaattgcgtggc

SEQ ID NO: 29489 - DNA, 3459 bp, Homo sapiens
  source 1..3459: mol_type = unassigned DNA
cgcgcgcgccccgacggacggagagcactcgcacgtccctcctctccggcccagccccggcccgcagtccagatccgagacccaaactccgcccgccccgccgcgcgactctcacggtccggcctccggcgcgcgccccttcggcctccctcttcctgcgccggcgcccggcccggcccggcccgtcctgacccggtcacgagggccgcgacggcccgcgcttctccttgcccttcctcctcgagcgcccgcgccaggcagcagccgggcagggatgctcctgcgctcccgggcggcctcgggcccagccacctgctcgccggggaagaggacacgcagaggagcagctggcttgcccggagtcctcccaccttgacccaagcatgcagggcccaccccgcagcctccgcgctgggctcagcctggacgacttcatccctggccacctccagtcccacatagggtcttcctcccgggggacacgggtgcccgtgatccggaatggtggctccaacacccttaatttccagttccacgaccccgcgcccaggactgtgtgcaatgggggctacacaccaagacgagatgcttcccagcacccggaccctgcgtggtatcagacctggccaggccctgggagcaagccctctgcaagcacaaagatccctgcctcccagcacacccagaactggtcagccacgtggaccaaggacagcaagcgtcgggacaagcgctgggtcaagtacgagggaatcgggcccgtggacgagagcggcatgcccattgccccccgatccagcgttgacagacccagagactggtaccggagaatgttccagcagattcaccggaaaatgccagacttgcagctggactggaccttcgaggagccacccagagaccccaggcatctaggagcccagcaaagacctgcccacaggcccggcccggcaacatcttccagtggaagaagctgggaccactctgaagagttacctagaagcaccttcaactacagacctggagcattctccactgtgctgcagccctcaaatcaggtgctcagacgccgggaaaaagtagacaatgtctggacggaagagtcctggaaccagtttctgcaggaactagagactgggcagaggcccaagaaaccgctggtggacgaccctggtgagaagccctcccagcccattgaggtgctgctggagagagagctggccgagctgagcgccgagctggacaaggacctgcgggcaattgagacccgactgccgtcccccaagagctcgccggcgccccgacgggccccggagcagcggcccccggccggcccggcctcagcctggagctccagctacccacatgcaccttacctgggttccgcccggtccctgagtccccacaaaatggctgatggaggaagccccttcctaggtcggagggactttgtctacccttcctcaacccgagaccctagtgcctctaacggagggggcagcccagccaggagggaagagaagaagagaaaggccgccaggctcaagtttgacttccaggcgcagtcccccaaggagctgactctgcagaagggtgacattgtctacatccacaaggaggtggacaagaactggctggagggagagcaccacggccgcctgggcatcttccctgctaattatgtggaggtgctgcccgcagatgagatccctaagcccatcaagcccccgacctaccaggtgctggagtatggagaggctgtggcccagtacaccttcaagggggacctggaggtggagctgtccttccgcaagggagagcacatctgcctgatccgcaaggtgaacgagaactggtacgagggacgcatcacgggcacggggcgccaaggcatattccctgccagctacgtgcaggtgtctcgtgaaccccggctccggctctgtgacgacggcccccagctccccacgtctccccgcctgaccgctgccgcccgctcagcccgtcaccccagctccccctcagccctgcgcagcccagctgaccccatcgacttggggggacagacctccccccgtcgcactggcttctccttccccacccaggagcctagaccccagacccagaatcttggcacccctggtccagctctgtcccactctcgaggtcccagccatcccctggacctggggacctcctctcctaacacctctcagatacactggaccccgtaccgggcgatgtaccagtacaggccccagaacgaagacgagctggagctgcgcgagggggacagggtggatgtcatgcagcagtgtgacgatggctggtttgtgggtgtctcccggaggacccagaaattcggaacgttccctggaaattacgttgccccggtgtgagtggtctccatggcaacttggagccagccaggatggggtggggagcggtggcactcgtgggagggagaggacccccgcccacatcctccttccccaggacctgagctcccagcatctgcagacgacccccgcagcctttccctcggacccccctcgaagccccctggactgattcccacccacgactcacaggcattcctcccacagccctttcatttcctccccaccccactccccaaatacagaggtctgctttgaagcggagaccatttccaggccttattgagaccagaccccaagtcccccacccccatcctgctccagcgtttcctctaacagggaccagctctccgctttgcccccacggggttcctctaaccagaaccagcttcctagcctcgtagagaccaaaggccgcccccgcctgctggggttcctcccagcaccccagcttgctggctgccctctttgccttctggcctccagctgggtgtgggggggcggagcaaggcgggggacagacgcagcaccttcttagcgatctaggcctggcaagagctctggccccaaggcctcctcttcccaggggctgccaagtcctggccctggccctggcatatcaccccgcactgtggggccaggcaccactagcctggctcaaatattccccagggagactgctgtgtgctgcccgcctgcctgctggctctcccccagccccacatcccctctggaagagaatgtaaaataaacctggacacaagggaccttgtctctgcggccttttccttggggtaggggatgcctcctcctgtctaggagatgggaattccttctgtggagggctgtgctgggagacaggtgggacaggtgtgtgtgtaagaggaggaggatggaaaaacaccattattacctccaaagatctctgcccttgggtgtcaggcaggttgcggcagcccccacaattgggcagctgtgtggcaagaagtgctgggagaatgaacagtgccaggccctggtagcagggagacaccagagatgggggactgaatgtggcctt

SEQ ID NO: 29490 - DNA, 2039 bp, Homo sapiens
  source 1..2039: mol_type = unassigned DNA
cccgccccgctcccgggatcggccgcgcgggcgcctctaggaccccgcgtcccgcccgctctcctcccctcccgagccgcgaacttttccggaggcggcggcctcggctgccgctgggtcccggggtcgcgggccctgattgcgccgtttccccgcgcagagctcgccggcgccccgacgggccccggagcagcggcccccggccggcccggcctcagcctggagctccagctacccacatgcaccttacctgggttccgcccggtccctgagtccccacaaaatggctgatggaggaagccccttcctaggtcggagggactttgtctacccttcctcaacccgagaccctagtgcctctaacggagggggcagcccagccaggagggaagagaagaagagaaaggccgccaggctcaagtttgacttccaggcgcagtcccccaaggagctgactctgcagaagggtgacattgtctacatccacaaggaggtggacaagaactggctggagggagagcaccacggccgcctgggcatcttccctgctaattatgtggaggtgctgcccgcagatgagatccctaagcccatcaagcccccgacctaccaggtgctggagtatggagaggctgtggcccagtacaccttcaagggggacctggaggtggagctgtccttccgcaagggagagcacatctgcctgatccgcaaggtgaacgagaactggtacgagggacgcatcacgggcacggggcgccaaggcatattccctgccagctacgtgcaggtgtctcgtgaaccccggctccggctctgtgacgacggcccccagctccccacgtctccccgcctgaccgctgccgcccgctcagcccgtcaccccagctccccctcagccctgcgcagcccagctgaccccatcgacttggggggacagacctccccccgtcgcactggcttctccttccccacccaggagcctagaccccagacccagaatcttggcacccctggtccagctctgtcccactctcgaggtcccagccatcccctggacctggggacctcctctcctaacacctctcagatacactggaccccgtaccgggcgatgtaccagtacaggccccagaacgaagacgagctggagctgcgcgagggggacagggtggatgtcatgcagcagtgtgacgatggctggtttgtgggtgtctcccggaggacccagaaattcggaacgttccctggaaattacgttgccccggtgtgagtggtctccatggcaacttggagccagccaggatggggtggggagcggtggcactcgtgggagggagaggacccccgcccacatcctccttccccaggacctgagctcccagcatctgcagacgacccccgcagcctttccctcggacccccctcgaagccccctggactgattcccacccacgactcacaggcattcctcccacagccctttcatttcctccccaccccactccccaaatacagaggtctgctttgaagcggagaccatttccaggccttattgagaccagaccccaagtcccccacccccatcctgctccagcgtttcctctaacagggaccagctctccgctttgcccccacggggttcctctaaccagaaccagcttcctagcctcgtagagaccaaaggccgcccccgcctgctggggttcctcccagcaccccagcttgctggctgccctctttgccttctggcctccagctgggtgtgggggggcggagcaaggcgggggacagacgcagcaccttcttagcgatctaggcctggcaagagctctggccccaaggcctcctcttcccaggggctgccaagtcctggccctggccctggcatatcaccccgcactgtggggccaggcaccactagcctggctcaaatattccccagggagactgctgtgtgctgcccgcctgcctgctggctctcccccagccccacatcccctctggaagagaatgtaaaataaacctggacacaaggg

SEQ ID NO: 29491 - DNA, 2569 bp, Homo sapiens
  source 1..2569: mol_type = unassigned DNA
ctccacgctagcgccgcccaggctggcacaaaggaggaagcctagtcccgcccctgcgtgcggcgcttctcccaggccccaccttccatccagtgccctggaccctcggctgggtagcgccaccagagcgaccaaacgtcccgcgccttccaggccgcactccagagccaaaagagctccatggcggcggcggccaagcccaacaacctttccctggtggtgcacggaccgggggacttgcgcctggagaactatcctatccctgaaccaggcccaaatgaggtcttgctgaggatgcattctgttggaatctgtggctcagatgtccactactgggagtatggtcgaattgggaattttattgtgaaaaagcccatggtgctgggacatgaagcttcgggaacagtcgaaaaagtgggatcatcggtaaagcacctaaaaccaggtgatcgtgttgccatcgagcctggtgctccccgagaaaatgatgaattctgcaagatgggccgatacaatctgtcaccttccatcttcttctgtgccacgccccccgatgacgggaacctctgccggttctataagcacaatgcagccttttgttacaagcttcctgacaatgtcacctttgaggaaggcgccctgatcgagccactttctgtggggatccatgcctgcaggagaggcggagttaccctgggacacaaggtccttgtgtgtggagctgggccaatcgggatggtcactttgctcgtggccaaagcaatgggagcagctcaagtagtggtgactgatctgtctgctacccgattgtccaaagccaaggagattggggctgatttagtcctccagatctccaaggagagccctcaggaaatcgccaggaaagtagaaggtcagctggggtgcaagccggaagtcaccatcgagtgcacgggggcagaggcctccatccaggcgggcatctacgccactcgctctggtgggaacctcgtgcttgtggggctgggctctgagatgaccaccgtacccctactgcatgcagccatccgggaggtggatatcaagggcgtgtttcgatactgcaacacgtggccagtggcgatttcgatgcttgcgtccaagtctgtgaatgtaaaacccctcgtcacccataggtttcctctggagaaagctctggaggcctttgaaacatttaaaaagggattggggttgaaaatcatgctcaagtgtgaccccagtgaccagaatccctgatgttaatgggctctgccctcatccccacagtcttgggatctcagggcacaatggctggacatgggtgggctctgatgcagaactttctcttttgaatgttaagaataactaatacaattcattgtgaacagaagtccttaagcagaggaattggtgtgccttaaagatacaatctgggatagtttgggggaacttgtagccagaatgccctgttcatgctgagcaaagttcagcaagtagagcagagtttggcaggcaggtgccaggaactccccttcttcctggagtgccttcattgaggaaggaaatctggcccttgggtttcctggttccactgctactgacccagaggggaatgagggctgagttatgaaaagataacttcatgaagacttaactggcccagaagctgattttcatgaaaatctgccactcagggtctgggatgaaggcttgtcagcacttccagtttagaacgcaatgtttctagagacatattggctgtttgttttgatgataaaaggagaataagaaaaggcatcactttcctggatccaggataatttttaaaccaatcaaatgaaaaaaacaaacaaacaaaaaaggaaatgtcatgtgaggttaaaccagtttgcattcccctaatgtggaaaaagtaagaggactactcagcactgtttgaagattgcctcttctacagcttctgagaattgtgttatttcacttgccaagtgaaggaccccctccccaacatgccccagcccacccctaagcatggtcccttgtcaccaggcaaccaggaaactgctacttgtggacctcaccagagaccaggagggtttggttagctcacaggacttcccccaccccagaagattagcatcccatactagactcatactcaactcaactaggctcatactcaattgatggttattagacaattccatttctttctggttattataaacagaaaatctttcctcttctcattaccagtaaaggctcttggtatctttctgttggaatgatttctatgaacttgtcttattttaatggtgggttttttttctggtaagatttagacctaaatcgcatcatgccaacttgtgactttgagactattcatcaagaatgaggatatagtagccatgacatagcttgagctatagcctttaattccttactttggctatgggtggagggtgagtttgaagaggttctgattttcttgtaacctgggaaagccatgaccttgtgcccgattctttcagattgctttgggtaataaatattggtggtggtatctgactca

SEQ ID NO: 29492 - DNA, 2010 bp, Homo sapiens
  source 1..2010: mol_type = unassigned DNA
gggcggagaggcctggcgcacagggcgagggcggctgcggcgcagtctgcagcatggcgtacccggggcatcctggcgccggcggcgggtactacccaggcgggtatggaggggctcccggagggcctgcgtttcccggacaaactcaggatccgctgtatggttactttgctgctgtagctggacaggatgggcagatagatgctgatgaattgcagagatgtctgacacagtctggcattgctggaggatacaaaccttttaacctggagacttgccggcttatggtttcaatgctggatagagatatgtctggcacaatgggtttcaatgaatttaaagaactctgggctgtactgaatggctggagacaacactttatcagttttgacactgacaggagtggaacagtagacccacaagaattgcagaaggccctgacaacaatgggatttaggttgagtccccaggctgtgaattcaattgcaaaacgatacagcaccaatggaaagatcaccttcgacgactacatcgcctgctgcgtcaaactgagggctcttacagacagctttcgaagacgggatactgctcagcaaggtgttgtgaatttcccatatgatgatttcattcaatgtgtcatgagtgtttaaatcaagaggaagctgcatgaatgtaatcaacattccaactggagctctcctttgcttgtcctctttgccttcggtaatatgtataaacttacatcacgactttctcttaacagctgttgtaaagtttattactttatgtacaactgaagttttgttttagttttgataataaattctttggaactttaataagatctagtctgttacaccatttagaactttcctgagccattatcagtcatgccttattttcttgctaaaactctatgtaaatttaagtatgcaaaatgtttaagtcacattatttatttttcattgtgagacactaaaaactgttaatcagactacagctgttatctttcctctcctacaaagaatactccacacataaaaacttaggtaaatgacatagacgcacttgggtgaaataaaacaacaaaaaaggtaatccagtaatccacgtcaggattcaccttagaagtttagcacacgcccttcaaaacctgttgaataatttgattggcaaatactatctgtcaccaagtccctttttgtcatctatttaaacctttgttaactctccttaaaaatcttgtacattataagcttaactatataaaaagaaaattgatagaaaaagactaagggaatatatggaaatattaacaatgtttattttggatgaatggaattctagatgactttaattttctttatatcagtatttttcagattttctatatgctttccttttaaaatcagattttagtttttaaaatactgatacatccattttgatataccatgtattcacactttaaaaaatacacatagcagagtatcggaaagtatgtaccaaaacattgatctggctaccactgggagtcaggatcatgagttcatcttcttccttcttactgcttttccaaacattctccagtaagcaggtactacatttataatggaaggaattttttaaaaaattttaagctgtacactttcaagtaagatctgaattctaatgctggcttgtgcctcttactatgtggtttggtcattatagataatgcccagtttcagtttccccatctttgaaaaggagataatatgttatctcttgggagtagttctgaatatgaagtgtgttgatacaagaagcactgacaatgtttctgtttcttaaatttaaaactggcctggtttgccttttttatcaagagagcttaacagataaaaaatgaaattagtctattttctacttgccagcagagtatctgtcttattttaggatgcagtgtgaaacttaccattcaactgaacaactagttgtcaactaatgaaaataaaacattttctctaa

SEQ ID NO: 29493 - DNA, 653 bp, Homo sapiens
  source 1..653: mol_type = unassigned DNA
gattcttctatttggccactctgcaagaaggcaatcctctaaggatcaccagcttctacctataagacttcaactcaagatgcagtatggaggggctcccggagggcctgcgtttcccggacaaactcaggatccgctgtatggttactttgctgctgtagctggacaggatgggcagatagatgctgatgaattgcagagatgtctgacacagtctggcattgctggaggatacaaaccttttaacctggagacttgccggcttatggtttcaatgctggatagagatatgtctggcacaatgggtttcaatgaatttaaagaactctgggctgtactgaatggctggagacaacactttatcagttttgacactgacaggagtggaacagtagacccacaagaattgcagaaggccctgacaacaatgggatttaggttgagtccccaggctgtgaattcaattgcaaaacgatacagcaccaatggaaagatcaccttcgacgactacatcgcctgctgcgtcaaactgagggctcttacagacagctttcgaagacgggatactgctcagcaaggtgttgtgaatttcccatatgatgatttcattcaatgtgtcatgagtgtttaaatcaagaggaagctgcatgaat

SEQ ID NO: 29494 - DNA, 1418 bp, Homo sapiens
  source 1..1418: mol_type = unassigned DNA
actctgcaagaaggcaatcctctaaggatcaccagcttctacctataagacttcaactcaagatgcagtatggaggggctcccggagggcctgcgtttcccggacaaactcaggatccgctgtatggttactttgctgctgtagctggacaggatgggcagatagatgctgatgaattgcagagatgtctgacacagtctggcattgctggaggatacaaaccttttaacctggagacttgccggcttatggtttcaatgctggatagagatatgtctggcacaatgggtttcaatgaatttaaagaactctgggctgtactgaatggctggagacaacactttatcagttttgacactgacaggagtggaacagtagacccacaagaattgcagaaggccctgacaacaatgggatttaggttgagtccccaggctgtgaattcaattgcaaaacgatacagcaccaatggaaagatcaccttcgacgactacatcgcctgctgcgtcaaactgagggctcttacagacagctttcgaagacgggatactgctcagcaaggtgttgtgaatttcccatatgatgatgtaagtcttagaaattaagagatacagtagatgaaaaggatgtacaccagatgggtatccctttgaaattagctgttaagaatatcttaaggttaaggatgccagagacataagggattcaaaagttagaaagagttatcatccagaatttattaatttcatttattagtcttaactatagtgagaccatgatttgatttgcattcagagacctgggttcaagacccagcttgttgtatttattagctgggtcacttaagcaggtttcttaattgctgtgacactatatgaataaagaagatatagtagtaatgcctttttcactgagccattgtaagatttctattagaaatgcccttgaaaaacactatgcagatatactatctgcttttgtcttctgtaaacaaatcatgtcagtcactgagaatagataacagctcaatagttttgcatacctatgttcttcattgagggcataaggcaggcaacaacttaaatcacaattttttttttttttttgagatggagtctcgctctgttgcccaggttggagtgcagtggcgcaatgtcagctcactgcaacctccacgtctcgggttctagcgattctcctgcctcagcctcctgagggactataggcatgtgccaccatacctggttaagtttttttgtatttttagtagagacggggtttcactgtgttagccaggatggtctcgatctcctgtccttgtgatctgtccgcttaggcctcccaaagtgctgggattacaggcgtgagccactgctcccggctaaatcacaatttaaaacaagttatttactaaacag

SEQ ID NO: 29495 - DNA, 10889 bp, Homo sapiens
  source 1..10889: mol_type = unassigned DNA
cccggagcggcgcgggcggcctggagccccgggagcggcgcgcgcggtcccggcccagcggctctcctggcctcgcgctgcacattctctcctggcggcggcgccacctgcagtagcgttcgcccgaacatggcgacacggagcagcaggagggagtcgcgactcccgttcctattcaccctggtcgcactgctgccgcccggagctctctgcgaagtctggacgcagaggctgcacggcggcagcgcgcccttgccccaggaccggggcttcctcgtggtgcagggcgacccgcgcgagctgcggctgtgggcgcgcggggatgccaggggggcgagccgcgcggacgagaagccgctccggaggaaacggagcgctgccctgcagcccgagcccatcaaggtgtacggacaggttagtctgaatgattcccacaatcagatggtggtgcactgggctggagagaaaagcaacgtgatcgtggccttggcccgagatagcctggcattggcgaggcccaagagcagtgatgtgtacgtgtcttacgactatggaaaatcattcaagaaaatttcagacaagttaaactttggcttgggaaataggagtgaagctgttatcgcccagttctaccacagccctgcggacaacaagcggtacatctttgcagacgcttatgcccagtacctctggatcacgtttgacttctgcaacactcttcaaggcttttccatcccatttcgggcagctgatctcctcctacacagtaaggcctccaaccttctcttgggctttgacaggtcccaccccaacaagcagctgtggaagtcagatgactttggccagacctggatcatgattcaggaacatgtcaagtccttttcttggggaattgatccctatgacaaaccaaataccatctacattgaacgacatgaaccctctggctactccactgtcttccgaagtacagatttcttccagtcccgggaaaaccaggaagtgatccttgaggaagtgagagattttcagcttcgggacaagtacatgtttgctacaaaggtggtgcatctcttgggcagtgaacagcagtcttctgtccagctctgggtctcctttggccggaagcccatgagagcagcccagtttgtcacaagacatcctattaatgaatattacatcgcagatgcctccgaggaccaggtgtttgtgtgtgtcagccacagtaacaaccgcaccaatttatacatctcagaggcagaggggctgaagttctccctgtccttggagaacgtgctctattacagcccaggaggggccggcagtgacaccttggtgaggtattttgcaaatgaaccatttgctgacttccaccgagtggaaggattgcaaggagtctacattgctactctgattaatggttctatgaatgaggagaacatgagatcggtcatcacctttgacaaagggggaacctgggagtttcttcaggctccagccttcacgggatatggagagaaaatcaattgtgagctttcccagggctgttcccttcatctggctcagcgcctcagtcagctcctcaacctccagctccggagaatgcccatcctgtccaaggagtcggctccaggcctcatcatcgccactggctcagtgggaaagaacttggctagcaagacaaacgtgtacatctctagcagtgctggagccaggtggcgagaggcacttcctggacctcactactacacatggggagaccacggcggaatcatcacggctattgcccagggcatggaaaccaacgagctaaaatacagtaccaatgaaggggagacctggaaaacattcatcttctctgagaagccagtgtttgtgtatggcctcctcacagaacctggggagaagagcactgtcttcaccatctttggctcgaacaaagagaatgtccacagctggctgatcctccaggtcaatgccacggatgccttgggagttccctgcacagagaatgactacaagctgtggtcaccatctgatgagcgggggaatgagtgtttgctgggacacaagactgttttcaaacggcggaccccccatgccacatgcttcaatggagaggactttgacaggccggtggtcgtgtccaactgctcctgcacccgggaggactatgagtgtgacttcggtttcaagatgagtgaagatttgtcattagaggtttgtgttccagatccggaattttctggaaagtcatactcccctcctgtgccttgccctgtgggttctacttacaggagaacgagaggctaccggaagatttctggggacacttgtagcggaggagatgttgaagcgcgactggaaggagagctggtcccctgtcccctggcagaagagaacgagttcattctgtatgctgtgaggaaatccatctaccgctatgacctggcctcgggagccaccgagcagttgcctctcaccgggctacgggcagcagtggccctggactttgactatgagcacaactgtttgtattggtccgacctggccttggacgtcatccagcgcctctgtttgaatggaagcacagggcaagaggtgatcatcaattctggcctggagacagtagaagctttggcttttgaacccctcagccagctgctttactgggtagatgcaggcttcaaaaagattgaggtagctaatccagatggcgacttccgactcacaatcgtcaattcctctgtgcttgatcgtcccagggctctggtcctcgtgccccaagagggggtgatgttctggacagactggggagacctgaagcctgggatttatcggagcaatatggatggttctgctgcctatcacctggtgtctgaggatgtgaagtggcccaatggcatctctgtggacgaccagtggatttactggacggatgcctacctggagtgcatagagcggatcacgttcagtggccagcagcgctctgtcattctggacaacctcccgcacccctatgccattgctgtctttaagaatgaaatctactgggatgactggtcacagctcagcatattccgagcttccaaatacagtgggtcccagatggagattctggcaaaccagctcacggggctcatggacatgaagattttctacaaggggaagaacactggaagcaatgcctgtgtgcccaggccatgcagcctgctgtgcctgcccaaggccaacaacagtagaagctgcaggtgtccagaggatgtgtccagcagtgtgcttccatcaggggacctgatgtgtgactgccctcagggctatcagctcaagaacaatacctgtgtcaaacaagagaacacctgtcttcgcaaccagtatcgctgcagcaacgggaactgtatcaacagcatttggtggtgtgactttgacaacgactgtggagacatgagcgatgagagaaactgccctaccaccatctgtgacctggacacccagtttcgttgccaggagtctgggacttgtatcccactgtcctataaatgtgaccttgaggatgactgtggagacaacagtgatgaaagtcattgtgaaatgcaccagtgccggagtgacgagtacaactgcagttccggcatgtgcatccgctcctcctgggtatgtgacggggacaacgactgcagggactggtctgatgaagccaactgtaccgccatctatcacacctgtgaggcctccaacttccagtgccgaaacgggcactgcatcccccagcggtgggcgtgtgacggggatacggactgccaggatggttccgatgaggatccagtcaactgtgagaagaagtgcaatggattccgctgcccaaacggcacttgcatcccatccagcaaacattgtgatggtctgcgtgattgctctgatggctccgatgaacagcactgcgagcccctctgtacgcacttcatggactttgtgtgtaagaaccgccagcagtgcctgttccactccatggtctgtgacggaatcatccagtgccgcgacgggtccgatgaggatgcggcgtttgcaggatgctcccaagatcctgagttccacaaggtatgtgatgagttcggtttccagtgtcagaatggagtgtgcatcagtttgatttggaagtgcgacgggatggatgattgcggcgattattctgatgaagccaactgcgaaaaccccacagaagccccaaactgctcccgctacttccagtttcggtgtgagaatggccactgcatccccaacagatggaaatgtgacagggagaacgactgtggggactggtctgatgagaaggattgtggagattcacatattcttcccttctcgactcctgggccctccacgtgtctgcccaattactaccgctgcagcagtgggacctgcgtgatggacacctgggtgtgcgacgggtaccgagattgtgcagatggctctgacgaggaagcctgccccttgcttgcaaacgtcactgctgcctccactcccacccaacttgggcgatgtgaccgatttgagttcgaatgccaccaaccgaagacgtgtattcccaactggaagcgctgtgacggccaccaagattgccaggatggccgggacgaggccaattgccccacacacagcaccttgacttgcatgagcagggagttccagtgcgaggacggggaggcctgcattgtgctctcggagcgctgcgacggcttcctggactgctcggacgagagcgatgaaaaggcctgcagtgatgagttgactgtgtacaaagtacagaatcttcagtggacagctgacttctctggggatgtgactttgacctggatgaggcccaaaaaaatgccctctgcttcttgtgtatataatgtctactacagggtggttggagagagcatatggaagactctggagacccacagcaataagacaaacactgtattaaaagtcttgaaaccagataccacgtatcaggttaaagtacaggttcagtgtctcagcaaggcacacaacaccaatgactttgtgaccctgaggaccccagagggattgccagatgcccctcgaaatctccagctgtcactccccagggaagcagaaggtgtgattgtaggccactgggctcctcccatccacacccatggcctcatccgtgagtacattgtagaatacagcaggagtggttccaagatgtgggcctcccagagggctgctagtaactttacagaaatcaagaacttattggtcaacactctatacaccgtcagagtggctgcggtgactagtcgtggaataggaaactggagcgattctaaatccattaccaccataaaaggaaaagtgatcccaccaccagatatccacattgacagctatggtgaaaattatctaagcttcaccctgaccatggagagtgatatcaaggtgaatggctatgtggtgaaccttttctgggcatttgacacccacaagcaagagaggagaactttgaacttccgaggaagcatattgtcacacaaagttggcaatctgacagctcatacatcctatgagatttctgcctgggccaagactgacttgggggatagccctctggcatttgagcatgttatgaccagaggggttcgcccacctgcacctagcctcaaggccaaagccatcaaccagactgcagtggaatgtacctggaccggcccccggaatgtggtttatggtattttctatgccacgtcctttcttgacctctatcgcaacccgaagagcttgactacttcactccacaacaagacggtcattgtcagtaaggatgagcagtatttgtttctggtccgtgtagtggtaccctaccaggggccatcctctgactacgttgtagtgaagatgatcccggacagcaggcttccaccccgtcacctgcatgtggttcatacgggcaaaacctccgtggtcatcaagtgggaatcaccgtatgactctcctgaccaggacttgttgtatgcagttgcagtcaaagatctcataagaaagactgacaggagctacaaagtaaaatcccgtaacagcactgtggaatacacccttaacaagttggagcctggcgggaaataccacatcattgtccaactggggaacatgagcaaagattccagcataaaaattaccacagtttcattatcagcacctgatgccttaaaaatcataacagaaaatgatcatgttcttctgttttggaaaagcctggctttaaaggaaaagcattttaatgaaagcaggggctatgagatacacatgtttgatagtgccatgaatatcacagcttaccttgggaatactactgacaatttctttaaaatttccaacctgaagatgggtcataattacacgttcaccgtccaagcaagatgcctttttggcaaccagatctgtggggagcctgccatcctgctgtacgatgagctggggtctggtgcagatgcatctgcaacgcaggctgccagatctacggatgttgctgctgtggtggtgcccatcttattcctgatactgctgagcctgggggtggggtttgccatcctgtacacgaagcaccggaggctgcagagcagcttcaccgccttcgccaacagccactacagctccaggctggggtccgcaatcttctcctctggggatgacctgggggaagatgatgaagatgcccctatgataactggattttcagatgacgtccccatggtgatagcctgaaagagctttcctcactagaaaccaaatggtgtaaatattttatttgataaagatagttgatggtttattttaaaagatgcactttgagttgcaatatgttatttttatatgggccaaaaacaaaaaacaaaaaaaaaaaaaaggaaagaaaggaatgaataaactttgtagtaatcaactgtgaacttcaaaccaggttgattttagtaacccaattgctttgatttgacattaatgtagtcttacagggctgtgcttgctgggcatgcttttacgtctgtgagataatttcggttcagtaaattggccaatctttttatttttctaagacacagaaatgtatttaataaaaacctcgagagagtgatgggtggaaccccttctccttgaaagtgtgtacagatattccattttgtttggatatagtttataggaaagtgtgtggatgtattatggcggaaggtttctttatgttattttgttaatttattgggactctgtgtaaggccaggctttagtggtcattagacaccacatgtgttatgagccccttacccatagggttgggggtgggaagagaagcatatttttttgccattccggaagcaatccatttttattcacttgtgtgtcatgtaatggtctttggcaggagagagcactgagtcattgctggagttcagttcaacagagctgcagcttgggaagccctgtaagcccacagcttcctctcttatattaattgatggaattttactgtatgtgcctctgtacaagatgtagctttgagagctacaaaatgataacactgctttattacacactggtttcattgtcattgcaaaaacttaccctggttgtgggggagagttctagatctgtgccatgatccatacactggctaatagagtacataatttttccattttccattttttgtttttacttactactgaaggatctcagatgtaaaattatgtatttggtttgagatggccacttattgtccttaaaaatccatactgatatatgcagtcattttgaattggacagtgccttctctttttttttctcctcttcttccatctccctcacccatgcccccacccaatctaaagagacagtgctgtacattctcatagagatagagaagatctaaaaagttgagactactcaatccagttaacaacagcaggagcactagagtttgttcatttattctctctgtaaaacaagctgtgctttttttcttctgcctttaaaatgccacccgtgtattcaaaccatggccacttgatacttatgtagaatccatcgtgggctgatgcaagccctttatttaggcttagtgttgtgggcaccaatgtcgagcatcgttgtgacttgtgctgtatgattctcactgaagaatttcctttcagccaagaagcagtgaggtctgggaatattccaaagtcatgtctctgaatatgtgtccttgacgtgcaagctttgtaaaaccccatccccgcttaggtgcgaggcatcaccttctcacaagtgtttagtttcttttaaccacaagtatcattcttgggtgataatatagtttcattctacttagggattgtttagaaaacaaagaaagagccaattaaattttttagtttttgaaatttttatttatatgtatacttagatgagtattttaagctgtcgacctttagtttgccatacgggtaggactgtatttcatgttaacaactggtggtaatgataagccttcttctagcgtattttctcttctttcctgtcactttcctaagtttttttttttaaagactggaattttttttggctttatcttgtcttaccgtagagatttgttcaaaactctaagccctaccacctcccctttaataagctctttaaatagttgaatcattaacaacctggtgggaggcaagtcatttaattgaaccactaggaagtgtattttcttttctttttctgccaactttttggtggcatttgtaaaagctgatataaaaggctctgagatgttattttcagttattccataggcaagcctttttacagagcatatgtctccagttggcagcttgagatatttccgagcatccggttctagctaccagtgcctcccaatgcttagtgcacagtactgtagactggccatcacccctctccttggaaaatgccactgtgctgtttgaaaaaaagcagccttttagggctagagtattttatataaacagaagagctaagttcctgaagactaagctagatagctgcagctatatgtaaattgtatatttttatgaacttttgaagcacacactcctgtttccctctgtgtagctttgtggggatttcatgtatatatgctgtctgaaagaatccagaggttggagtgccaatagaaaatgaaaacaaatgccttgtactacaggcagcctctgaaggtgaccacataactgtcttcactgtgaccaatcggagtccctgcttgcttgtgaagaaggggcttttgtaccttgttggagatgccacctcagaagttcacactgtgcaggaaaaaggttttattctctcctggcatacattagaatgtcagatgcttgcatccatgtggaccacgatgggcctctaaaaattggtgggcagggggtttgcttatgagttttctctggaaaccgattttactcctggatgtattgaatgccccttgagctttatgagatacgagtccacatggataaaatgttagagagtggagttctacagaggattccaggaagaggccatgtctgtgcagtcctagttccagacaggtgagaagctccaggaactactggctaccttgacaagctgggtaaatagttatcattctgggtaactggttgaaactctgacttttggacaagtaattcctggggttctgtctttggtagcatcaccagggatatttgggtgggacagacagaagacacacagctgcctgttctctcctgcccatcatgtttggcccactagatgaagctgtactcagcaatttagggaatgtaacccttctcagaactggccattttcaggggaagcttgggagagcaatagtatggtgagccccttagagatgagcgcctactccttcttggcgaatgctgccttcagatgcttaccaagtggtcactgcatctagtaagattatatttccagtacacttccttagggcagaaacaccatcctatcaggtttggtcagtcccttcttcatgaagggagtcatggggaattcctgaaaattttcttccttctgcagacagttggatgagtcccttagagaaggcatccagagacataactaaactgaatatcatcccatattgattttaggaattgactctaaaactctgtgcagaatcttgtgttgggattgtatcttgacattcctgttgtgttatttttcttaactggagtgtgtgctgcctttcaggtacaatttttgtgtaataaaagccagtgcattaagtttatatagactactttctatgcaagactgagatatggaatagataggaagagatatgtactgctgggtacatggacagtaagtgtgttttcagatggagtaccagcaccgaaaatgggttgagggaggatgggttgtatgtatgtttctgcccactaattttgagcagccatattatgaattaaatcgtcacagccaagtaataacccaagaatggtatgagtttcatgtgtaatagctcaaatggaataagcatgaatgctggagtggaccattatcctcaaatattctatgtcacttctcatttaaagactcttgttatgaactattagaaactttaggcaaaatcaaaagtatttgcggcaaaataaaggcctattctactcttatttaaagtgaaacactgtatacttgtttctctccaaagcgaaattaagtatttataatttcaattgcctcgataagtttccaagtcactgaaatctgctgaaggttttactgtattgttgcacaactttaagataatttttgtctcaatgtcaacttttttcactgaataaaaatttaactgggtcaagaaaaca

SEQ ID NO: 29496 - DNA, 3751 bp, Homo sapiens
  source 1..3751: mol_type = unassigned DNA
ctcccgcgatgggaaaagttggcgccggcggcggctcccaagcccggctgagcgcgctcctcgccggcgcggggctcttgatcctctgcgccccgggcgtctgcggcggcggctcctgctgcccctcgccgcaccccagctccgctccacgctcggcctcgacccctaggggcttttcccaccaggggcggccaggcagggctcctgccacgcccctgcccctcgtagtgcgtcccctgttctcagtggcccccggggaccgagcgctatccctggagcgggctcggggcactggggcatccatggcggttgctgcacgctccggccggaggagacggagcggagcggatcaggagaaggcagaacggggagagggcgcgagtcggagcccccggggagtgctaagagatggagggcagcaggagcctgggactcgggagcgggacccggacaaagccacccgcttccggatggaggagctgagactgaccagcaccacgtttgcgctgacgggagactcagcacacaaccaagccatggtccactggtctggccacaacagcagcgtgattctcattttgacaaagctctatgactataacctggggagcatcacagagagctcgctttggaggtcaaccgattatggaacaacctatgagaagctgaatgataaagttggtttgaaaaccattttgagctatctctatgtgtgtcctaccaacaagcgtaagataatgttactcacagacccggagattgagagcagtttattgatcagctcagatgaaggggcaacttatcaaaagtaccggctgaacttctacattcaaagcttgctttttcaccccaaacaagaagactggattctggcatacagtcaagaccaaaagttatacagctctgctgaatttgggagaagatggcagcttatccaagaaggggttgtaccaaacaggttctactggtctgtgatggggtcaaataaagaaccagaccttgtgcatcttgaggccagaactgtggatggtcattcacattatctaacttgccgaatgcagaactgtacagaggccaacaggaatcagccttttccaggctacattgacccagactctttgattgttcaggatcattatgtgtttgttcagctgacatcaggagggcggccacattactacgtgtcctaccgaaggaatgcatttgcccaaatgaagcttccgaaatatgctttgcccaaggacatgcatgttatcagcaccgatgagaatcaggtgttcgcagcggtccaagaatggaaccagaatgacacgtacaacctctacatctcagacacacgtggtgtctacttcaccctggccttggagaatgtccagagcagcagaggccctgagggcaacatcatgatcgacctctatgaggtagcagggataaagggaatgttcttggctaacaagaagattgacaaccaagtgaagactttcatcacatataacaaaggcagagactggcgtttgctgcaggcgccggacacggatctaaggggggaccccgtgcactgcttgctgccctattgctcactacaccttcacctgaaggtctctgagaatccctacacatcagggatcattgccagcaaagacacagctccaagcatcatagtggcatcaggtaatataggttctgaattgtcagacactgacatcagcatgtttgtctcttcagatgcagggaacacctggagacagatctttgaagaagagcacagtgttttgtacctggatcaaggtggagtcctggttgctatgaaacacacatctctcccaattcgacatctttggttgagttttgatgaagggagatcttggagcaaatacagtttcacatctattccactttttgtggatggggttctgggtgagcctggagaagagactctcatcatgacagtgtttggacacttcagccaccgctctgaatggcagctggtcaaagtagattacaagtccatttttgatagacggtgtgccgaagaggactacagaccttggcagctgcacagccagggggaagcatgtatcatgggagcaaaaaggatatataagaagcgaaaatcagagcggaagtgtatgcaaggaaaatatgcaggagctatggaatctgaaccctgtgtctgcactgaggctgattttgattgcgactatggttatgagcgacacagcaatggccagtgcctgccggcattttggttcaatccatcctctctgtcaaaggattgcagcttgggacagagttacctcaatagtactgggtacaggaaggtggtttccaataattgcactgatggcgtaagggaacagtacactgccaaaccgcagaagtgcccagggaaagccccgcgggggctgcggatagtcacggctgatggaaagctgacagcggaacaaggacacaacgtcactctcatggtgcaattagaagagggtgatgttcagcggacactcatccaagtggactttggcgatggtatcgcggtgtcttacgtcaatctcagctccatggaagatgggatcaaacacgtctatcagaacgtgggcattttccgtgtgaccgtgcaggtggacaacagtctgggttctgacagcgccgtcctgtacttacatgtaacttgtcccttggagcacgtgcacctgtctcttccctttgtcaccacaaagaacaaagaggtcaatgcgacggcagtgctgtggcccagccaagtgggcaccctcacttacgtgtggtggtacggaaacaacacggagcctttgatcaccttggagggaagcatatccttcagatttacttcagaaggaatgaataccatcacagtgcaggtctcagctgggaatgccatcctacaagacacaaagaccatcgcagtatatgaggaattccggtctcttcgcttgtccttttctccaaacctggatgactacaacccggacatccctgagtggaggagggacatcggtcgagtcatcaaaaaatccctggtggaagccacaggggttccaggccagcacatcctggtggcggtgctccctggcttacccaccactgctgaactctttgtcctaccctatcaggatccagctggagaaaacaaaaggtcaactgatgacctggagcagatatcagaattgctgatccacacgctcaaccaaaactcagtacacttcgagctgaagccaggagtccgagtccttgtccatgctgctcacttaacagcggcccccctggtggacctcactccaacccacagtggatctgccatgctgatgctgctctcagtggtgtttgtggggctggcagtgttcgtcatctacaagtttaaaaggagagtagctttaccctcccctccctccccttctactcaacctggtgactcatctctccgattgcaaagagcaagacacgccactccgccttcaacgccaaagcggggatctgctggggcacagtatgcaatttaaggaaaacccccaaaggctacaggcgacctgctgatcaggaaagaatttcgctcttgtcaagtacatcatccttcatgaccactaactttgtgttttttttctttcctttgttgttctgtttcctattttgccaggaagtatttccatagttgctgagaatcaaagcacaaaagaaatccctacctatgtaaatgtttgaatggaggacgccagtaaaaaaacaaaaacaaaaacaa

SEQ ID NO: 29497 - DNA, 3612 bp, Homo sapiens
  source 1..3612: mol_type = unassigned DNA
atgggaaaagttggcgccggcggcggctcccaagcccggctgagcgcgctcctcgccggcgcggggctcttgatcctctgcgccccgggcgtctgcggcggcggctcctgctgcccctcgccgcaccccagctccgctccacgctcggcctcgacccctaggggcttttcccaccaggggcggccaggcagggctcctgccacgcccctgcccctcgtagtgcgtcccctgttctcagtggcccccggggaccgagcgctatccctggagcgggctcggggcactggggcatccatggcggttgctgcacgctccggccggaggagacggagcggagcggatcaggagaaggcagaacggggagagggcgcgagtcggagcccccggggagtgctaagagatggagggcagcaggagcctgggactcgggagcgggacccggacaaagccacccgcttccggatggaggagctgagactgaccagcaccacgtttgcgctgacgggagactcagcacacaaccaagccatggtccactggtctggccacaacagcagcgtgattctcattttgacaaagctctatgactataacctggggagcatcacagagagctcgctttggaggtcaaccgattatggaacaacctatgagaagctgaatgataaagttggtttgaaaaccattttgagctatctctatgtgtgtcctaccaacaagcgtaagataatgttactcacagacccggagattgagagcagtttattgatcagctcagatgaaggggcaacttatcaaaagtaccggctgaacttctacattcaaagcttgctttttcaccccaaacaagaagactggattctggcatacagtcaagaccaaaagttatacagctctgctgaatttgggagaagatggcagcttatccaagaaggggttgtaccaaacaggttctactggtctgtgatggggtcaaataaagaaccagaccttgtgcatcttgaggccagaactgtggatggtcattcacattatctaacttgccgaatgcagaactgtacagaggccaacaggaatcagccttttccaggctacattgacccagactctttgattgttcaggatcattatgtgtttgttcagctgacatcaggagggcggccacattactacgtgtcctaccgaaggaatgcatttgcccaaatgaagcttccgaaatatgctttgcccaaggacatgcatgttatcagcaccgatgagaatcaggtgttcgcagcggtccaagaatggaaccagaatgacacgtacaacctctacatctcagacacacgtggtgtctacttcaccctggccttggagaatgtccagagcagcagaggccctgagggcaacatcatgatcgacctctatgaggtagcagggataaagggaatgttcttggctaacaagaagattgacaaccaagtgaagactttcatcacatataacaaaggcagagactggcgtttgctgcaggcgccggacacggatctaaggggggaccccgtgcactgcttgctgccctattgctcactacaccttcacctgaaggtctctgagaatccctacacatcagggatcattgccagcaaagacacagctccaagcatcatagtggcatcaggtaatataggttctgaattgtcagacactgacatcagcatgtttgtctcttcagatgcagggaacacctggagacagatctttgaagaagagcacagtgttttgtacctggatcaaggtggagtcctggttgctatgaaacacacatctctcccaattcgacatctttggttgagttttgatgaagggagatcttggagcaaatacagtttcacatctattccactttttgtggatggggttctgggtgagcctggagaagagactctcatcatgacagtgtttggacacttcagccaccgctctgaatggcagctggtcaaagtagattacaagtccatttttgatagacggtgtgccgaagaggactacagaccttggcagctgcacagccagggggaagcatgtatcatgggagcaaaaaggatatataagaagcgaaaatcagagcggaagtgtatgcaaggaaaatatgcaggagctatggaatctgaaccctgtgtctgcactgaggctgattttgattgcgactatggttatgagcgacacagcaatggccagtgcctgccggcattttggttcaatccatcctctctgtcaaaggattgcagcttgggacagagttacctcaatagtactgggtacaggaaggtggtttccaataattgcactgatggcgtaagggaacagtacactgccaaaccgcagaagtgcccagggaaagccccgcgggggctgcggatagtcacggctgatggaaagctgacagcggaacaaggacacaacgtcactctcatggtgcaattagaagagggtgatgttcagcggacactcatccaagtggactttggcgatggtatcgcggtgtcttacgtcaatctcagctccatggaagatgggatcaaacacgtctatcagaacgtgggcattttccgtgtgaccgtgcaggtggacaacagtctgggttctgacagcgccgtcctgtacttacatgtaacttgtcccttggagcacgtgcacctgtctcttccctttgtcaccacaaagaacaaagaggtcaatgcgacggcagtgctgtggcccagccaagtgggcaccctcacttacgtgtggtggtacggaaacaacacggagcctttgatcaccttggagggaagcatatccttcagatttacttcagaaggaatgaataccatcacagtgcaggtctcagctgggaatgccatcctacaagacacaaagaccatcgcagtatatgaggaattccggtctcttcgcttgtccttttctccaaacctggatgactacaacccggacatccctgagtggaggagggacatcggtcgagtcatcaaaaaatccctggtggaagccacaggggttccaggccagcacatcctggtggcggtgctccctggcttacccaccactgctgaactctttgtcctaccctatcaggatccagctggagaaaacaaaaggtcaactgatgacctggagcagatatcagaattgctgatccacacgctcaaccaaaactcagtacacttcgagctgaagccaggagtccgagtccttgtccatgctgctcacttaacagcggcccccctggtggacctcactccaacccacagtggatctgccatgctgatgctgctctcagtggtgtttgtggggctggcagtgttcgtcatctacaagtttaaaaggaagatcccggggattaatgtttatgcccagatgcagaatgagaaagaacaagagatgatcagtccagtcagtcactctgaaagcaggcccaatgtccctcagactgaactaaggaggcctggccagcttatagatgagaaggtggaatcccagctcataggaagtatttccatagttgctgagaatcaaagcacaaaagaaatccctacctatgtaaatgtttgaatggaggacgccagt

SEQ ID NO: 29498 - DNA, 2638 bp, Homo sapiens
  source 1..2638: mol_type = unassigned DNA
gttcgcagcggtccaagaatggaaccagaatgacacgtacaacctctacatctcagacacacgtggtgtctacttcaccctggccttggagaatgtccagagcagcagaggccctgagggcaacatcatgatcgacctctatgaggtagcagggataaagggaatgttcttggctaacaagaagattgacaaccaagtgaagactttcatcacatataacaaaggcagagactggcgtttgctgcaggcgccggacacggatctaaggggggaccccgtgcactgcttgctgccctattgctcactacaccttcacctgaaggtctctgagaatccctacacatcagggatcattgccagcaaagacacagctccaagcatcatagtggcatcaggtaatataggttctgaattgtcagacactgacatcagcatgtttgtctcttcagatgcagggaacacctggagacagatctttgaagaagagcacagtgttttgtacctggatcaaggtggagtcctggttgctatgaaacacacatctctcccaattcgacatctttggttgagttttgatgaagggagatcttggagcaaatacagtttcacatctattccactttttgtggatggggttctgggtgagcctggagaagagactctcatcatgacagtgtttggacacttcagccaccgctctgaatggcagctggtcaaagtagattacaagtccatttttgatagacggtgtgccgaagaggactacagaccttggcagctgcacagccagggggaagcatgtatcatgggagcaaaaaggatatataagaagcgaaaatcagagcggaagtgtatgcaaggaaaatatgcaggagctatggaatctgaaccctgtgtctgcactgaggctgattttgattgcgactatggttatgagcgacacagcaatggccagtgcctgccggcattttggttcaatccatcctctctgtcaaaggattgcagcttgggacagagttacctcaatagtactgggtacaggaaggtggtttccaataattgcactgatggcgtaagggaacagtacactgccaaaccgcagaagtgcccagggaaagccccgcgggggctgcggatagtcacggctgatggaaagctgacagcggaacaaggacacaacgtcactctcatggtgcaattagaagagggtgatgttcagcggacactcatccaagtggactttggcgatggtatcgcggtgtcttacgtcaatctcagctccatggaagatgggatcaaacacgtctatcagaacgtgggcattttccgtgtgaccgtgcaggtggacaacagtctgggttctgacagcgccgtcctgtacttacatgtaacttgtcccttggagcacgtgcacctgtctcttccctttgtcaccacaaagaacaaagaggtcaatgcgacggcagtgctgtggcccagccaagtgggcaccctcacttacgtgtggtggtacggaaacaacacggagcctttgatcaccttggagggaagcatatccttcagatttacttcagaaggaatgaataccatcacagtgcaggtctcagctgggaatgccatcctacaagacacaaagaccatcgcagtatatgaggaattccggtctcttcgcttgtccttttctccaaacctggatgactacaacccggacatccctgagtggaggagggacatcggtcgagtcatcaaaaaatccctggtggaagccacaggggttccaggccagcacatcctggtggcggtgctccctggcttacccaccactgctgaactctttgtcctaccctatcaggatccagctggagaaaacaaaaggtcaactgatgacctggagcagatatcagaattgctgatccacacgctcaaccaaaactcagtacacttcgagctgaagccaggagtccgagtccttgtccatgctgctcacttaacagcggcccccctggtggacctcactccaacccacagtggatctgccatgctgatgctgctctcagtggtgtttgtggggctggcagtgttcgtcatctacaagtttaaaaggaagatcccggggattaatgtttatgcccagatgcagaatgagaaagaacaagagatgatcagtccagtcagtcactctgaaagcaggcccaatgtccctcagactgaactaaggaggcctggccagcttatagatgagaaggtggaatcccagctcataggagagtagctttaccctcccctccctccccttctactcaacctggtgactcatctctccgattgcaaagagcaagacacgccactccgccttcaacgccaaagcggggatctgctggggcacagtatgcaatttaaggaaaacccccaaaggctacaggcgacctgctgatcaggaaagaatttcgctcttgtcaagtacatcatccttcatgaccactaactttgtgttttttttctttcctttgttgttctgtttcctattttgccaggaagtatttccatagttgctgagaatcaaagcacaaaagaaatccctacctatgtaaatgtttgaatggaggacgccagtaaaaaaacaaaaacaaaaacaaaa

SEQ ID NO: 29499 - DNA, 663 bp, Homo sapiens
  source 1..663: mol_type = unassigned DNA
acctggatgactacaacccggacatccctgagtggaggagggacatcggtcgagtcatcaaaaaatccctggtggaagccacaggggttccaggccagcacatcctggtggcggtgctccctggcttacccaccactgctgaactctttgtcctaccctatcaggatccagctggagaaaacaaaaggtcaactgatgacctggagcagatatcagaattgctgatccacacgctcaaccaaaactcagtacacttcgagctgaagccaggagtccgagtccttgtccatgctgctcacttaacagcggcccccctggtggacctcactccaacccacagtggatctgccatgctgatgctgctctcagtggtgtttgtggggctggcagtgttcgtcatctacaagtttaaaaggaagatcccggggattaatgtttatgcccagatgcagaatgagaaagaacaagagatgatcagtccagtcagtcactctgaaagcaggcccaatgtccctcagactgaactaaggaggcctggccagcttatagatgagaaggtggaatcccagctcataggaagtatttccatagttgctgagaatcaaagcacaaaagaaatccctacctatgtaaatgtttgaatggaggacgccagtaaaaaaa

SEQ ID NO: 29500 - DNA, 3542 bp, Homo sapiens
  source 1..3542: mol_type = unassigned DNA
agagcaggcagacagcagaatgaccaggcaccaagctctccattccactagcctctctgggccaggcctgtggagtctccagaggaaacaggcaggtgatcttgatcctgacgaagtactaccacgcagacatggggaaggttctggaaagttctctgtggcggtcatcagatttcgggacgtcctacaccaagctcaccctccagcctggtgtcaccaccgtcatcgacaatttctacatctgcccgaccaacaagaggaaggtcatccttgtcagctcctcactcagtgaccgggaccagagcctattcctcagcgcagacgaaggcgccacctttcagaagcagcccattcccttcttcgtggaaactctgattttccaccctaaggaggaggacaaggtcctcgcctacacaaaggagagcaagctctacgtgtcatctgacttggggaaaaagtggacacttctgcaagagcgagtgaccaaagaccacgtgttctggtctgtgtctggggtggacgctgaccctgacttggtccacgtggaagcccaagacctcggtggagattttcggtacgtcacctgcgcaatccacaattgctccgagaagatgctgacagccccattcgcaggccccattgaccacgggtctctgaccgtgcaggacgattacatcttctttaaggcaacatcagcaaaccagacaaaatactacgtctcttatcgtcgaaatgaatttgtcctgatgaagctgccgaagtatgcattgccaaaggatctgcagatcatcagcacggacgagagtcaggtgttcgtggcggtgcaggagtggtaccagatggacacctacaacctgtaccagtcggacccacggggcgtgcgctacgcgctggtgctgcaggacgtgcgcagctcacggcaggcggaggagagcgtgctcatcgacatcctggaggtcagaggggtgaaaggagtcttcctggcaaaccaaaaaattgatgggaaagtgatgacgcttataacctacaacaagggccgcgactgggattacctgaggccacccagcatggacatgaatggaaaaccaaccaactgcaagcctccagactgccacctgcacctgcacctgcgctgggcagacaacccctacgtatcaggcaccgtgcacaccaaggacaccgccccaggcctcatcatgggtgcaggtaacctgggctcacagctggtggaatataaagaagaaatgtacatcacgtcagactgtggtcacacctggcggcaggtgtttgaggaagagcatcacatcctgtacctggaccacggcggcgtgatcgtggccatcaaagacacctccatccctttgaagatcctcaagttcagtgtggacgagggcctcacctggagcacgcacaacttcaccagcacctcggtgtttgtggacgggctgctgagtgagccaggggacgagacgctggtcatgacggtctttggccacatcagcttccgctccgattgggagctggtcaaggtggacttccggccctcattctccaggcagtgcggcgaggaggactacagctcctgggagctctccaacctgcagggcgaccgctgtatcatgggccagcagagaagtttccggaaaagaaagtccacgtcctggtgcatcaaggggaggagcttcacgtcggcgctcacgtcccgcgtgtgcgagtgccgggactcggacttcctgtgcgactacggatttgagcgctcctcctcctcagagtccagcaccaacaagtgctctgccaacttctggtttaacccattgtccccgcctgacgactgtgccctgggccagacctacaccagcagccttgggtaccggaaagtggtgtccaacgtgtgtgagggtggggtggacatgcagcagagtcaggtgcagctgcagtgccccctcacgccgccccggggcctgcaggtcagcattcaaggcgaggcggtggccgtgcggcctggagaggacgtcctgtttgtggtgcggcaggagcagggtgatgtcctgactaccaagtaccaggtagaccttggggacggcttcaaggccatgtacgtgaaccttacactgaccggggagcccatccggcaccgctacgagagccccggcatctaccgcgtgtccgtcagggcagagaacacggcaggccacgatgaggcggtgctctttgtccaggtcaactcccccctgcaggccctctacctggaggtggttcctgtcattggcctcaaccaggaggtgaacctcacagctgtgctgcttcccttgaaccctaacctcaccgtcttctactggtggatcggccacagcctgcagcccctcctttccctggataattctgtgacaacgcggttttcggacacgggcgacgtgcgtgtgacggtgcaggccgcctgtgggaactcggtgctgcaggactccagggtcctccgtgtgctggatcaatttcaagtcatgcctctgcagttttccaaggagctggatgcctacaaccccaacacccctgagtggagggaagacgtgggcctggtggtcacccggctgctctccaaggagaccagcgtccctcaggagcttctggtgactgtggtgaagccggggctgcccactttggccgatctgtacgtgctcctgccccctcccaggcccacaaggaagaggagcctctcgagtgataagaggctcgccgccatccagcaggtgctgaacgcacagaagatcagcttcctcctgcgaggcggagtccgggtcctggtggccctgcgggacacaggcacaggtgctgagcagctgggcggcggtggcggctactgggcggtagtggtgctgtttgtcatcgggctcttcgcagcgggagccttcatcctctacaagttcaaaagcaggaaacggccaggcaggaccgtgtacgcccaaatgcacaacgagaaggagcaggagatgaccagccctgtgagtcacagtgaggacgtccagggcgctgtccagggtgaggagtttatagatgatgatctcgactcgcagactctaggcaaccactcaggcgtggtcctgagcatcaactcccgagagatgcacagctacctggtgagctgatgccaccccagcatctgtcttttcacccacggagggcacagaaccaccagcaaagccggcggctggactggcgcccctcagagacctgcggaaagccccctccctgagtcgtcgccacaccaggcgacaggcaccaccccctctgataaatccaagcccgcccaggcccacggggggcccacgggaccccccgggactccccggacatggccctgcccctatgggacaccaggcctgactcaggcaggttctgccccccagaccccacacacggccgccccacgtgctgtcgctcagcccgaggcctgacttctctgggctgaggctggtcgtcctggagccctcccagtacctcgggctgcaagagctgcagacccgttcagacactgcgttgcgggctcc

SEQ ID NO: 29501 - DNA, 6152 bp, Homo sapiens
  source 1..6152: mol_type = unassigned DNA
cctttctctgcgctctcgctcgcgctccccagcgccctcctgctctcccggccgcggtcccctcgtccgcgccgccccgccgccggctccgctgccgcccctggcgaccatggcgcaccgggggccctcgcgcgcctcgaagggccccggccccaccgcccgagccccgagccccggggctccgccgccgccgcgctcgccgcgctcgcggccgctcctgctgctgctgctgctgctgggcgcctgcggggcggcggggcgctcccctgagcccgggcgcctgggtcctcacgcccaactgacccgggtgccgcggagccctcccgcggggcgcgcggagcccggtggcggcgaggaccggcaggcgcgcggcacggagccaggcgccccgggtccgagtcccggtcccgctcctggtcccggcgaggacggcgcccccgccgcgggctaccggcgctgggagcgggcggcgccgctggccggagtggcttcgcgggcgcaggtctcgctcatcagcacgtcgttcgtgctcaagggggacgcgacgcacaaccaggcgatggtgcactggacgggcgagaacagcagcgtgatcttgatcctgacgaagtactaccacgcagacatggggaaggttctggaaagttctctgtggcggtcatcagatttcgggacgtcctacaccaagctcaccctccagcctggtgtcaccaccgtcatcgacaatttctacatctgcccgaccaacaagaggaaggtcatccttgtcagctcctcactcagtgaccgggaccagagcctattcctcagcgcagacgaaggcgccacctttcagaagcagcccattcccttcttcgtggaaactctgattttccaccctaaggaggaggacaaggtcctcgcctacacaaaggagagcaagctctacgtgtcatctgacttggggaaaaagtggacacttctgcaagagcgagtgaccaaagaccacgtgttctggtctgtgtctggggtggacgctgaccctgacttggtccacgtggaagcccaagacctcggtggagattttcggtacgtcacctgcgcaatccacaattgctccgagaagatgctgacagccccattcgcaggccccattgaccacgggtctctgaccgtgcaggacgattacatcttctttaaggcaacatcagcaaaccagacaaaatactacgtctcttatcgtcgaaatgaatttgtcctgatgaagctgccgaagtatgcattgccaaaggatctgcagatcatcagcacggacgagagtcaggtgttcgtggcggtgcaggagtggtaccagatggacacctacaacctgtaccagtcggacccacggggcgtgcgctacgcgctggtgctgcaggacgtgcgcagctcacggcaggcggaggagagcgtgctcatcgacatcctggaggtcagaggggtgaaaggagtcttcctggcaaaccaaaaaattgatgggaaagtgatgacgcttataacctacaacaagggccgcgactgggattacctgaggccacccagcatggacatgaatggaaaaccaaccaactgcaagcctccagactgccacctgcacctgcacctgcgctgggcagacaacccctacgtatcaggcaccgtgcacaccaaggacaccgccccaggcctcatcatgggtgcaggtaacctgggctcacagctggtggaatataaagaagaaatgtacatcacgtcagactgtggtcacacctggcggcaggtgtttgaggaagagcatcacatcctgtacctggaccacggcggcgtgatcgtggccatcaaagacacctccatccctttgaagatcctcaagttcagtgtggacgagggcctcacctggagcacgcacaacttcaccagcacctcggtgtttgtggacgggctgctgagtgagccaggggacgagacgctggtcatgacggtctttggccacatcagcttccgctccgattgggagctggtcaaggtggacttccggccctcattctccaggcagtgcggcgaggaggactacagctcctgggagctctccaacctgcagggcgaccgctgtatcatgggccagcagagaagtttccggaaaagaaagtccacgtcctggtgcatcaaggggaggagcttcacgtcggcgctcacgtcccgcgtgtgcgagtgccgggactcggacttcctgtgcgactacggatttgagcgctcctcctcctcagagtccagcaccaacaagtgctctgccaacttctggtttaacccattgtccccgcctgacgactgtgccctgggccagacctacaccagcagccttgggtaccggaaagtggtgtccaacgtgtgtgagggtggggtggacatgcagcagagtcaggtgcagctgcagtgccccctcacgccgccccggggcctgcaggtcagcattcaaggcgaggcggtggccgtgcggcctggagaggacgtcctgtttgtggtgcggcaggagcagggtgatgtcctgactaccaagtaccaggtagaccttggggacggcttcaaggccatgtacgtgaaccttacactgaccggggagcccatccggcaccgctacgagagccccggcatctaccgcgtgtccgtcagggcagagaacacggcaggccacgatgaggcggtgctctttgtccaggtcaactcccccctgcaggccctctacctggaggtggttcctgtcattggcctcaaccaggaggtgaacctcacagctgtgctgcttcccttgaaccctaacctcaccgtcttctactggtggatcggccacagcctgcagcccctcctttccctggataattctgtgacaacgcggttttcggacacgggcgacgtgcgtgtgacggtgcaggccgcctgtgggaactcggtgctgcaggactccagggtcctccgtgtgctggatcaatttcaagtcatgcctctgcagttttccaaggagctggatgcctacaaccccaacacccctgagtggagggaagacgtgggcctggtggtcacccggctgctctccaaggagaccagcgtccctcaggagcttctggtgactgtggtgaagccggggctgcccactttggccgatctgtacgtgctcctgccccctcccaggcccacaaggaagaggagcctctcgagtgataagaggctcgccgccatccagcaggtgctgaacgcacagaagatcagcttcctcctgcgaggcggagtccgggtcctggtggccctgcgggacacaggcacaggtgctgagcagctgggcggcggtggcggctactgggcggtagtggtgctgtttgtcatcgggctcttcgcagcgggagccttcatcctctacaagttcaaaaggaaacggccaggcaggaccgtgtacgcccaaatgcacaacgagaaggagcaggagatgaccagccctgtgagtcacagtgaggacgtccagggcgctgtccagggcaaccactcaggcgtggtcctgagcatcaactcccgagagatgcacagctacctggtgagctgatgccaccccagcatctgtcttttcacccacggagggcacagaaccaccagcaaagccggcggctggactggcgcccctcagagacctgcggaaagccccctccctgagtcgtcgccacaccaggcgacaggcaccaccccctctgataaatccaagcccgcccaggcccacggggggcccacgggaccccccgggactccccggacatggccctgcccctatgggacaccaggcctgactcaggcaggttctgccccccagaccccacacacggccgccccacgtgctgtcgctcagcccgaggcctgacttctctgggctgaggctggtcgtcctggagccctcccagtacctcgggctgcaagagctgcagacccgttcagacactgcgttgcgggctccttccccgcagaggccggggcctccctgactttgcttcttcactcccacctgtgcggccacccagtccctctgtgggagcccgggtgccaggccctcccaacaccacaccaccctccaggcccccctgccctccggctggaaactgcagctctgtaaatgcctctctaggtagctgctggcggtggtgggggtgtctcactctctgtctttatagccggcggtagccaccggggtggctctgtcagagttccgtactcgggagcccctttccctgagtgcccagggtgtctcctctgcccagaggggcagcagctctccctggttctccccagggcagacggggtagggcgggctcaggacccagtgcccatggttcctcactcctaccagcaagcagcaccatcccgcaggcttctcccacctgatggctgttctcccaccgggtctgggctctggaaggagccagatgcccccagaaaggtgggtggtggagacggcaccagatgtaccagttttctgcagttccttataggcgaagggaaccgggtggaaaccaagctgggagaggctgaggatggcagggctggaagggccatcagcgtgaccctcattttcaagaaggggaaactgaggcccagggaggagagtaactgaaggtcacagcacggtcacagcagaggtggccgaacccagccctctgcgcgccagtgctgtgcggtctccacacccttacggtttcctagaatcagggatgttagtgtaagtctataggaatataggggggtgggggggtcaccttttgccttgaaatgggaagtcagtagccccttcctcctcctccctcctccccctcctctctggcagggatctcagatgaccgtggcctccctctcagagggggagaacgccagagccctggctggtgatgtgctggctgggggtgaatcccaatgagggtccctctcagagcgggagaacgccagagccctggatggtgatgcgctggctgggggtgaatcccaatgagggtccctctcagaaagggagaacgccagagccctggctggtgacatgctggctgggggtgaatccgaatgacagtgcagacgttctcccatccaccatgtctgagcttgggggaattgcctcatttcccctggaaaagaaacatggtccattagaggggaaagcccaggggtgaatcttcacgccccaaacagtgcccggtggggaggaggcacccgctccttgttgagtaaaaccacccatggagactggaacctcatctccctgggtcggggggtgttcaaggccacaggacaaggggagcaccctgggccacacaggcgtggaggtgtccccaccccttccacctgtcccccagacccaaagctctctccccaccctacctgcccacctggggctcctgtgccccctccccactccagaggccaccctacaagttgtcctcaaggtcatcctggagatgggatccaggacgtggggccatgactctctgggaccttgccacagcccccattcccctgcttgcagtctgcaaggacacctttgcagggattcttgtcctgctggccaccccacccacacctgtccctggccagcaggccgcctgcaagcgtcaggcacacagggacagacatggcgagcacagtgcaggcccggggcccacgggcaacatggaaccctgggaactgccctcccccttagctcacagtgcctgcggtagccactctaggtcgttggccttccttgaccactccatttaattctctctgctgtttgggttgggtttttccccttagttatctgtgggtttcctgtattttatgttaatatttctattaagaacatgttgggcatgtggacccaagcacctgggaaggaggtggcatctgagacagcctgatacgttcccgtctgtgcacccatggagatccaggcgtgggcccgtgtctgtccctggttgtaaattcgagggtctgcatatctgatgttcaggtagacctgggcgcctgggaacgaggccatcagctgccatgcacataacaaagagacaatgcattccttcttatttttcctttttaaaaatcgatgaatcatttgtgatgcttttaacaaagattaaatgaatttgatcagc

SEQ ID NO: 29502 - DNA, 1522 bp, Homo sapiens
  source 1..1522: mol_type = unassigned DNA
attctgagtacttgaaacgtgacattccatccactaagccctcctgcttgggctgtttgtcgattctaatgtgttgaaatatatctgcaactctaggtgctgtctccgcccaagtccagaaatgcagttttgatcaaatctcataataatatggggagatgttgaagattaaaacctattgataatccacactgccagaaagcaagatacagaggaaaatttaataacctgaaaaacggttacagaagagtgtggctttattttcagctgtcttttttgtgtacttgtttccaacacaggagtttttggccacttcagcctccgctccgaatggcaattggtgaaagtggactacaaatctatcttcagccggcattgcaccaaggaggactatcagacctggcacctgctcaatcagggagagccttgtgtcatgggagaaaggaaaatattcaagaaacgtaagccaggagctcagtgtgccctgggccgagaccactcaggatcagtggtctcagaaccctgtgtctgtgccaattgggacttcgagtgtgactatgggtatgagagacatggggagagccagtgtgtcccagctttctggtacaatccagcatccccatcaaaggactgcagccttggtcaaagctaccttaacagcactgggtatcggcggattgtgtccaacaactgcacagatgggctaagggagaagtacaccgccaaggcccagatgtgccctggaaaagcccctcggggcctccatgtggtgacgaccgatgggcggctggtggcagagcaggggcacaatgcaactttcatcatcctcatggaggagggtgatctacaaaggacaaacatccagcttgactttggggatgggattgctgtgtcctacgcaaacttcagccccatcgaggacggcatcaagcacgtgtataagagtgcggggatcttccaggtgacagcctatgcagagaacaaccttggctcagacacagctgtcctcttcctgcatgtggtttgatgtcgggtcgaggaaatgttgtcttggggctgggattggtttcccacatgtgtatcagtgatattcgtgggtctaaggacttccatggttcttacttacataccccacaagagtttccaggtcctgtggagcatgttcatctccgagttccatttgttgccataagaaataaggaggtcaacatcagtgcagtcgtgtggcccagtcaactggggacccttacctatttctggtggttcggcaatagcacaaagcctctcatcactttggacagcagcatttccttcacattccttgcagaaggaaccgacaccatcacagtccaggtggctgctgggaatgccctcatccaggacacaaaagagattgcagttcatgaatatttccagtcccagcttttatcattctctcctaatctggattaccacaatcctgacattcctgagtggagaaaagatattggcaatgtcatcaagcgagctctggttaaagtaa

SEQ ID NO: 29503 - DNA, 5757 bp, Homo sapiens
  source 1..5757: mol_type = unassigned DNA
atcaccctctggacaagagaacgggcgagcgggagctaggagggaagagtggagaggaccggcgaggcgcgccagccggagccacctccttcccggccgccccctccccactccccctacacacacacgctcgctcgctcgccggcgcgcgcacaccccccgcgccggacccgcacctcggcgggcgccacacactcggcagcccgagccgcggtagccgcagcgggatggaggcggcgcgcacggagcgccccgcaggcaggccgggggcgccgcttgtccggacggggctcctactcttgtcgacgtgggtcctggccggcgccgagatcacttgggacgcgacaggcggtcccggacgcccggcggccccggcttcgcggccaccggcgttgtctccactctcgccgcgggcagtggccagccagtggccggaggagctggcgtcggcgcggagagccgccgtgctggggcgccgggccggaccagagctgctgccccagcagggcggcggcagaggcggtgagatgcaggtggaagccggagggacatcaccggcaggcgagcggcggggccggggcatcccagctcctgccaagcttggcggcgcgaggaggagtcgccgggcgcagcccccaatcacccaggaacgcggggacgcctgggccactgctccggccgatggttccagaggaagccgtccccttgctaagggttcccgggaggaggtgaaggcgccgcgggctggggggtcggcggctgaagacctccggctgcccagcacctccttcgcgctgaccggggactcggcccacaaccaagccatggtgcactggtcgggacacaacagcagcgtcatacttatcctgacgaagctgtatgacttcaacctgggcagcgtgactgagagttcactatggaggtcgacagattatggcaccacctatgaaaagctgaatgacaaagtgggtttgaagactgtcctcagttacctctatgtcaatccaaccaacaaaaggaagattatgcttctcagtgatcctgagatggagagcagcatattgatcagctcagacgaaggggcgacctatcagaagtatcggctcaccttctatatccagagcctgctctttcatcccaagcaagaggactgggtgctggcctacagtttggatcaaaagctctacagctccatggactttggaagacggtggcaactcatgcatgaacgcatcacacccaacaggttttattggtcggtggccggattggataaggaggcggacctggtgcacatggaggtgcggaccacggatggatatgctcactacctcacctgcaggatccaggaatgtgccgagacaactagaagtgggccttttgcccgctccattgacatcagttccctggttgtccaggatgaatatatcttcattcaggtaacaactagtggaagagccagctactacgtgtcttatcgaagagaggcctttgctcagataaagctgcctaagtactcgttgccaaaggacatgcacatcatcagtacagacgagaaccaagtatttgctgcggtccaagaatggaaccagaacgacacgtacaacctctacatctcagacacgcgtgggatttacttcactctggccatggagaacatcaagagcagcagaggtctaatggggaacatcattattgaattgtatgaggtagcaggtatcaaagggatatttctggcaaacaagaaggtggacgaccaggtgaagacatacatcacttacaacaaaggcagggattggcgcctgctgcaagctccggatgtggacctgagaggaagcccagtgcactgcctgctgcccttctgttccttacatctgcacctgcaactctctgaaaatccatattcctcaggaagaatctctagcaaggagacagccccaggacttgtggtggctacaggcaacattggcccggagctctcatatactgatattggtgtgttcatctcctccgatgggggcaacacatggagacagatctttgatgaagagtacaatgtctggttcctagactggggtggtgccctcgtggccatgaaacacacacctctgccagtcaggcatttgtgggtgagttttgatgagggccactcttgggacaagtatggtttcacttcggttcctctctttgttgacggggctctggtggaggcaggaatggagacccacatcatgacagtttttggccacttcagcctccgctccgaatggcaattggtgaaagtggactacaaatctatcttcagccggcattgcaccaaggaggactatcagacctggcacctgctcaatcagggagagccttgtgtcatgggagaaaggaaaatattcaagaaacgtaagccaggagctcagtgtgccctgggccgagaccactcaggatcagtggtctcagaaccctgtgtctgtgccaattgggacttcgagtgtgactatgggtatgagagacatggggagagccagtgtgtcccagctttctggtacaatccagcatccccatcaaaggactgcagccttggtcaaagctaccttaacagcactgggtatcggcggattgtgtccaacaactgcacagatgggctaagggagaagtacaccgccaaggcccagatgtgccctggaaaagcccctcggggcctccatgtggtgacgaccgatgggcggctggtggcagagcaggggcacaatgcaactttcatcatcctcatggaggagggtgatctacaaaggacaaacatccagcttgactttggggatgggattgctgtgtcctacgcaaacttcagccccatcgaggacggcatcaagcacgtgtataagagtgcggggatcttccaggtgacagcctatgcagagaacaaccttggctcagacacagctgtcctcttcctgcatgtggtttgtcctgtggagcatgttcatctccgagttccatttgttgccataagaaataaggaggtcaacatcagtgcagtcgtgtggcccagtcaactggggacccttacctatttctggtggttcggcaatagcacaaagcctctcatcactttggacagcagcatttccttcacattccttgcagaaggaaccgacaccatcacagtccaggtggctgctgggaatgccctcatccaggacacaaaagagattgcagttcatgaatatttccagtcccagcttttatcattctctcctaatctggattaccacaatcctgacattcctgagtggagaaaagatattggcaatgtcatcaagcgagctctggttaaagtaaccagtgtcccagaggaccagatcctcattgccgtgtttcctggtctccccacttcagcagagcttttcattcttccacccaagaacctgacagagaggaggaaaggcaatgaaggggacctggaacaaattgtagaaacactgtttaatgctctcaaccaaaatttggtccagtttgagctgaagccgggggtacaagtcattgtgtatgtcacacagctgacgttagctccattggtggactccagtgctgggcacagcagctcagccatgcttatgctattatcagtggtatttgttggcctggctgtgtttttgatctacaagtttaaaaggaaaatcccttggattaacatctatgctcaagtccaacacgacaaggagcaggagatgattgggtcagtgagccaaagtgaaaacgcccccaaaatcacactcagtgactttacggagcctgaggagctgctggacaaagagctggacacgcgggtcataggaggcattgccactattgcaaacagcgaaagcacaaaggagatccccaactgcactagtgtttaataccagcaagccacgtggtcaaccacctttctgactttttatttttgatgattactattactattattatggaaaaattaaaatgtcttttttaccttttgtttaccaagggccccttcataaatagcaggcaaatgcctagctttgggagaaaagggcattcttagctgattgaaatgagacaaagggaataaatggctgtatttgtgctaagagcaaaggatgcatcttcccacagcctcctcgctttactctgccattggtagcttaaagactttctttttccttgtggtctcccttttttcaaaattgaagttgggttggctctttgtgaacctctcatccccacagcagaatcaccaacactctccgcttcccccagcacacacacatacaacacagatcatttcccagttagatccgcaggaagtaggttggtgggggtggatgtagctgcagaaagcatgcacaactttgtgaaagaggccctgccttgtgcatgtccatagtgaggctacagatggcttattgtatataattacaatgtaaatagctttttatttcctaagaaataatttaatgtttagtaaaaaagaaaacagaaaaaagaaagatgcgtgtgttggcttacgcactggccctcagagctgaccaacccgccaggcctgctcaatgcattgggtttggatgctctcctgttgtctgtcacacttaactcttgcatctccttgtccatgccatagctggtttctacttatgtatataaaggggggtggggggaggggcttctctggggcaattgataaaggaaggactctagtgacatcatagaacatggcagtcgtttttgttccaagaatgatatgaaaggtgaagaagaggcccactagaggcttcatactgagacccagatgggggaaaacagcttcctctctaaaaggaaaaacttgatatttatcagtctgagaaaatatttttttctaaagaaggcagtcagtggatcttaaaatgacaatctgtttttaaattggattctatgaaaatgcataatgcttatggtgaattctcaggctattctgagctcagaaaagtcccctgggcactaggtaaagcccagtgaatgtctcttggcatgggaggagttaaagaggttggaagggaagaggcatttgtggaattatgagttcatgcaaaactctccaggccaagtaggggtctagcctttaatgatattagtcaaaggcaattttagcaaagctgtgctatttgcttgtcagatgtacacaacttccttaaagtcaaatgtctgccttcagttcccttaaggtagttcttgcctctggggtgagtggctttcaaagccttttagcttttccagcacctcagccccttcacacatttacacataccaatttttttcaatagggtcacgttaagccatgctgtaagcattgtttttattttcaggcttagcctgagcacacttatttttgaaaatgatataatgtatatatatgggaggaaaggccacattttgtacctgttaatttttgtgggatgttgttcccattcttctttgtgagacagagagaatgtgatatagagaaatctggctggctacagtgtagatcagtattaggaatatttctaaagatcctgcttttttgtttcaagggttaaatggggcagacaattgcaatacttgtactaaacactggaatacaaatgcatgactcatatctatatatacagtatatgtacatatactgttcttggttttattgttccacttgaatatttctactgtaaaaaaaagacagtggttttgaaattgttgaaaataaatgtatttttgtacatc

SEQ ID NO: 29504 - DNA, 458 bp, Homo sapiens
  source 1..458: mol_type = unassigned DNA
gaaaatccatattcctcaggaagaatctctagcaaggagacagccccaggacttgtggtggctacaggcaacattggcccggagctctcatatactgatattggtgtgttcatctcctccgatgggggcaacacatggagacagatctttgatgaagagtacaatgtctggttcctagactggggtggtgccctcgtggccatgaaacacacacctctgccagtcaggcatttgtgggtgagttttgatgagggccactcttgggacaagtatggtttcacttcggttcctctctttgttgacggggctctggtggaggcaggaatggagacccacatcatgactgactatgggtatgagagacatggggagagccagtgtgtcccagctttctggtacaatccagcatccccatcaaaggactgcagccttggtcaaagctaccttaacagcactgg

SEQ ID NO: 29505 - DNA, 1717 bp, Homo sapiens
  source 1..1717: mol_type = unassigned DNA
cggggaatcatggccgcccccagtgttccgcgtccgggggtttgtgggagttgccttgacctgcagctccgccaccgcggacccgccttctgccctcagcagcagacgctctgtcccgcccgggcagctctgcgaggcagcggctggagagggaaccatggggactgtgcacgcccggagtttggagcctcttccatcaagtggacctgattttggaggattaggagaagaagctgaatttgttgaagttgagcctgaagctaaacaggaaattcttgaaaacaaagatgtggttgttcaacatgttcattttgatggacttggaaggactaaagatgatatcatcatttgtgaaattggagatgttttcaaggccaaaaacctaattgaggtaatgcggaaatctcatgaagcccgtgaaaaattgctccgtcttggaatttttagacaagtggatgttttgattgacacatgtcaaggtgatgacgcacttccaaatgggttagacgttacctttgaagtaactgaattgaggagattaacgggcagttataacaccatggttggaaacaatgaaggcagtatggtacttggcctcaagcttcctaatcttcttggtcgtgcagaaaaggtgacctttcagttttcctatggaacaaaagaaacttcgtatggcctgtccttcttcaaaccacggcccggaaacttcgaaagaaatttctctgtaaacttatataaagttactggacagttcccttggagctcactgcgggagacggacagaggaatgtcagctgagtacagttttcccatatggaagaccagccacactgtcaagtgggaaggcgtatggcgagaactgggctgcctctcaaggacggcgtcatttgctgttcgaaaagaaagcggacattcactgaaatcatctctttcgcacgccatggtcatcgattctcggaattcttccatcttaccaaggagaggtgctttgctgaaagttaaccaggaactggcaggctacactggcggggatgtgagcttcatcaaagaagattttgaacttcagttgaacaagcaactcatatttgattcagttttttcagcgtctttctggggcggaatgttggtacccattggtgataagccgtcaagcattgctgataggttttaccttgggggacccacaagcatccgcggattcagcatgcacagcatcgggccacagagcgaaggagactacctaggtggagaagcgtactgggccggcggcctgcacctctacaccccattacctttccggccaggccagggtggctttggagaacttttccgaacacacttctttctcaacgcaggaaacctctgcaacctcaactatggggagggccccaaagctcatattcgtaagctggctgagtgcatccgctggtcgtacggggccgggattgtcctcaggcttggcaacatcgctcggttggaacttaattactgcgtccccatgggagtacagacaggcgacaggatatgtgatggcgtccagtttggagctgggataaggttcctgtagccgacacccctacaggagaagctctgggactggggcagcagcaaggcgcccatgccacacaccgtctctcgaggaaacgcggttcagcgattctttgactgcggaccctgtgggaaaccccgtcaataaatgttaaagacacactccgag

SEQ ID NO: 29506 - DNA, 1432 bp, Homo sapiens
  source 1..1432: mol_type = unassigned DNA
agctctgcgaggcagcggctggagagggaaccatggggactgtgcacgcccggagtttggagcctcttccatcaagtggacctgattttggaggattaggagaagaagctgaatttgttgaagttgagcctgaagctaaacaggaaattcttgaaaacaaagatgtggttgttcaacatgttcattttgatggacttggaaggactaaagatgatatcatcatttgtgaaattggagatgttttcaaggccaaaaacctaattgaggtaatgcggaaatctcatgaagcccgtgaaaaattgctccgtcttggaatttttagacaagtggatgttttgattgacacatgtcaaggtgacctttcagttttcctatggaacaaaagaaacttcgtatggcctgtccttcttcaaaccacggcccggaaacttcgaaagaaatttctctgtaaacttatataaagttactggacagttcccttggagctcactgcgggagacggacagaggaatgtcagctgagtacagttttcccatatggaagaccagccacactgtcaagtgggaaggcgtatggcgagaactgggctgcctctcaaggacggcgtcatttgctgttcgaaaagaaagcggacattcactgaaatcatctctttcgcacgccatggtcatcgattctcggaattcttccatcttaccaaggagaggtgctttgctgaaagttaaccaggaactggcaggctacactggcggggatgtgagcttcatcaaagaagattttgaacttcagttgaacaagcaactcatatttgattcagttttttcagcgtctttctggggcggaatgttggtacccattggtgataagccgtcaagcattgctgataggttttaccttgggggacccacaagcatccgcggattcagcatgcacagcatcgggccacagagcgaaggagactacctaggtggagaagcgtactgggccggcggcctgcacctctacaccccattacctttccggccaggccagggtggctttggagaacttttccgaacacacttctttctcaacgcaggaaacctctgcaacctcaactatggggagggccccaaagctcatattcgtaagctggctgagtgcatccgctggtcgtacggggccgggattgtcctcaggcttggcaacatcgctcggttggaacttaattactgcgtccccatgggagtacagacaggcgacaggatatgtgatggcgtccagtttggagctgggataaggttcctgtagccgacacccctacaggagaagctctgggactggggcagcagcaaggcgcccatgccacacaccgtctctcgaggaaacgcggttcagcgattctttgactgcggaccctgtgggaaaccccgtcaataaatgttaaagacac

SEQ ID NO: 29507 - DNA, 8077 bp, Homo sapiens
  source 1..8077: mol_type = unassigned DNA
agttgttgttgcggcttccgccgcgggtggaagaagatggcgtcgggtggtggtggctgtagcgcttcggagagactgcctccgcccttccccggcctggagccggagtccgagggggcggccgggggatcagaacccgaggctggggacagcgacaccgagggggaggacattttcaccggcgccgcggtggtcagtaaacatcagtctccaaagataactacatcccttcttcccatcaacaatggctccaaagaaaatgggatccatgaagaacaagaccaagagccacaggatctctttgcagatgccacagtggagctatccttggacagcacacaaaataatcagaagaaggtgctagccaaaacactcatttctcttcctcctcaggaagccacaaattcttcgaagccccagccaacctatgaggagctagaggaagaagaacaggaggatcaatttgatttgacagtcggtataactgatcctgagaagataggggatggtatgaatgcatatgtagcctacaaagttacaacacagacaagcttaccattgttcagaagcaaacagtttgcagtaaaaagaagatttagtgactttctgggtctttatgagaagctttccgagaagcactctcagaatggcttcattgtccctccgcccccggagaagagcctcatagggatgacaaaagtgaaagttgggaaggaagattcttcttctgcagaatttcttgaaaaacggagggccgctttagaaaggtaccttcagaggattgtaaatcatcctaccatgttacaggaccctgacgtcagagagttcttggaaaaagaagagctgccacgtgccgtgggtacccagacattgagtggtgctggtctcctcaagatgttcaacaaagccacagatgccgtcagcaaaatgaccatcaagatgaatgaatcagacatttggtttgaggagaagctccaggaggtagagtgtgaggagcagcgcttacggaaactgcatgctgttgtagaaactctagtcaaccataggaaagagctagcgctgaacacagcccagtttgcaaagagtctagccatgcttgggagctctgaggacaacacggcattgtcacgggcactctcccagctggctgaggtggaagaaaaaattgagcagctccaccaggaacaggccaacaatgacttcttcctccttgctgagctcctgagtgactacattcgcctcctggccatagtccgctgggagtctcgggtgactcaatatgaaagggacttcgagaggatttcaacagtggtccgaaaagaagtgatacggtttgagaaagagaaatccaaggacttcaagaaccacgtgatcaagtaccttgagacactcctttactcacagcagcagctggcaaagtactgggaagccttccttcctgaggcaaaggccatctcctaatggaccaaggaccccagagcccacctgtgtgacgctgcctttttatacactgtcctcctccaccttgatggacccctagtgatgcatcctgcctaggctggacttaaccccttcctccctgtccccacgaccaactgtccccagttactctaaccgttatttcatttagcttccatatatattttcttacctaagagaatagtttcctgctttaagcaaaagacctacaataggtggtggaattatgggatggggtggagtattgatataaatatataaatacaaatgtatatttttcaggatgtggtttaggaactgggaataacgttttctgttactcctgatggtgccatgaaaaggttatgtaataaaatattttaaaatcaggtcacatgactcagaatgttggtggtttttgcttaggctggggagcagttgggaatcaggtctggaatactcctaaccaagaagttgcccaggtatagtaagtttttctctaccgttcacaagttttgtgctgctgcttccctctggaaatggggtttctttctctccgcctacctcagctacctgttctgagggtctcaatctgtttcgtattcccacttctttagggaaggagttttaaaaacatctcttaaaataagaggagcaaaatctattaaaacctattctcctgcaaaggaggcagagactttctctctctcttttttttttttttttggtgtccctatcattaagcaagagcctttctcttttattcttcctgcttccctaagctgctcagggttctctgagtcttgccctctgatggcaagtcttatatataactaaacctatttttgtcacccatcaaaacacatcctcagtagactgtgtgaaggtgtgaaggtctgataatgacttgatgctttgtctccatagacatgaaagccatgccctctgcctctagatagggtgatccaagagctcctgaaccttaggaggttcaaagaagctctactgtctgtgcccaggaggtagcctgccagcaagagccctcaggagttgcacacacagccaaagggtgttcacacagatctctgccggtctagccaggggaggccagagtctcgtcagtcaaggatgggcttcccccttagctgtgtccacagctgctcaagctatactggtcagagtgggctttgaagctcctttgtgagctcgagctgctgactgccactatgggagccttgccacctccagcccctccatcccaaagacgctcctgccactggggccccaggtcctgctgtatcagttctctttggtggggggctaaggtttggggcgaggcaacctgagacaagaaaacgcagtaaacattctgattccctgtacacagatgcagcaccaggggaagggccagtggtgcaagtatttctttttaacaggtgaagtttttggaaaaagtcactctccctacccctcagtatccttaccatcaactttggttttatccttccagtctttattatatgcttgcttttacatagttgtaataatatacacataaagtattttgtatcctgcttttatcattcaacattgtacatgttataagcattttactatattgttatatatcttcacaaagttgatctgtaaagctgtgtaatttgaaggcatccatagggtgactgtaccataattttgattcatcccttgttgttggattcttggtcaggggttgtttgttttgttttattggtaactttaaaattttgaatacaatttcagatttacagaaaagttgcaggaatatcacaaagaactcctatatatcttttatccagatttactgagtgtttacattttatcccatttgccttatctatatttcatgttgcattttcttaatcatttgagaataatttgcacagataccccattatgcccaaaacagtatgcatttccctaagaacaggacattctcttctaagagaagaagagaattactttaagcattattcagtatttttttaagtattattatcaaaatcaggaagtttaacagtgatttaatactgttatctaacccatgattcatatttaaattttgccatttatcccaataatgtcctttgtagccattcttttaccttgtgcaggatcatgttacatttgtaaacgtgtgtctctcaatactgcagattcctcaactttcttttgtctttcattaccatgacatttttgaagaatacaggctattttgtcgaatgttcctcagtttggatttgtgtgatggttccgcatgactaggtgagggttttgcattctgggtgggaatatcacagaagcagtgtgtcgtcagtgcgtcgtaatcagcatataatgtcagttggtcccattaatgttgttaactctgttcaccgcttaggttggtgtctgccagatttcattttaaatttacgatttcctctttgtaatttacaagtaatttgtggggagatactttgagactatataagtattttgttcctcattcaccagttatatagtatcagttgattagtcttgtcccagttattactgtcatgattgaccaacatgatttcctaactccataatgccttctacatttattggttgacattctacatacaaagaaaaacatcctttctcaccatttatttattcacttgtttatcaatatggatgcagggattcctgttttactcagagttgcaagccattgctttgattttatcttgattctcaaattgtcccagatttatagcggcctcttgtgtgtttgtagcttgctcccatcatgttttgagtactttcttaccttctggcataacaagatgttccaggctcatcttgaatgttccctaccctagccctggaatcagccatttctccagggagtcttggttccttataatggagaatggtatttatttatttttatttgatttgattattattactatttttgagacagagtctcgctcttgtcgcccaggctggattgcaatggcacaatctcagctcactgcaacctccacctaccaggttcaagcaattctcctgcctcagccttccaagtagctgggattacaggtgcctgcccccacacccagctaatttttgcatttttggtagaaatgggggttttaccatgttggggaggctggtctcgaactcctgacctcaggtgatctgcccacctcaacctcccaaagtgctgggattacaggtgtgagccaccatacccagccagagaatgttatttagaaaccaagatctgggtgccaaatgtgctgcttgttactggaatgtcattgcctctaggctctcaccatacagtgcaaagagatgatagatagatagatagatagatagatagatagatagatagatgatagatatagatagatagatagattgattgatttgtagaaacaagataggttagagatacctgacataaatagatactaaaaatcatgaattcacactgatgctttgagaccagccctgtaggtttattccagtctgcccccttttccatgttgttaactctttcctccagagagacaaagatttcaggttgctttgttaagttccatctaatgatcattctgacgtaagtctgtttttcttatttccttggaatgatgtctcctctggtttcagaacttcctcctctgcttcctgtatcctgaggctggcggggccagttgtctttagggcttgtgcatttttgtaaagagcttgcacgtgtggaaatcaagtaggccagtagtgggttaggggtactgagccagaagcctctacaaggaataacaggagcacaaaggaagaaggtggtattccagctggggacccaggagggaggactttgtggagaacctgatgcttgaactgagtctaaaaggtgtaaaagtgtttgttgcttctgcctccctgtctgtctggcagggtgaggtaggcgcatctagggaaatgtcaagtggcttggtgtagggtaaagtcagtgaggcccatggagaaaaacgagcaggagccacatcacatgggtgtctgataggacctgggaggcgctttccacattaccattgtcgcttcgtgatctggacacaccagaaggcgtgagactggaggcaggaagagcagccaggcttatccctaccctcaggagagctgaaaagggcaggtatggtggggccagagctcaggagagtttcggaaccactgagatcggtccttgatttgatgagaggcttgaggggagagggaggtagctaggatgccccgcaagcttctggcccagacactgggcagacaatgaaaccctttgtaacacatgaggcaataggtttggggcagatgggaggggaagcagtggtgggggcagtgagtgctgaaggtgttttaagaagcggctctgggccaggcacagtggcttatgcctgtattcctagcattttgggaggccgaggtgggagaatcacttgagcccaagaatttgagaccagcctggggaatatagtgagaccctgtccctacaaaaataaaaacaactagctgggtgtgtggtggtgcatgcctgtaggcccagctacgcgggaacatcacctgagcccaggaggttgaggttgcagtgagctacagttgcgccactgcactccagcctaggtgacagagcaagatcttgtctcaaaaaaaaaagcagctctggatgggaagggaggccagttgctttaagtaggggagatagagttaaaggaggctttgttttatttaaaggtgggacaaacttaagcatgttaataaaattcagagaagagaaagagaatgactatcagagccatgtttggaagaaaatggggtccagagcacaggaaggggacctgtgttcagagggtgcctcactgctgaggccacaggaaagaatctgtaggtggaggggaggccgaagaggggaagtttcatgcttgataattaaaattttctgagataggaatgtcatatttacctatttaagccaagtttttttagataaaaggtatggaacctgctttccccttggctagttcagcgtttgggctccggagtgctgaagatgaggactggacttcgagctggtgtgatcccagtattcagtgtcagtactcagtgacaaaataaatgagagaaacgggaataagaattgtcgcctacacaaaaataccagcaactgttaactcttcccagaagattttcattctgaatgctcctgtagctaggaaccctaaaaagtctttgaagcaactcaagttttaaaaaaggggaggaactcctggaaatctcaggatggggccaagatgtggctggagagtgtgtggtgatggagggcgtgtcttttgccgagcacactcagggcccacgggaagcccatagacttcaaggacatcaagccccaaggtggtgggattttccccaccagtacttggcagcctagggggaaggggagggcgggagaagataatggggatccctggctccaaacataggaggacacatctgtgctacagtgcgcacatgcctggatgtacactctgtctttggagacactggctaagattctctgctccatgtttggacagggtcgtgcctgatctgagataaatggacaagaacaactgaagcctgtcttctggtgcatgtgtcacctgccgataactgcatcttgtgataaagttgggtgatttacagtctccaccaaatgctaaactctggggtcttacgcctttataactccatgggccccagcaaaggttcaggctcaaaacaggtgtcaaatagataactgttgaatgattgttccccagttgcaggctctgccacctggcgttcatactgtctgtgaaaggacccagctcacctttccctctttatctcccagtccttcccaacagcgccgacacctcatggaaactgattgcaaatgtgctacttctcacttctgtgtggcccgaggaggctgggttaatgctgggcttggtaccttaagcaccctttctcccttccccatcttcattctcagaattacacctgtctgaagcaggcattttccaatgccctagatgggaatataagtgtaaggagatgtgaagcatttgcctgtgtgtcagaacattcactgaggatcctcataggcacttctagaaaccaaatccttgaagatgactaaccagaaatgcccgtcatagcactgtttacagttgcaaaaactgaagccaattgaaatgtccatcaggaggggattaaatgaattatggtacagttacaccgttgaatattttacagccattgaagatgatatatagctatattcattgacaaggaaaactcatattttttagtgaaaaaagcaggttatagaattgcatgatattcacatttatataaaactttatatatgggaaggatgttgattgaattgttaataactatggtcacctctagagatggaagtttgcattacctttaatttttaataccattttgtattgcttaaaatttgtatgtattatcgttaaaataagaaaaatcaaataaagctattttcattatgggaaaacaa

SEQ ID NO: 29508 - DNA, 1971 bp, Homo sapiens
  source 1..1971: mol_type = unassigned DNA
gcgggtggaagaagatggcgtcgggtggtggtggctgtagcgcttcggagagactgcctccgcccttccccggcctggagccggagtccgagggggcggccgggggatcagaacccgaggctggggacagcgacaccgagggggaggacattttcaccggcgccgcggtggtcagtaaacatcagtctccaaagataactacatcccttcttcccatcaacaatggctccaaagaaaatgggatccatgaagaacaagaccaagagccacaggatctctttgcagatgccacagtggagctatccttggacagcacacaaaataatcagaagaaggtgctagccaaaacactcatttctcttcctcctcaggaagccacaaattcttcgaagccccagccaacctatgaggagctagaggaagaagaacaggaggatcaatttgatttgacagtcggtataactgatcctgagaagataggggatggtatgaatgcatatgtagcctacaaagttacaacacagacaagcttaccattgttcagaagcaaacagtttgcagtaaaaagaagatttagtgactttctgggtctttatgagaagctttccgagaagcactctcagaatggcttcattgtccctccgcccccggagaagagcctcatagggatgacaaaagtgaaagttgggaaggaagattcttcttctgcagaatttcttgaaaaacggagggccgctttagaaaggtaccttcagaggattgtaaatcatcctaccatgttacaggaccctgacgtcagagagttcttggaaaaagaagagctgccacgtgccgtgggtacccagacattgagtggtgctggtctcctcaagatgttcaacaaagccacagatgccgtcagcaaaatgaccatcaagatgaatgaatcagacatttggtttgaggagaagctccaggaggtagagtgtgaggagcagcgcttacggaaactgcatgctgttgtagaaactctagtcaaccataggaaagagctagcgctgaacacagcccagtttgcaaagagtctagccatgcttgggagctctgaggacaacacggcattgtcacgggcactctcccagctggctgaggtggaagaaaaaattgagcagctccaccaggaacaggccaacaatgacttcttcctccttgctgagctcctgagtgactacattcgcctcctggccatagtccgcgctgccttcgaccagcgcatgaagacatggcagcgctggcaggatgcccaagccacactgcagaagaagcgggaggccgaggctcggctgctgtgggccaacaagcctgataagctgcagcaggccaaggacgagatcctcgagtgggagtctcgggtgactcaatatgaaagggacttcgagaggatttcaacagtggtccgaaaagaagtgatacggtttgagaaagagaaatccaaggacttcaagaaccacgtgatcaagtaccttgagacactcctttactcacagcagcagctggcaaagtactgggaagccttccttcctgaggcaaaggccatctcctaatggaccaaggaccccagagcccacctgtgtgacgctgcctttttatacactgtcctcctccaccttgatggacccctagtgatgcatcctgcctaggctggacttaaccccttcctccctgtccccacgaccaactgtccccagttactctaaccgttatttcatttagcttccatatatattttcttacctaagagaatagtttcctgctttaagcaaaagacctacaataggtggtggaattatgggatggggtggagtattgatataaatatataaatacaaatgtatatttttcaggatgtggtttaggaactgggaataacgttttctgttactcctgatggtgccatgaaaaggttatgtaataaaatattttaaaatcagg

SEQ ID NO: 29509 - DNA, 1374 bp, Homo sapiens
  source 1..1374: mol_type = unassigned DNA
atggcgtcgggtggtggtggctgtagcgcttcggagagactgcctccgcccttccccggcctggagccggagtccgagggggcggccgggggatcagaacccgaggctggggacagcgacaccgagggggaggacattttcaccggcgccgcggtggtcagtaaacatcagtctccaaagataactacatcccttcttcccatcaacaatggctccaaagaaaatgggatccatgaagaacaagaccaagagccacaggatctctttgcaggggatggtatgaatgcatatgtagcctacaaagttacaacacagacaagcttaccattgttcagaagcaaacagtttgcagtaaaaagaagatttagtgactttctgggtctttatgagaagctttccgagaagcactctcagaatggcttcattgtccctccgcccccggagaagagcctcatagggatgacaaaagtgaaagttgggaaggaagattcttcttctgcagaatttcttgaaaaacggagggccgctttagaaaggtaccttcagaggattgtaaatcatcctaccatgttacaggaccctgacgtcagagagttcttggaaaaagaagagctgccacgtgccgtgggtacccagacattgagtggtgctggtctcctcaagatgttcaacaaagccacagatgccgtcagcaaaatgaccatcaagatgaatgaatcagacatttggtttgaggagaagctccaggaggtagagtgtgaggagcagcgcttacggaaactgcatgctgttgtagaaactctagtcaaccataggaaagagctagcgctgaacacagcccagtttgcaaagagtctagccatgcttgggagctctgaggacaacacggcattgtcacgggcactctcccagctggctgaggtggaagaaaaaattgagcagctccaccaggaacaggccaacaatgacttcttcctccttgctgagctcctgagtgactacattcgcctcctggccatagtccgcgctgccttcgaccagcgcatgaagacatggcagcgctggcaggatgcccaagccacactgcagaagaagcgggaggccgaggctcggctgctgtgggccaacaagcctgataagctgcagcaggccaaggacgagatcctcgagtgggagtctcgggtgactcaatatgaaagggacttcgagaggatttcaacagtggtccgaaaagaagtgatacggtttgagaaagagaaatccaaggacttcaagaaccacgtgatcaagtaccttgagacactcctttactcacagcagcagctggcaaagtactgggaagccttccttcctgaggcaaaggccatctcctaa

SEQ ID NO: 29510 - DNA, 1374 bp, Homo sapiens; identical to SEQ ID NO: 29509
  source 1..1374: mol_type = unassigned DNA

SEQ ID NO: 29511 - DNA, 3299 bp, Homo sapiens
  source 1..3299: mol_type = unassigned DNA
agacgcggacgtcgctcttccaagatggcggcgcgtccgtcgcgagcgaccgggccgaggggaggccagcgaagccgagtaaaaccgccgcccgggagaagactgaaggagcagttgccgccgttggcggcggcccgagcagttttcgctgctgctacggctgtaataatgttaactgaggccagtctatccatatggggatggggaagccttggcattgtcctttttctgataacctttggaccctttgtaatattttatttgacattttatatcctctgctttgtgggtgggggtttagtggttactctcctgtttggaaaaacaaactcagagaagtacctagaacagtgtgaacactcatttcttcctccaacatcacctggggttcctaagtgcttagaagaaatgaaacgggaagccaggactattaagattgatagaagattgacgggtgccaatataattgatgaacctctccagcaagttatccagttttccttgagggattatgtccagtattggtattatacactaagcgatgatgaatcttttcttcttgaaattaggcagactcttcaaaacgcactcattcagtttgctactaggtcaaaagaaatagactggcaaccttattttactacacgcattgtagatgactttggcacacacttacgagtattcagaaaggctcaacagaaaataacagagaaagatgatcaagtgaaaggtacagcagaagatcttgtagataccttctttgaagttgaagttgaaatggagaaggaggtttgccgtgatctagtgtgcacttcccccaaagatgaagaaggattcctaagggatttgtgtgaggtcttactatatttattgctacctcctggagatttccagaacaagatcatgcgatactttgtcagggaaatccttgcacgaggaattcttcttccattaataaatcaactcagtgatcctgattatattaatcagtatgtcatatggatgatccgtgattctaactgcaactatgaggcctttatgaacattattaaattgagtgacaatattggagagctagaagcagtcagagataaggcagcagaagaattacagtatcttagatctctagatacagctggtgatgatatcaacactatcaaaaatcaaataaatagcttactattcgtaaagaaggtatgtgactcaagaatacagcgattgcagtcaggcaaagaaataaatactgtgaaacttgcagcaaactttgggaaactttgcacagtccccctggacagcattcttgtagacaatgttgcactacaattttttatggattacatgcagcaaactggaggtcaagcacatctattcttttggatgacagtggaaggataccgggttaccgcccaacagcagctagaagttttattaagtcgtcagagagatggaaaacatcaaaccaaccaaaccaaaggtcttttaagagcagctgctgttggaatttatgaacagtatttatcagaaaaggcatctccaagagttactgttgatgactatttagtagcaaaattagcagatactttgaatcatgaagatccaacccctgaaatctttgatgacattcaaagaaaggtatatgaattgatgctacgagatgaaagattttatccttccttcagacagaatgcactttatgtgcgcatgttagctgagcttgacatgttaaaagatcctagtttcagaggatccgatgatggggatggagaatcttttaatgggtctcctacaggaagcataaatttgtctttagatgacctttcaaatgtttcttctgatgactcagtacaacttcatgcctacatttcagacacaggcgtttgtaatgatcatggcaagacatatgcattatatgccatcactgtacaccggcgcaacctaaacagtgaggagatgtggaaaacctatcgtcgttatagtgacttccatgacttccacatgagaatcactgaacagtttgaaagtctctcaagcatattgaaacttcctggaaaaaagacttttaataatatggatagagattttttagaaaagagaaaaaaggatctaaatgcatatttgcagttactgttagctcctgaaatgatgaaggcatcccccgctttagctcactatgtgtatgatttccttgagaacaaagcctacagtaaaggaaaaggggattttgctcgcaagatggacacttttgtaaatccacttcgcaattcaatgaggaatgtttcaaatgcagttaaatcccttcctgatagcttggcagagggaatgactaaaatgtcagacaacatgggcaaaatgtcagaaagattaggtcaagacataaagcaatcattttttaaggtgcctcctttaattcctaagactgattcagaccctgaacatcgccgagtttcggctcaacttgacgataatgtggatgacaatattccacttagggtaatgctgcttctcatggatgaagtattcgacttaaaagaaagaaatcagtggttgcgaaggaatatcaaaaacctacttcaacagcttattagagctacatatggcgatactattaatagaaaaatagttgaccatgttgactggatgacttcacctgaacaagtagccgactcagtgaaacgtttcagagatgcattttggccaaatggcattttagcagaggctgttccatgcagagataaaagtattcgaatgagaacaagagtagcaggaaaaacgaaattacttgcaattatgccagatgagctgaagcacattattggggctgagacaacacggaaaggtattcttcgtgtttttgaaatgtttcagcacaaccaattaaataggagaatggtttatgtcttcttggaaggctttttagaaaccttatttccacagtataaattccgtgaacttttcaacaaactgcattcacggtcaaagcagatgcagaaatataaacagaaacttcaaactactcaagcgccttctttgcagaaaaggtgacactccactctatgaagctggtgttcattttgtccaggactaatggtatggacagatcttctggggcttaactcaaatactgttgtgtctgcaccagtcttttagtgtctcaaaatagattattaatacatccataagtctgtggttcttctcattctcatctataatccaccactaccaagagagatttctgtgtcttaaatgatttggtgcatattttgcaacattgagagaaaactgcccccatctcaagcaag

SEQ ID NO: 29512 - DNA, 4132 bp, Homo sapiens
  source 1..4132: mol_type = unassigned DNA
gctcttccaagatggcggcgcgtccgtcgcgagcgaccgggccgaggggaggccagcgaagccgagtaaaaccgccgcccgggagaagactgaaggagcagttgccgccgttggcggcggcccgagcagttttcgctgctgctacggctgttgccatgaggcgaggctagggaggacctcacttccccggggtgtaataatgttaactgaggccagtctatccatatggggatggggaagccttggcattgtcctttttctgataacctttggaccctttgtaatattttatttgacattttatatcctctgctttgtgggtgggggtttagtggttactctcctgtttggaaaaacaaactcagagaagtacctagaacagtgtgaacactcatttcttcctccaacatcacctggggttcctaagtgcttagaagaaatgaaacgggaagccaggactattaagattgatagaagattgacgggtgccaatataattgatgaacctctccagcaagttatccagttttccttgagggattatgtccagtattggtattatacactaagcgatgatgaatcttttcttcttgaaattaggcagactcttcaaaacgcactcattcagtttgctactaggtcaaaagaaatagactggcaaccttattttactacacgcattgtagatgactttggcacacacttacgagtattcagaaaggctcaacagaaaataacagagaaagatgatcaagtgaaaggtacagcagaagatcttgtagataccttctttgaagttgaagttgaaatggagaaggaggtttgccgtgatctagtgtgcacttcccccaaagatgaagaaggattcctaagggatttgtgtgaggtcttactatatttattgctacctcctggagatttccagaacaagatcatgcgatactttgtcagggaaatccttgcacgaggaattcttcttccattaataaatcaactcagtgatcctgattatattaatcagtatgtcatatggatgatccgtgattctaactgcaactatgaggcctttatgaacattattaaattgagtgacaatattggagagctagaagcagtcagagataaggcagcagaagaattacagtatcttagatctctagatacagctggtgatgatatcaacactatcaaaaatcaaataaatagcttactattcgtaaagaaggtatgtgactcaagaatacagcgattgcagtcaggcaaagaaataaatactgtgaaacttgcagcaaactttgggaaactttgcacagtccccctggacagcattcttgtagacaatgttgcactacaattttttatggattacatgcagcaaactggaggtcaagcacatctattcttttggatgacagtggaaggataccgggttaccgcccaacagcagctagaagttttattaagtcgtcagagagatggaaaacatcaaaccaaccaaaccaaaggtcttttaagagcagctgctgttggaatttatgaacagtatttatcagaaaaggcatctccaagagttactgttgatgactatttagtagcaaaattagcagatactttgaatcatgaagatccaacccctgaaatctttgatgacattcaaagaaaggtatatgaattgatgctacgagatgaaagattttatccttccttcagacagaatgcactttatgtgcgcatgttagctgagcttgacatgttaaaagatcctagtttcagaggatccgatgatggggatggagaatcttttaatgggtctcctacaggaagcataaatttgtctttagatgacctttcaaatgtttcttctgatgactcagtacaacttcatgcctacatttcagacacaggcgtttgtaatgatcatggcaagacatatgcattatatgccatcactgtacaccggcgcaacctaaacagtgaggagatgtggaaaacctatcgtcgttatagtgacttccatgacttccacatgagaatcactgaacagtttgaaagtctctcaagcatattgaaacttcctggaaaaaagacttttaataatatggatagagattttttagaaaagagaaaaaaggatctaaatgcatatttgcagttactgttagctcctgaaatgatgaaggcatcccccgctttagctcactatgtgtatgatttccttgagaacaaagcctacagtaaaggaaaaggggattttgctcgcaagatggacacttttgtaaatccacttcgcaattcaatgaggaatgtttcaaatgcagttaaatcccttcctgatagcttggcagagggaatgactaaaatgtcagacaacatgggcaaaatgtcagaaagattaggtcaagacataaagcaatcattttttaaggtgcctcctttaattcctaagactgattcagaccctgaacatcgccgagtttcggctcaacttgacgataatgtggatgacaatattccacttagggtaatgctgcttctcatggatgaagtattcgacttaaaagaaagaaatcagtggttgcgaaggaatatcaaaaacctacttcaacagcttattagagctacatatggcgatactattaatagaaaaatagttgaccatgttgactggatgacttcacctgaacaagtagccgactcagtgaaacgtttcagagatgcattttggccaaatggcattttagcagaggctgttccatgcagagataaaagtattcgaatgagaacaagagtagcaggaaaaacgaaattacttgcaattatgccagatgagctgaagcacattattggggctgagacaacacggaaaggtattcttcgtgtttttgaaatgtttcagcacaaccaattaaataggagaatggtttatgtcttcttggaaggctttttagaaaccttatttccacagtataaattccgtgaacttttcaacaaactgcattcacggtcaaagcagatgcagaaatataaacagaaacttcaaactactcaagcgccttctttgcagaaaaggtgacactccactctatgaagctggtgttcattttgtccaggactaatggtatggacagatcttctggggcttaactcaaatactgttgtgtctgcaccagtcttttagtgtctcaaaatagattattaatacatccataagtctgtggttcttctcattctcatctataatccaccactaccaagagagatttctgtgtcttaaatgatttggtgcatattttgcaacattgagagaaaactgcccccatctcaagcaagaatggcgttggtttcttccatttcaaactaatcagcattctccagcaatgacaaagtgccagagtgtatatatgaaagctaaggaaagcacaaaacaatggttcagagataaattggctaatttgtttaacagttggagactgtgcaatgtacgacttggaggagtttgtttggcataatgattttgtaggtctgtcagcattttgatatattgtggattagccaggtgaatgatccttgaaacatctctttcaggtctggagaaagagacagaatgcccttaaagtgtgaaataaccttatacctgaattacagttttgtgatataaaataaagctgagtataaaataaaaccaatcaaacacagaatttgattggatttgttattcattggtatacaacaatttttattcttatgtgtgctttaagggctgtgttttgctcttagggtactcaattttatgtttccttttggcattctttgtgcaaaaagaagcatgtggtggctctcatttaaatttcaaaattattagttttatctttaacagattactgattatacagaagatataatttattggaagaactgccaaatacattttgtccttctaaaaatatggaaatttaaatagtagtctggaaagttaccatatgataatttttaattgtgtgatctagacatgccttaggtaactgcagaaatagcaaattaaatgattaatgagcttattagtcatagtaaacatacagattcctaattctatgacagtgtacatatatgaaaataaatgatgaaaaaagaa

SEQ ID NO: 29513 - DNA, 771 bp, Homo sapiens
  source 1..771: mol_type = unassigned DNA
atgtcccgccaggcgaaggatgacttcctgcggcactacacagtgtcggaccccaggactcaccccaagggctacaccgagtacaaagtaaccgcgcagttcatctcaaagaaggacccagaggatgtcaaagaggtggtggtctggaagcggtacagcgacttccgcaagctgcatggagacctggcctacacccaccgcaacctcttccgccgcctcgaggagttccctgctttcccccgggcccaggtgtttggccggtttgaagcctcagtgatcgaggagcggcgaaagggggcagaggacctgcttcgcttcactgtgcacatacctgcgctcaacaacagcccccagctcaaggagttcttccggggtggggaggtgacccgacccttggaggtgtccagggacctacacatcctgccaccccctctgatccccaccccgccccctgatgacccccggctatcccaactgctccctgcagaaaggaggggcctcgaggaattggaggtgccagtggaccccccaccatccagccctgcccaggaggccctggatctcctctttaactgtgagagcaccgaggaggcatctggttcccctgcccgaggccccctcaccgaggctgagcttgccctcttcgaccccttctccaaggaaggtgacccgttgcctgcccgccaggaaggtgtgaagaagaaggcagctgagtacctgaagcgggcagaggagatcctgcgcctgcacctgtctcaactcccaccctaa

SEQ ID NO: 29514 - DNA, 1939 bp, Homo sapiens
  source 1..1939: mol_type = unassigned DNA
gacaaaatccctaggccagaggaagaagagcgcaggcctggcgaggcggcggcgggcggaggctgggccggaggggtggggacggcgaggaggtggaggccggcgctccgctccgctccagctcggtttcatgtcccgccaggcgaaggatgacttcctgcggcactacacagtgtcggaccccaggactcaccccaagggctacaccgagtacaaagtaaccgcgcagttcatctcaaagaaggacccagaggatgtcaaagaggtggtggtctggaagcggtacagcgacttccgcaagctgcatggagacctggcctacacccaccgcaacctcttccgccgcctcgaggagttccctgctttcccccgggcccaggtgtttggccggtttgaagcctcagtgatcgaggagcggcgaaagggggcagaggacctgcttcgcttcactgtgcacatacctgcgctcaacaacagcccccagctcaaggagttcttccggggtggggaggtgacccgacccttggaggtgtccagggacctacacatcctgccaccccctctgatccccaccccgccccctgatgacccccggctatcccaactgctccctgcagaaaggaggggcctcgaggaattggaggtgccagtggaccccccaccatccagccctgcccaggaggccctggatctcctctttaactgtgagagcaccgaggaggcatctggttcccctgcccgaggccccctcaccgaggctgagcttgccctcttcgaccccttctccaaggaagaaggcgcagcccccagccccacccatgtggctgagctggcaacgatggaggtggagtctgcaaggctggaccaggaaccctgggagccaggagggcaggaggaggaagaggatggggaaggagggcccacccctgcctacctaagccaggccacagagctcatcacccaggccctgcgggatgagaaggcaggcgcttacgctgctgcactccagggctatcgagacggcgtgcacgtcttgcttcagggagtccccagtgacccgttgcctgcccgccaggaaggtgtgaagaagaaggcagctgagtacctgaagcgggcagaggagatcctgcgcctgcacctgtctcaactcccaccctaacagggagtgggccattccctgggactctcgctcctgcactgccagccccttctcctctccccagggcctggccctacctcctggtcttgtaattacaggagccatttctgtaggtaactggaccaagaatgagaaaaataatgaattcttagctccctgattacacctgccaccttggaatcaaggactcacacttctgaccctgcctgtctttttggggtttttttgagttggagtctcgctgtgtcgcccagactggagtgcagtggtgggatcgcggctcactgcaacctccacctcccaggttcaagcagttctcctgtctcagcctccccagtagctgagattgcaggcacatgccaccacgcccagctaatattttgtattttcagtagggacggggttacaccatgttggccaggctggtctcgaactcctgacctcaagtgatccacccgcctcagtctcccaaagtgctgagattacaggcatgagtcactacgcccggcccatgtctgtctgtcttgatgtgtgagcagcagctgtggtcattaaaccattagtttacccctctagaactggggtctgcaaactcccacctgcagccaaatctggcccacctcctttttaatgtaagggctgtgagagtggtttttactttttttaatgattaaaaaaatcaaaataatattctgtgacaatgacaggtgaaatttatatgtgacaagtgaaaattatatgaaatttaagagtccataaataaaatttgttggaacacaa

SEQ ID NO: 29515 - DNA, 2044 bp, Homo sapiens
  source 1..2044: mol_type = unassigned DNA
ccctatccggacaggtggctcttgccctttagactacagttcccagcatgcccaggcgattgcgtcccagaaccgacgtcccaccgccttcccacatcggatcgcagggctcccaaaatggcgagtgaggctgcggggactcgctgagcagcggagggggagcgtgcagagccgctgcggccctcacagtccggagcccggccgtgccgtgccgtagggaacatgcacttttccattcccgaaaccgagtcccgcagcggggacagcggcggctccgcctacgtggcctataacattcacgtgaatggagtcctgcactgtcgggtgcgctacagccagctcctggggctgcacgagcagcttcggaaggagtatggggccaatgtgcttcctgcattccccccaaagaagcttttctctctgactcctgctgaggtagaacagaggagagagcagttagagaagtacatgcaagctgttcggcaagacccattgcttgggagcagcgagactttcaacagtttcctgcgtcgggcacaacaggagacacagcaggtccccacagaggaagtgtccttggaagtgctgctcagcaacgggcagaaagttctggtcaacgtgctaacttcagatcagactgaggatgtcctggaggctgtagctgcaaagctggatcttccagatgacttgattggatactttagtctattcttagttcgagaaaaagaggatggagccttttcttttgtacggaagttgcaagagtttgagctgccttatgtgtctgtcaccagccttcggagtcaagagtataagattgtgctaaggaagagttattgggactctgcctatgatgacgatgtcatggagaaccgggttggcctgaacctgctttatgctcagacggtatcagatattgagcgtgggtggatcttggtcaccaaggaacagcaccggcaactcaaatctctgcaagagaaagtctccaagaaggagttcctgagactggcccagacgctgcggcactatggctacttgcgctttgatgcctgtgtggctgacttcccagaaaaggactgtcctgtggtggtgagcgcgggcaacagtgagctcagcctgcagctccgcctgcctggccagcaactccgagaaggctccttccgggtcacccgcatgcgatgctggcgggtcacctcctctgtaccattgcccagtggaagcacgagcagcccaggccggggccggggtgaggtgcgcctggaactggcttttgaatacctcatgagcaaggaccggctacagtgggtcaccatcactagcccccaggctatcatgatgagcatctgcttgcagtccatggttgatgaactgatggtgaagaaatctggcggcagtatcaggaagatgctgcgccggcgggtggggggtactctgagacgctcagacagccagcaagcagtgaagtccccaccactgcttgagtcacctgatgccacccgggagtctatggtcaaactctcaagtaagctgagtgccgtgagcttgcggggaattggcagtcccagcacagatgccagtgccagtgatgtccacggcaatttcgccttcgagggcattggagatgaggatctgtaatctccactgcttggatgtctgccctctaccccagaggaatttacagaaacttgccctgtgcctgtgtcccccatgctaggggcggaggggtcttttccttcttctttcctacctaccccttttctcttggccaggggcctcgtatcctacctttccttgtcccctgggctggctgcacagaggattgccccttctcttttcagagctggccctcgatgccaaattagcatttagtattttgcacaaagtctaagggaccatggctgcctgccttggggaggaaccatatctccctctgggccgcttctggcctcttggagccatgggccaaaggccaaggggatgggcagaggtctgtgtttggtctggcccagttccccatcattaaactcagcctgactgctgccta

SEQ ID NO: 29516 - DNA, 1451 bp, Homo sapiens
  source 1..1451: mol_type = unassigned DNA
aaaatggcgagtgaggctgcggggactcgctgagcagcggagggggagcgtgcagagccgctgcggccctcacagtccggagcccggccgtgccgtgccgtagggaacatgcacttttccattcccgaaaccgagtcccgcagcggggacagcggcggctccgcctacgtgcttcggaaggagtatggggccaatgtgcttcctgcattccccccaaagaagcttttctctctgactcctgctgaggtagaacagaggagagagcagttagagaagtacatgcaagctgttcggcaagacccattgcttgggagcagcgagactttcaacagtttcctgcgtcgggcacaacaggagacacagcaggtccccacagaggaagtgtccttggaagtgctgctcagcaacgggcagaaagttctggtcaacgtgctaacttcagatcagactgaggatgtcctggaggctgtagctgcaaagctggatcttccagatgacttgattggatactttagtctattcttagttcgagaaaaagaggatggagccttttcttttgtacggaagttgcaagagtttgagctgccttatgtgtctgtcaccagccttcggagtcaagagtataagattgtgctaaggaagagttattgggactctgcctatgatgacgatgtcatggagaaccgggttggcctgaacctgctttatgctcagacggtatcagatattgagcgtgggtggatcttggtcaccaaggaacagcaccggcaactcaaatctctgcaagagaaagtctccaagaaggagttcctgagactggcccagacgctgcggcactatggctacttgcgctttgatgcctgtgtggctgacttcccagaaaaggactgtcctgtggtggtgagcgcgggcaacagtgagctcagcctgcagctccgcctgcctggccagcaactccgagaaggctccttccgggtcacccgcatgcgatgctggcgggtcacctcctctgtaccattgcccagtggaagcacgagcagcccaggccggggccggggtgaggtgcgcctggaactggcttttgaatacctcatgagcaaggaccggctacagtgggtcaccatcactagcccccaggctatcatgatgagcatctgcttgcagtccatggttgatgaactgatggtgaagaaatctggcggcagtatcaggaagatgctgcgccggcgggtggggggtactctgagacgctcagacagccagcaagcagtgaagtccccaccactgcttgagtcacctgatgccacccgggagtctatggtcaaactctcaagtaagctgagtgccgtgagcttgcggggaattggcagtcccagcacagatgccagtgccagtgatgtccacggcaatttcgccttcgagggcattggagatgaggatctgtaatctcc

SEQ ID NO: 29517 - DNA, 1844 bp, Homo sapiens
  source 1..1844: mol_type = unassigned DNA
acttttgtgtcctcaggcctataacattcacgtgaatggagtcctgcactgtcgggtgcgctacagccagctcctggggctgcacgagcagcttcggaaggagtatggggccaatgtgcttcctgcattccccccaaagaagcttttctctctgactcctgctgaggtagaacagaggagagagcagttagagaagtacatgcaagctgttctatagactggactcacctagatggcagccaagggtggggcaggtgaagaatttatgcaaacagtgagtgagttcggcaagacccattgcttgggagcagcgagactttcaacagtttcctgcgtcgggcacaacaggagacacagcaggtccccacagaggaagtgtccttggaagtgctgctcagcaacgggcagaaagttctggtcaacgtgctaacttcagatcagactgaggatgtcctggaggctgtagctgcaaagctggatcttccagatgacttgattggatactttagtctattcttagttcgagaaaaagaggatggagccttttcttttgtacggaagttgcaagagtttgagctgccttatgtgtctgtcaccagccttcggagtcaagagtataagattgtgctaaggaagagttattgggactctgcctatgatgacgatgtcatggagaaccgggttggcctgaacctgctttatgctcagacggtatcagatattgagcgtgggtggatcttggtcaccaaggaacagcaccggcaactcaaatctctgcaagagaaagtctccaagaaggagttcctgagactggcccagacgctgcggcactatggctacttgcgctttgatgcctgtgtggctgacttcccagaaaaggactgtcctgtggtggtgagcgcgggcaacagtgagctcagcctgcagctccgcctgcctggccagcaactccgagaaggctccttccgggtcacccgcatgcgatgctggcgggtcacctcctctgtaccattgcccagtggaagcacgagcagcccaggccggggccggggtgaggtgcgcctggaactggcttttgaatacctcatgagcaaggaccggctacagtgggtcaccatcactagcccccaggctatcatgatgagcatctgcttgcagtccatggttgatgaactgatggtgaagaaatctggcggcagtatcaggaagatgctgcgccggcgggtggggggtactctgagacgctcagacagccagcaagcagtgaagtccccaccactgcttgagtcacctgatgccacccgggagtctatggtcaaactctcaagtaagctgagtgccgtgagcttgcggggaattggcagtcccagcacagatgccagtgccagtgatgtccacggcaatttcgccttcgagggcattggagatgaggatctgtaatctccactgcttggatgtctgccctctaccccagaggaatttacagaaacttgccctgtgcctgtgtcccccatgctaggggcggaggggtcttttccttcttctttcctacctaccccttttctcttggccaggggcctcgtatcctacctttccttgtcccctgggctggctgcacagaggattgccccttctcttttcagagctggccctcgatgccaaattagcatttagtattttgcacaaagtctaagggaccatggctgcctgccttggggaggaaccatatctccctctgggccgcttctggcctcttggagccatgggccaaaggccaaggggatgggcagaggtctgtgtttggtctggcccagttccccatcattaaactcagcctgactgct

SEQ ID NO: 29518 - DNA, 1567 bp, Homo sapiens
  source 1..1567: mol_type = unassigned DNA
atcggatcgcagggctcccaaaatggcgagtgaggctgcggggactcgctgagcagcggagggggagcgtgcagagccgctgcggccctcacagtccggagcccggccgtgccgtgccgtagggaacatgcacttttccattcccgaaaccgagtcccgcagcggggacagcggcggctccgcctacgtgttcggcaagacccattgcttgggagcagcgagactttcaacagtttcctgcgtcgggcacaacaggagacacagcaggtccccacagaggaagtgtccttggaagtgctgctcagcaacgggcagaaagttctggtcaacgtgctaacttcagatcagactgaggatgtcctggaggctgtagctgcaaagctggatcttccagatgacttgattggatactttagtctattcttagttcgagaaaaagaggatggagccttttcttttgtacggaagttgcaagagtttgagctgccttatgtgtctgtcaccagccttcggagtcaagagtataagattgtgctaaggaagagttattgggactctgcctatgatgacgatgtcatggagaaccgggttggcctgaacctgctttatgctcagacggtatcagatattgagcgtgggtggatcttggtcaccaaggaacagcaccggcaactcaaatctctgcaagagaaagtctccaagaaggagttcctgagactggcccagacgctgcggcactatggctacttgcgctttgatgcctgtgtggctgacttcccagaaaaggactgtcctgtggtggtgagcgcgggcaacagtgagctcagcctgcagctccgcctgcctggccagcaactccgagaaggctccttccgggtcacccgcatgcgatgctggcgggtcacctcctctgtaccattgcccagtggaagcacgagcagcccaggccggggccggggtgaggtgcgcctggaactggcttttgaatacctcatgagcaaggaccggctacagtgggtcaccatcactagcccccaggctatcatgatgagcatctgcttgcagtccatggttgatgaactgatggtgaagaaatctggcggcagtatcaggaagatgctgcgccggcgggtggggggtactctgagacgctcagacagccagcaagcagtgaagtccccaccactgcttgagtcacctgatgccacccgggagtctatggtcaaactctcaagtaagctgagtgccgtgagcttgcggggaattggcagtcccagcacagatgccagtgccagtgatgtccacggcaatttcgccttcgagggcattggagatgaggatctgtaatctccactgcttggatgtctgccctctaccccagaggaatttacagaaacttgccctgtgcctgtgtcccccatgctaggggcggaggggtcttttccttcttctttcctacctaccccttttctcttggccaggggcctcgtatcctacctttccttgtcccctgggctggctgcacagaggattgccccttctcttttcagagctggccctcgatgcc

SEQ ID NO: 29519 - DNA, 2128 bp, Homo sapiens
  source 1..2128: mol_type = unassigned DNA
aggccggccgggggcggggaggctggcgggtcggcgcgggcccagccgtgcgtgctcacgtgacgggtccgcgaggcccagctcgcgcagtcgttcgggtgagcgaagatggcggccgagagggaacctcctccgctgggggacgggaagcccaccgactttgaggatctggaggacggagaggacctgttcaccagcactgtctccaccctagagtcaagtccatcatctccagaaccagctagtcttcctgcagaagatattagtgcaaactccaatggcccaaaacccacagaagttgtattagatgatgacagagaagatctttttgcagaagccacagaagaagtttctttggacagccctgaaagggaacctatcctatcctcggaaccttctcctgcagtcacacctgtcactcctactacactcattgctcctagaattgaatcaaagagtatgtctgctcccgtgatctttgatagatccagggaagagattgaagaagaagcaaatggagacatttttgacatagaaattggtgtatcagatccagaaaaagttggtgatggcatgaatgcctatatggcatatagagtaacaacaaagacatctctttccatgttcagtaagagtgaattttcagtgaaaagaagattcagcgactttcttggtttgcacagcaaattagcaagcaaatatttacatgttggttatattgtgccaccagctccagaaaagagtatagtagggatgaccaaggtcaaagtgggtaaagaagactcatcatccactgagtttgtagaaaaacggagagcagctcttgaaaggtatcttcaaagaacagtaaaacatccaactttactacaggatcctgatttaaggcagttcttggaaagttcagagctgcctagagcagttaatacacaggctctgagtggagcaggaatattgaggatggtgaacaaggctgccgacgctgtcaacaaaatgacaatcaagatgaatgaatcggatgcatggtttgaagaaaagcagcagcaatttgagaatctggatcagcaacttaggaaacttcatgtcagtgttgaagccttggtctgtcatagaaaagaactttcagccaacacagctgcctttgctaaaagtgctgccatgttaggtaattctgaggatcatactgctttatctagagctttgtctcagcttgcagaggttgaggagaagatagaccagttacatcaagaacaagcttttgctgacttttatatgttttcagaactacttagtgactacattcgtcttattgctgcagtgaaaggtgtgtttgaccatcgaatgaagtgctggcagaaatgggaagatgctcaaattactttgctcaaaaaacgtgaagctgaagcaaaaatgatggttgctaacaaaccagataaaatacagcaagctaaaaatgaaataagagagtgggaggcgaaagtgcaacaaggggaaagagattttgaacagatatctaaaacgattcgaaaagaagtgggaagatttgagaaagaacgagtgaaggattttaaaaccgttatcatcaagtacttagaatcactagttcaaacacaacaacagctgataaaatactgggaagcattcctacctgaagccaaagccattgcctagcaataagattgttgccgttaagaagaccttggatgttgttccagttatgctggattccacagtgaaatcatttaaaaccatctaaataaaccactatatattttatgaattacatgtggttttatatacacacacacacacacacacacacacacacacacactctgacattttattacaagctgcatgtcctgaccctctttgaattaagtggactgtggcatgacattctgcaatactttgctgaattgaacactattgtgtcttaaatacttgcactaaatagtgcactgcaagaccagaaaattttacaatattttttctttacaatatgttctgtagtatgtttaccctctttatgaagtgaattaccaatgctttgaataatgttcacttatacattcctgtacagaaattacgattttgtgattacagtaataaaatgatattccttgtgaaa

SEQ ID NO: 29520 - DNA, 3304 bp, Homo sapiens
  source 1..3304: mol_type = unassigned DNA
gggcgatcagaagcaggtcacacagcctgtttcctgttttcaaacggggaacttagaaagtggcagcccctcggcttgtcgccggagctgagaaccaagagctcgaaggggccatatgacactcctcccggacccctggacacacacagccctggagactggagccttggagcatggcaagtccagagcaccctgggagccctggctgcatgggacccataacccagtgcacggcaaggacccagcaggaagcaccagccactggccccgacctcccgcacccaggacctgacgggcacttagacacacacagtggcctgagctccaactccagcatgaccacgcgggagcttcagcagtactggcagaaccagaaatgccgctggaagcacgtcaaactgctctttgagatcgcttcagctcgcatcgaggagagaaaagtctctaagtttgtgatggggaaatcaaggcctggagagatgacttatccagggtcacgtggcgagacagggacagcaccagaaccagacccgagatgtccacgtcaaagtgacatgctctgagaggcagcacacacagaataaccctgcatccaaattccaggaagctcttaggggtcatccagctgggcctaggggtgcagggtcagtgctgaggcctgggcagggccgctagcctccctgagctttctggcttcaggctgggaggcacagttcagggtggactgtgaccccttggcctagaatgcccttagctctgctctctagtggctgtccccatagctggaactctgttttggagtggcaaaaccagttccacctgctggtaggggtaggttggctcccaacacatccccagcaggcctctcttgggctcaaaagccaagctgtgcccagccacgtctccaaatgcttcctggcccccatgcagcaactgcatttagctgccttcccagaatttcctgcatgctcacacagcccttccctctggggcccaacaatgccacagcctgttctatcaatcaccagctgttttcctttgagcagtctccttttacttatgcacatttacttgaaaaagaaacttcctattactatcctaaatggaaactcagaatcacttgctataattagaaagtagctacaaaaataaacacaatgaaaccgatcactgttattacaccctaacccgcttttacctgagacaggccctgagcctgaggccgctggtagacttttgttaaaagagagagagacagagacagagaaataagcattagagacctgcaatcaccaagctgagacttctctttgatttactcagaaggactggaaaatgttgtcctgcaaaaggaggtaagtttctcaccacgtagcgctgatcatcccgtgttgcccgtgcgttgctgcagaccatctggggtcttgcccaagcaccctggagactttgctccctggtttcctggtcaccaactcgagtgttcagccctgtgtgctctccagctcctaagtcgtgggcctggtttcagctttgattgcccactcttggctttcaacccgtaggctccggctcctgacgccacaccctgatatcaagaccctcagatggagcgagcgttctgggctggtcgaagcctgaagccgcagtatgtccttgagtgggtccccccctacccatctagctgttgcccccatggtaagatcaagaaaatgccctcccctccaaaagtccccacgccgagccctcatctgtcagctcccaggctcggccccctcactagctccaggctgggaggcacagttcagggcagactgtggcccctcagcatagcatggacttagctctgctctctagtggctgtccccatagctagaactctgttttggagcagcaaaactagttccacctgctggtagggctaagttgactcccaacatgtccccagcgtgttggtgttgggaaccttgatctagctgctcgttttctcagtaaccaaagatccctggcactcctacgatgtctcaggccttatctagagctggggatacagcagtgaccaggacagaactggtccctgcctcacggaagtgaagtgtcaggaggccactcccaaagcaaatggaagctgggacagaatgatgtcctcagccaggtggtcagggaaggcttctcagagggggcgctgttcaaagaatcacagagcatacaaaggagctggccctgggagcacagagaggggagaattttaggcaaagaggtagcaggagcacagccctgaggcaggaaactacccccccaccaccctcggcatcctcagttctggtttgcacccagaaagggggtaggtccaggacacacccggactgatgtgtcacactggctgtgccagctgagagagtgggctccaggcaccactaacagagaagccttgcaaggcaggtccatgcaccgcccgcctccagttaccactcattgcaaaggaaatgagctgggagcctgtgtgtgggccgtgcagacccttttggttacaagccacaaaaacccaggttaatctgatgaggaaggaatttattatctgtaaagtccaggagcaggctagctttacaccaagcaggatccaaggacccacacttgtcacctcatatctctctctctctcccactttcgctttctctgtctcttcttagttctgctttcctccactgtgccttcgctctcagagagagctctcccctggcagtgacaagatggctgcagcagctccagcaacctcagaggactcccccatccagggtccttgtgagctcctcatctgtaggatgtgcagtaaacactcacgtgtcctttcctgaggagcccagtggctggggtgggggctgaggggcagcccctatgccctcacagtgcagcaaccttggttagctcacccatcagggcagacttgggcagaaatcatgtcttggcatattgttttgtaatctgctttttaaattgtcactatatattatgagcatttccctataatatacaatattcttccacattatgtttaatggtttcattgtattctaatgcatattctatagttattttaaccaccccacaatgttgcaaaatgtccttatttgggacaacactgctgcaaacactttgacccatatgtcctttttgtgtgcactcttatggcaacttctaacggtggcatttctgaatcatagacacttttttgacttctacatattttatttttttagttgacaaaaactgtatttatgaatcataaacacttaatgattttgctatt

SEQ ID NO: 29521 - DNA, 2864 bp, Homo sapiens
  source 1..2864: mol_type = unassigned DNA
aaacggggaacttagaaagtggcagcccctcggcttgtcgccggagctgagaaccaagagctcgaaggggccatatgacactcctcccggacccctggacacacacagccctggagactggagccttggagcatggcaagtccagagcaccctgggagccctggctgcatgggacccataacccagtgcacggcaaggacccagcaggaagcaccagccactggccccgacctcccgcacccaggacctgacgggcacttagacacacacagtggcctgagctccaactccagcatgaccacgcgggagcttcagcagtactggcagaaccagaaatgccgctggaagcacgtcaaactgctctttgagatcgcttcagctcgcatcgaggagagaaaagtctctaagtttgtggtgtaccaaatcatcgtcatccagactgggagctttgacaacaacaaggccgtcctggaacggcgctattccgacttcgcgaagctccagaaagcgctgctgaagacgttcagggaggagatcgaagacgtggagtttcccaggaagcacctgactgggaacttcgctgaggagatgatctgtgagcgtcggcgcgccctgcaggagtacctgggcctgctctacgccatccgctgcgtgcgccgctcccgggagttcctggacttcctcacgcggccggagctgcgcgaggctttcggctgcctgcgggccggccagtacccgcgcgccctggagctgctgctgcgcgtgctgccgctgcaggagaagctcaccgcccactgccctgcggccgccgtcccggccctgtgcgccgtgctgctgtgccaccgcgacctcgaccgccccgccgaggccttcgcggccggagagagggccctgcagcgcctgcaggcccgggagggccatcgctactatgcgcctctgctggacgccatggtccgcctggcctacgcgctgggcaaggacttcgtgactctgcaggagaggctggaggagagccagctccggaggcccacgccccgaggcatcaccctgaaggagctcactgtgcgagaatacctgcactgagccggcctgggaccccgcagggacgctggagatttggggtcaccatggctcacagtgggctgtttggggttctttttttttatttttccttttcttttttgttatttgagacagtcttgctctgtcacccagactgaagtgcagtggctcaattatgtctcactgcagcctcaaactcctgggcacaagcaatcctcccacctcagcctcccaagtagctgggattacaggtgcacaccaccacaccaggctaatttttaattttttagtagagacagggtctctctgttgcccaggctggtctctaacttctgaccttaaatgatcttcctgcctcagcttcccaaaacactggggttacaagtgtgagccaccacccctggcctggggttcatttttaatgggaaaagccactgggggctctaactcgctgggtgactttggacaagcccctcctctggtcctcaatttctccatctgtattggacagaggtgctcctgggaccccttggaagcctctgcttgtgtcccacgtcctcttgatgccagggccacttcatctccaaaacacaaaaccaactgccaaaaccgtccagagcagtgtccaccccaccagtgtctttgtgggaagctggagaagaagtttacctcacacattctagacaaaacttagtccatttccttgaagacagttctctccagctgctccaaggcttttctctctgttccttccaccttggaattgctttaaaatatttccatccattatcctaatactatcttagtattctagcccttcccccttaccatgtagacctgacaaagcaaaacaaaagctcacctattgccctcaagaacagcctctacacacacacacacacacacacacacacacacacacacacacacggtgggagttgtatgccatccttttgaagggtgggaggaccctggaccagaaagcaataatggcataagattctgtgataccaggcatttttggcaagggaagttgccaacaatttttctggctgggatggcatagcacattgtctaggggtggattttcattcataaggcagctgttccctgaatggcttccctgggttatgtagaaacagcctggggaggaggtgatacaacatacttaatggggcctctgggcagaaaacagactgaatcctcaacactgccccttttgagggtctgtgatcctggaacttctctgatggactgggatgcccttaactgaggtctgctgtctggaaaggacaccacaggcccagaatgaaggggcatctggaccaatgacctagattcaacacagggcttggagctggtggtacaggctggttttggcccaatgtgtgttggaggctggaagcccctgaagacctaaactgcctggatgagcttattagggtgaattaatgagtctgtaatttgggaaccttaatgtgagacaccacttaaggagaggaacttggcccagcaagtgatcactctagaagtggacagctatgcactagactgcaccagaatctgttcaacagcgacaccttgtggtaaaaactgtagacgccccatcaggctggatgggaaactagaaacagactgtctcatctttggacagatatccctcaaatctcccaatctactccagggaaaagacacttcaagtgagagatattggacttcttgaaaatctaggcctatggaaaattaaagtgttaaatggaaaaattaaagagctatgagtctatttgtaatgatgaaacaga

SEQ ID NO: 29522 - DNA, 632 bp, Homo sapiens
  source 1..632: mol_type = unassigned DNA
gggcgatcagaagcaggtcacacagcctgtttcctgttttcaaacggggaacttagaaagtggcagcccctcggcttgtcgccggagctgagaaccaagagctcgaaggggccatatgacactcctcccggacccctggacacacacagccctggagactggagccttggagcatggcaagtccagagcaccctgggagccctggctgcatgggacccataacccagtgcacggcaaggacccagcaggaagcaccagccactggccccgacctcccgcacccaggacctgacgggcacttagacacacacagtggcctgagctccaactccagcatgaccacgcgggagcttcagcagtactggcagaaccagaaatgccgctggaagcacgtcaaactgctctttgagatcgcttcagctcgcatcgaggagagaaaagtctctaagtttgtggtgtaccaaatcatcgtcatccagactgggagctttgacaacaacaaggccgtcctggaacggcgctattccgacttcgtgactctgcaggagaggctggaggagagccagctccggaggcccacgccccgaggcatcaccctgaaggagctcactgtgcgagaatacctgcactga

SEQ ID NO: 29523 - DNA, 2197 bp, Homo sapiens
  source 1..2197: mol_type = unassigned DNA
gggcgatcagaagcaggtcacacagcctgtttcctgttttcaaacggggaacttagaaagtggcagcccctcggcttgtcgccggagctgagaaccaagagctcgaaggggccatatgacactcctcccggacccctggacacacacagccctggagactggagccttggagcatggcaagtccagagcaccctgggagccctggctgcatgggacccataacccagtgcacggcaaggacccagcaggaagcaccagccactggccccgacctcccgcacccaggacctgacgggcacttagacacacacagtggcctgagctccaactccagcatgaccacgcgggagcttcagcagtactggcagaaccagaaatgccgctggaagcacgtcaaactgctctttgagatcgcttcagctcgcatcgaggagagaaaagtctctaagtttgtggctccggctcctgacgccacaccctgatatcaagaccctcagatggagcgagcgttctgggctggtcgaagcctgaagccgcagtatgtccttgagtgggtccccccctacccatctagctgttgcccccatggtaagatcaagaaaatgccctcccctccaaaagtccccacgccgagccctcatctgtcagctcccaggctcggccccctcactagctccaggctgggaggcacagttcagggcagactgtggcccctcagcatagcatggacttagctctgctctctagtggctgtccccatagctagaactctgttttggagcagcaaaactagttccacctgctggtagggctaagttgactcccaacatgtccccagcgtgttggtgttgggaaccttgatctagctgctcgttttctcagtaaccaaagatccctggcactcctacgatgtctcaggccttatctagagctggggatacagcagtgaccaggacagaactggtccctgcctcacggaagtgaagtgtcaggaggccactcccaaagcaaatggaagctgggacagaatgatgtcctcagccaggtggtcagggaaggcttctcagagggggcgctgttcaaagaatcacagagcatacaaaggagctggccctgggagcacagagaggggagaattttaggcaaagaggtagcaggagcacagccctgaggcaggaaactacccccccaccaccctcggcatcctcagttctggtttgcacccagaaagggggtaggtccaggacacacccggactgatgtgtcacactggctgtgccagctgagagagtgggctccaggcaccactaacagagaagccttgcaaggcaggtccatgcaccgcccgcctccagttaccactcattgcaaaggaaatgagctgggagcctgtgtgtgggccgtgcagacccttttggttacaagccacaaaaacccaggttaatctgatgaggaaggaatttattatctgtaaagtccaggagcaggctagctttacaccaagcaggatccaaggacccacacttgtcacctcatatctctctctctctcccactttcgctttctctgtctcttcttagttctgctttcctccactgtgccttcgctctcagagagagctctcccctggcagtgacaagatggctgcagcagctccagcaacctcagaggactcccccatccagggtccttgtgagctcctcatctgtaggatgtgcagtaaacactcacgtgtcctttcctgaggagcccagtggctggggtgggggctgaggggcagcccctatgccctcacagtgcagcaaccttggttagctcacccatcagggcagacttgggcagaaatcatgtcttggcatattgttttgtaatctgctttttaaattgtcactatatattatgagcatttccctataatatacaatattcttccacattatgtttaatggtttcattgtattctaatgcatattctatagttattttaaccaccccacaatgttgcaaaatgtccttatttgggacaacactgctgcaaacactttgacccatatgtcctttttgtgtgcactcttatggcaacttctaacggtggcatttctgaatcatagacacttttttgacttctacatattttatttttttagttgacaaaaactgtatttatgaatcataaacacttaatgattttgctatt

SEQ ID NO: 29524 - DNA, 1755 bp, Homo sapiens
  source 1..1755: mol_type = unassigned DNA
agtccggccggaacctgtttgcgaccccgagtcccatgacaccgcttctcctcacaccccagtccgcagtgcccctccccagcctcggccgggcctcccgggagccgggcgtggcgttccagctagtgagccgtttctcccctgggctcggaggcggaagcttgaggggcgcggggaggagcttcgcgtgcggggtgaacgcccgctctacgtgctcgttctcttcgcgaccgctgcgcgcgagccccgtgtccccacggcgggcagcagcggcggcggcggcggctgaacgcggagggggcggagggagcccgcggcggcggcagcagctacagcgaaatggcggagaccgtggctgacacccggcggctgatcaccaagccgcagaacctgaatgacgcctacggaccccccagcaacttcctcgagatcgatgtgagcaacccgcaaacggtgggggtcggccggggccgcttcaccacttacgaaatcagggtcaagacaaatcttcctattttcaagctgaaagaatctactgttagaagaagatacagtgactttgaatggctgcgaagtgaattagaaagagagagcaaggtcgtagttcccccgctccctgggaaagcgtttttgcgtcagcttccttttagaggagatgatggaatatttgatgacaattttattgaggaaagaaaacaagggctggagcagtttataaacaaggtcgctggtcatcctctggcacagaacgaacgttgtcttcacatgtttttacaagatgaaataatagataaaagctatactccatctaaaataagacatgcctgaaatttggcaagaaggggcaaaaacgtgactattaatgattgataagcaccagtgaagaagttctaacttttagcatgctgcacagaaactggtataacatgccttcagtatactaacactcatatgctcagttttgttttgttttggcagttgacaagaagttaatttgctttagtaaaaatccctcattccagcctttctatataaatagctctttcttgctgttttaatgtggtgcacactatagcctcacaaacctgttattccagtgtaatctgcagtgtcgtaactaaagttactggcttggtcttatttgcacagtttttgcgtcttgtttgcttcttgcatctgattaactagaatatttctctttcccccttttaatttgtgatgtcacttgaccccatttatgtgtaggagcactacaccattggtttccaatactgcacacataagatacatacttgtgtgcagaaagtatcttcctccaggcttgtaatacccttcacatggaagattaatgagggaaatctttatattctgtataaaaacaaaagcaaatttatatactaaaatcatttgtctaaaaatttaagttgttttcaaataaaaattaaaatgcatttctgatatgcactgattgtgttgcctccagctttttttgctctctatgagtgactacttaagtcacttgttgagagggattatttactaattatatacttctcattcctgtaactccattccctttaaacagtggtgatatcaaatatacttccatccattgaatggggtatttttaacaacaacaaaagtgatatactaaaaaatgtattgcttaaggcttattgaatcattttgaagcactttgtgtatttgaaaactgctttataatctcatttattaaaaggactttcaaagataaaa

SEQ ID NO: 29525 - DNA, 890 bp, Homo sapiens
  source 1..890: mol_type = unassigned DNA
gtttgcgaccccgagtcccatgacaccgcttctcctcacaccccagtccgcagtgcccctccccagcctcggccgggcctcccgggagccgggcgtggcgttccagctagtgagccgtttctcccctgggctcggaggcggaagcttgaggggcgcggggaggagcttcgcgtgcggggtgaacgcccgctctacgtgctcgttctcttcgcgaccgctgcgcgcgagccccgtgtccccacggcgggcagcagcggcggcggcggcggctgaacgcggagggggcggagggagcccgcggcggcggcagcagctacagcgaaatggcggagaccgtggctgacacccggcggctgatcaccaagccgcagaacctgaatgacgcctacggaccccccagcaacttcctcgagatcgatacaaatcttcctattttcaagctgaaagaatctactgttagaagaagatacagtgactttgaatggctgcgaagtgaattagaaagagagagcaaggtcgtagttcccccgctccctgggaaagcgtttttgcgtcagcttccttttagaggagatgatggaatatttgatgacaattttattgaggaaagaaaacaagggctggagcagtttataaacaaggtcgctggtcatcctctggcacagaacgaacgttgtcttcacatgtttttacaagatgaaataatagataaaagctatactccatctaaaataagacatgcctgaaatttggcaagaaggggcaaaaacgtgactattaatgattgataagcaccagtgaagaagttctaacttttagcatgctgcacagaaactggtataacatgccttcagtatactaacactcatatgctcagttttgttttgttt

SEQ ID NO: 29526 - DNA, 681 bp, Homo sapiens
  source 1..681: mol_type = unassigned DNA
agtccggccggaacctgtttgcgaccccgagtcccatgacaccgcttctcctcacaccccagtccgcagtgcccctccccagcctcggccgggcctcccgggagccgggcgtggcgttccagctagtgagccgtttctcccctgggctcggaggcggaagcttgaggggcgcggggaggagcttcgcgtgcggggtgaacgcccgctctacgtgctcgttctcttcgcgaccgctgcgcgcgagccccgtgtccccacggcgggcagcagcggcggcggcggcggctgaacgcggagggggcggagggagcccgcggcggcggcagcagctacagcgaaatggcggagaccgtggctgacacccggcggctgatcaccaagccgcagaacctgaatgacgcctacggaccccccagcaacttcctcgagatcgatgtgagcaacccgcaaacggtgggggtcggccggggccgcttcaccacttacgaaatcagggtcaagacaaatcttcctattttcaagctgaaagaatctactgttagaagaagatacagtgactttgaatggctgcgaagtgaattagaaagagagagcaagccctgcctcagaatgacatcagaggcaaggagtcatggaaggacgtggtgtgctcagaatgatgaaaagttattttgtgactag

SEQ ID NO: 29527 - DNA, 1072 bp, Homo sapiens
  source 1..1072: mol_type = unassigned DNA
gggggcggagggagcccgcggcggcggcagcagctacagcgaaatggcggagaccgtggctgacacccggcggctgatcaccaagccgcagaacctgaatgacgcctacggaccccccagcaacttcctcgagatcgatgtgagcaacccgcaaacggtgggggtcggccggggccgcttcaccacttacgaaatcagggtcaaggtcgtagttcccccgctccctgggaaagcgtttttgcgtcagcttccttttagaggagatgatggaatatttgatgacaattttattgaggaaagaaaacaagggctggagcagtttataaacaaggtcgctggtcatcctctggcacagaacgaacgttgtcttcacatgtttttacaagatgaaataatagataaaagctatactccatctaaaataagacatgcctgaaatttggcaagaaggggcaaaaacgtgactattaatgattgataagcaccagtgaagaagttctaacttttagcatgctgcacagaaactggtataacatgccttcagtatactaacactcatatgctcagttttgttttgttttggcagttgacaagaagttaatttgctttagtaaaaatccctcattccagcctttctatataaatagctctttcttgctgttttaatgtggtgcacactatagcctcacaaacctgttattccagtgtaatctgcagtgtcgtaactaaagttactggcttggtcttatttgcacagtttttgcgtcttgtttgcttcttgcatctgattaactagaatatttctctttcccccttttaatttgtgatgtcacttgaccccatttatgtgtaggagcactacaccattggtttccaatactgcacacataagatacatacttgtgtgcagaaagtatcttcctccaggcttgtaatacccttcacatggaagattaatgagggaaatctttatattctgtataaaaacaaaagcaaatttatatactaaaatcatttgtctaaaaatttaagttgttttcaaataaaaattaaaatgcatttctgatatgca

SEQ ID NO: 29528 - DNA, 2506 bp, Homo sapiens
  source 1..2506: mol_type = unassigned DNA
gggttcgccgcgccgaactgcagccatggagcaggcacctccggaccccgagcggcagctccagccggcgcccttggagccgctgggctccccagacgctgggctgggggctgcggtcggcaaggaagcggagggggccggagaagagagctctggggtcgacacgatgacacacaataatttttggttgaagaagatagaaatcagtgtttcagaagcagaaaaacgaactggaagaaatgccatgaacatgcaagaaacatatactgcttacctcattgaaacaaggtcagttgaacataccgatggtcagagtgtcctaacagactcactatggcggcgatatagtgaatttgagttgttgagaagctaccttttagtttactatccacatattgttgtgccacctctgccagaaaaacgggcagaatttgtttggcataaactctctgctgacaacatggatccagattttgtggagaggcgacggattggtttagaaaactttctcttgaggattgcttcacatcccatcctttgtagagacaaaatcttctatctgtttttaacacaggaaggtaactggaaggagactgtgaatgaaactgggtttcagctgaaggcagactccaggttaaaagcgcttaatgcaacattcagagtgaaaaacccagacaagagatttactgaccttaagcactatagtgatgaactgcagtctgtcatctcacatcttcttcgagtcagagctagagtagcagatcgactctatggtgtatataaagtacatgggaattatggtcgagttttcagtgaatggagtgccatagaaaaagaaatgggtgatggactgcagagtgctggtcatcatatggatgtgtatgcatcttctattgatgatattttggaagatgaagaacattatgcagatcagttaaaagagtatcttttttatgcagaagcattgcgggctgtgtgcaggaaacatgaacttatgcagtatgacttggagatggctgctcaggacttagcatccaagaagcagcagtgtgaggaactggtaactgggactgtgagaacattctctttgaagggaatgactaccaagctctttggtcaagaaactccagagcagagagaagccagaataaaggtgctagaagaacaaataaatgaaggagaacaacagctaaagtctaaaaatctggaaggcagagaatttgtgaaaaacgcatgggctgatattgaacgcttcaaagaacaaaagaaccgagacttaaaggaggccctcataagctatgcagtcatgcagatcagtatgtgcaaaaagggaattcaagtttggaccaatgctaaggaatgctttagcaagatgtaatcctgtgaattgaatttctcttcaatcaaagtgccccaaaacagaagcacaagtaaataaaagaaatttaagtcactacctagtatacataaacatatacaataagttaaataaattcagctttctttaacttaattgtggtcgtgttaatgtagcacaaaaaatatattttaatgaagattaaatattataatttgaggttttggggactggtgctgattccaaaaagttaatttaataatatataccaacagattgtttgtcacgcttctgaaccaatgactgaatgtcaagatgttcgttaatttctagatgtttgtttcaagaccagctgtttcagatctattaatgtagggaatttttccctaagattgaattcctatatttacttggtaagatccactaatctgttatagggagttgttttctcttgccttatagttgagctatttggtttgacaaagctcagcagaaacttgatgtgaaaaatctacgattttcttctacattcattgatgccccttgtaatgtttgcatacactagaaaatgccttcaatttgtgttttaccagaattttgatactggtcagaaattttatactgccaacaaagaagactcaacttctcagatctataatgggatacattgtcatcctctagcaactcctatatagaaagttttaactgaatatgttacatataagaattaaattcttctcaaataattcttaacctcagtaatgagcctaaatttactctgcttggctctctacacatggcatttcagggtataagatgtagcatttcaatgtgtaagatatatgtactaaacatatgtgttgctatcttcatcattaacatccttcttttctattgcttggctgtaatttttgtaaagataaattatattgtttttttgtatgtgtgtttgtagtatatgttcagaaggcaagcatcttcattttgctagctttgcagaatcttaaaatgtgtactcgttatttctaatgatgtaaaaaaaaatccctagtcctgtttagcatttgacttttttatatgttttaaatgttgctggatttttgtgctgtttgccaaacttatacaataaataaatgaaatattgtgctg

SEQ ID NO: 29529 - DNA, 1308 bp, Homo sapiens
  source 1..1308: mol_type = unassigned DNA
actgcagccatggagcaggcacctccggaccccgagcggcagctccagccggcgcccttggagccgctgggctccccagacgctgggctgggggctgcggtcggcaaggaagcggagggggccggagaagagagctctggggtcgacacggtcagttgaacataccgatggtcagagtgtcctaacagactcactatggcggcgatatagtgaatttgagttgttgagaagctaccttttagtttactatccacatattgttgtgccacctctgccagaaaaacgggcagaatttgtttggcataaactctctgctgacaacatggatccagattttgtggagaggcgacggattggtttagaaaactttctcttgaggattgcttcacatcccatcctttgtagagacaaaatcttctatctgtttttaacacaggaaggtaactggaaggagactgtgaatgaaactgggtttcagctgaaggcagactccaggttaaaagcgcttaatgcaacattcagagtgaaaaacccagacaagagatttactgaccttaagcactatagtgatgaactgcagtctgtcatctcacatcttcttcgagtcagagctagagtagcagatcgactctatggtgtatataaagtacatgggaattatggtcgagttttcagtgaatggagtgccatagaaaaagaaatgggtgatggactgcagagtgctggtcatcatatggatgtgtatgcatcttctattgatgatattttggaagatgaagaacattatgcagatcagttaaaagagtatcttttttatgcagaagcattgcgggctgtgtgcaggaaacatgaacttatgcagtatgacttggagatggctgctcaggacttagcatccaagaagcagcagtgtgaggaactggtaactgggactgtgagaacattctctttgaagggaatgactaccaagctctttggtcaagaaactccagagcagagagaagccagaataaaggtgctagaagaacaaataaatgaaggagaacaacagctaaagtctaaaaatctggaaggcagagaatttgtgaaaaacgcatgggctgatattgaacgcttcaaagaacaaaagaaccgagacttaaaggaggccctcataagctatgcagtcatgcagatcagtatgtgcaaaaagggaattcaagtttggaccaatgctaaggaatgctttagcaagatgtaatcctgtgaattgaatttctcttcaatcaaagtgccccaaaacagaagcacaagtaaataaaagaaatt

SEQ ID NO: 29530 - DNA, 2148 bp, Homo sapiens
  source 1..2148: mol_type = unassigned DNA
ggggcagctgggatggtggcggagtccggaggcctcctgccgccgtcgggcagggaggccggcggaggcggggccgtggccgcccccgagaggcgcccaggcggcggcggcggcggcccagcttcttctttcctcgcacagccaggcggcccctgctcgagtcccgcgtcgccatggccgcggttcccgagttgctgcagcagcaggaggaggaccgcagcaagctgagatctgtatctgtggacctgaatgttgatccctcgcttcagattgacatacctgatgcgctcagtgagagagacaaagtcaaatttacagtgcacacaaagaccacactgcccacgtttcagagcccagagttttctgttacaaggcaacatgaagactttgtgtggctacatgacactcttattgaaacaacagactatgctgggcttattattccacctgctcctacgaagcccgactttgatggtcctcgagagaagatgcagaaactgggagaaggtgaagggtctatgaccaaagaagaatttgccaagatgaaacaagaactggaagctgagtatctcgctgtgtttaagaagactgtgtcctcccatgaagtctttcttcagcggctttcttctcaccctgttctcagtaaagatcgcaactttcatgttttcctggaatatgatcaggatctaagtgttaggcggaaaaatactaaagagatgtttggtggcttcttcaaaagtgtggtgaaaagtgctgatgaagtcctttttactggagttaaggaggtagatgacttctttgagcaagagaagaacttccttattaactattacaataggatcaaagattcttgtgtgaaagctgacaaaatgaccagatctcataaaaatgttgccgatgactatatccacaccgcagcctgcttacatagcctggctttagaagagcccacagtcatcaaaaagtacctattgaaggttgctgagctatttgaaaaactaaggaaagtagagggtcgagtttcatcagatgaagatttgaagctaacagagctcctccgatactacatgctcaacattgaagctgctaaggatctcttatacagacgcaccaaagccctcattgactatgagaactcaaacaaagctctggataaggcccggttaaagagcaaagacgtcaagttggctgaggcacaccagcaggagtgctgccagaaatttgaacaactttccgaatctgcaaaagaagaactgataaatttcaaacggaagagagtggcagcatttagaaagaatctaattgaaatgtctgaactggaaataaaacatgccaggaacaatgtctcccttttgcagagctgtattgacttgttcaagaataactgatatgccttcactcagaagaaaagaaatgaatgtgaaagaaagccaagcatcacttgcacttaaatcattaccacggaagatatattagcttcaactttagtttaaaattatgtgaataaatattttgatttctacaaatcttaacatttaaccatgttggtttaaaaatattattgcttgctacttggacataactaatttttccttgtgcatttaatacctctgggcagaatccaaatactgggttctcccgtagttcgtctttagttactaagaaagggtgtaggacacattagccttctggaaacaagtagaagccatcacctggcccatgtccctacaaacccatgattgtcagggaggtgccagttacagcaggtgattcagctacttgaggtcggtaacagaccttccattcctcactgaaggtggggtttgtgtttttgttttgccctgttactccactggtagtcatctggtgtttgtactataacaacagcaagaaaatctcatttatctttatatactctttgcacctcctttttttagtcgagatataaatatttgaggggagagaaatatctacaggtatatatggaaacaaataatgtggtctgctttataagatggccagatctacattaggaaaagtataagccccctccctaatggccgctggggggtgagggcggtgtgttgtatgtctttgggtgtttgtttttttataaagcatataataaaataatcgtgctactaatgt

SEQ ID NO: 29531 - DNA, 2288 bp, Homo sapiens
  source 1..2288: mol_type = unassigned DNA
ggcctccgccaacgcgccaccagttagaggcagggagtacctctccgagcggaagggccggcgtctccgaagcgcgggagcctccaaatcgcgcccttctgctctcacgagatctggtgacgtcagcgctcgctgccatcttggactcgggctgagtaataaattccccccgcaccgaaacgcggtctttctctagacgcgtcttgctgggagagtgtccgttgcttcccgtccgtgtcgcggccctgcggttggcggcctcctcgtggagcggagcaaggccaggcggcccctgctcgagtcccgcgtcgccatggccgcggttcccgagttgctgcagcagcaggaggaggaccgcagcaagctgagatctgtatctgtggacctgaatgttgatccctcgcttcagattgacatacctgatgcgctcagtgagagagacaaagtcaaatttacagtgcacacaaagaccacactgcccacgtttcagagcccagagttttctgttacaaggcaacatgaagactttgtgtggctacatgacactcttattgaaacaacagactatgctgggcttattattccacctgctcctacgaagcccgactttgatggtcctcgagagaagatgcagaaactgggagaaggtgaagggtctatgaccaaagaagaatttgccaagatgaaacaagaactggaagctgagtatctcgctgtgtttaagaagactgtgtcctcccatgaagtctttcttcagcggctttcttctcaccctgttctcagtaaagatcgcaactttcatgttttcctggaatatgatcaggatctaagtgttaggcggaaaaatactaaagagatgtttggtggcttcttcaaaagtgtggtgaaaagtgctgatgaagtcctttttactggagttaaggaggtagatgacttctttgagcaagagaagaacttccttattaactattacaataggatcaaagattcttgtgtgaaagctgacaaaatgaccagatctcataaaaatgttgccgatgactatatccacaccgcagcctgcttacatagcctggctttagaagagcccacagtcatcaaaaagtacctattgaaggttgctgagctatttgaaaaactaaggaaagtagagggtcgagtttcatcagatgaagatttgaagctaacagagctcctccgatactacatgctcaacattgaagctgctaaggatctcttatacagacgcaccaaagccctcattgactatgagaactcaaacaaagctctggataaggcccggttaaagagcaaagacgtcaagttggctgaggcacaccagcaggagtgctgccagaaatttgaacaactttccgaatctgcaaaagaagaactgataaatttcaaacggaagagagtggcagcatttagaaagaatctaattgaaatgtctgaactggaaataaaacatgccaggaacaatgtctcccttttgcagagctgtattgacttgttcaagaataactgatatgccttcactcagaagaaaagaaatgaatgtgaaagaaagccaagcatcacttgcacttaaatcattaccacggaagatatattagcttcaactttagtttaaaattatgtgaataaatattttgatttctacaaatcttaacatttaaccatgttggtttaaaaatattattgcttgctacttggacataactaatttttccttgtgcatttaatacctctgggcagaatccaaatactgggttctcccgtagttcgtctttagttactaagaaagggtgtaggacacattagccttctggaaacaagtagaagccatcacctggcccatgtccctacaaacccatgattgtcagggaggtgccagttacagcaggtgattcagctacttgaggtcggtaacagaccttccattcctcactgaaggtggggtttgtgtttttgttttgccctgttactccactggtagtcatctggtgtttgtactataacaacagcaagaaaatctcatttatctttatatactctttgcacctcctttttttagtcgagatataaatatttgaggggagagaaatatctacaggtatatatggaaacaaataatgtggtctgctttataagatggccagatctacattaggaaaagtataagccccctccctaatggccgctggggggtgagggcggtgtgttgtatgtctttgggtgtttgtttttttataaagcatataataaaataatcgtgctactaatgt

SEQ ID NO: 29532 - DNA, 772 bp, Homo sapiens
  source 1..772: mol_type = unassigned DNA
gagaggcgcccaggcggcggcggcggcggcccagcttcttctttcctcgcacagccaggcggcccctgctcgagtcccgcgtcgccatggccgcggttcccgagttgctgcagcagcaggaggaggaccgcagcaagaccacactgcccacgtttcagagcccagagttttctgttacaaggcaacatgaagactttgtgtggctacatgacactcttattgaaacaacagactatgctgggcttattattccacctgctcctacgaagcccgactttgatggtcctcgagagaagatgcagaaactgggagaaggtgaagggtctatgaccaaagaagaatttgccaagatgaaacaagaactggaagctgagtatctcgctgtgtttaagaagactgtgtcctcccatgaagtctttcttcagcggctttcttctcaccctgttctcagtaaagatcgcaactttcatgttttcctggaatatgatcaggatctaagtgttaggcggaaaaatactaaagagatgtttggtggcttcttcaaaagtgtggtgaaaagtgctgatgaagtcctttttactggagttaaggaggtagatgacttctttgagcaagagaagaacttccttattaactattacaataggatcaaagattcttgtgtgaaagctgacaaaatgaccagatctcataaaaatgttgccgatgactatatccacaccgcagcctgcttacatagcctggctttagaagagcccacagtcatcaaaaa

SEQ ID NO: 29533 - DNA, 840 bp, Homo sapiens
  source 1..840: mol_type = unassigned DNA
gccaggcggcccctgctcgagtcccgcgtcgccatggccgcggttcccgagttgctgcagcagcaggaggaggaccgcagcaagctgagatctgtatctgtggacctgaatgttgatccctcgcttcagattgacatacctgatgcgctcagtgagagagacaaagtcaaatttacagtgcacacaaagattccacctgctcctacgaagcccgactttgatggtcctcgagagaagatgcagaaactgggagaaggtgaagggtctatgaccaaagaagaatttgccaagatgaaacaagaactggaagctgagtatctcgctgtgtttaagaagactgtgtcctcccatgaagtctttcttcagcggctttcttctcaccctgttctcagtaaagatcgcaactttcatgttttcctggaatatgatcaggatctaagtgttaggcggaaaaatactaaagagatgtttggtggcttcttcaaaagtgtggtgaaaagtgctgatgaagtcctttttactggagttaaggaggtagatgacttctttgagcaagagaagaacttccttattaactattacaataggatcaaagattcttgtgtgaaagctgacaaaatgaccagatctcataaaaatgttgccgatgactatatccacaccgcagcctgcttacatagcctggctttagaagagcccacagtcatcaaaaagtacctattgaaggttgctgagctatttgaaaaactaaggaaagtagagggtcgagtttcatcagatgaagatttgaagctaacagagctcctccgatactacatgctcaacattgaagctgctaag

SEQ ID NO: 29534 - DNA, 1855 bp, Homo sapiens
  source 1..1855: mol_type = unassigned DNA
agggagatgcgcgcctgcgccggccctcgcctcggagcagccatgatggcctggacgacggcccggacttcctctcagaagaggaccgcggacttaaagcaataaatgtagatcttcaaagtgatgctgctctgcaggtggacatttctgatgctcttagtgagcgggataaagtaaaattcactgttcacacaaagagttcattgccaaattttaaacaaaacgagttttcagttgttcggcaacatgaggaatttatctggcttcatgattcctttgttgaaaatgaagactatgcaggttatatcattccaccagcaccaccaagacctgattttgatgcttcaagggaaaaactacagaagcttggtgaaggagaagggtcaatgacgaaggaagaattcacaaagatgaaacaggaactggaagcgggttggataacagagaaccttgggtttattctactgctacctccatcctctgcatccttcttttttgtcttcactgaatgactaccctcacagagatcaaacttctcccatcattggtcctgctggtttgctgtgaatatttggcaatattcaagaagacagttgcgatgcatgaagtgttcctgtgtcgtgtggcagcacatcctattttgagaagagatttaaatttccatgtcttcttggaatataatcaagatttgagtgtgcgaggaaaaaataaaaaagagaaacttgaagacttctttaaaaacatggttaaatcagcagatggagtaatcgtttcaggagtaaaggatgtagatgatttctttgagcacgaacgaacatttcttttggagtatcataaccgagttaaggatgcatctgctaaatctgatagaatgacaagatcccacaaaagtgctgcagatgattacaatagaattggttcttcattatatgctttaggaactcaggattctacagatatatgcaagttttttctcaaagtttcagaactgttcgataaaacaagaaaaatagaagcacgagtgtctgctgatgaagacctcaaactttctgatcttttaaaatattacttaagagaatctcaagctgctaaggatctcctgtatcgaaggtctaggtcactagtggattatgaaaatgctaataaagcactggataaagcaagagcaaaaaataaagatgttctacaggccgaaacttcccaacaattatgttgtcagaaatttgaaaaaatatctgagtctgcaaaacaagaacttatagattttaagacaagaagagttgctgcattcagaaaaaatttagtggaactggcagagttagaactgaagcatgcaaagggtaatctacagttgctgcagaactgcctggcagtgttaaatggagacacataagccacactccgccttcctgttaaaaagggctgccttccttcaaattttatttttgttttcttaatgatgttaagcatttatgctcactggaaacaaacaaaaagcagctgaaaaagtgcatcaactcctctttttctgagaaacatggagcagcgcacgcccaggcgatgccagtctgtgtgccgtgatgccgcactgtgttccccatgacagtggtccatcatcgtgcactcgtcatactcagaagtccaaagttcattcttctttaaagtagcctctataactctgtttattttataaatagtattccttatggctgccactcttatttacctttaaataatttctgaaatttaaccttttcagaatgcattgttgaaacaagataaagattgccttttttgaattttttaaattttgtttttaaaagcatataccaccttagttcattcatgtatcctg

SEQ ID NO: 29535 - DNA, 2001 bp, Homo sapiens
  source 1..2001: mol_type = unassigned DNA
ctggccgccggctccctccggcagcagggagatgcgcgcctgcgccggccctcgcctcggagcagccatgatggaaggcctggacgacggcccggacttcctctcagaagaggaccgcggacttaaagcaataaatgtagatcttcaaagtgatgctgctctgcaggtggacatttctgatgctcttagtgagcgggataaagtaaaattcactgttcacacaaagagttcattgccaaattttaaacaaaacgagttttcagttgttcggcaacatgaggaatttatctggcttcatgattcctttgttgaaaatgaagactatgcaggttatatcattccaccagcaccaccaagacctgattttgatgcttcaagggaaaaactacagaagcttggtgaaggagaagggtcaatgacgaaggaagaattcacaaagatgaaacaggaactggaagctgaatatttggcaatattcaagaagacagttgcgatgcatgaagtgttcctgtgtcgtgtggcagcacatcctattttgagaagagatttaaatttccatgtcttcttggaatataatcaagatttgagtgtgcgaggaaaaaataaaaaagagaaacttgaagacttctttaaaaacatggttaaatcagcagatggagtaatcgtttcaggagtaaaggatgtagatgatttctttgagcacgaacgaacatttcttttggagtatcataaccgagttaaggatgcatctgctaaatctgatagaatgacaagatcccacaaaagtgctgcagatgattacaatagaattggttcttcattatatgctttaggaactcaggattctacagatatatgcaagttttttctcaaagtttcagaactgttcgataaaacaagaaaaatagaagcacgagtgtctgctgatgaagacctcaaactttctgatcttttaaaatattacttaagagaatctcaagctgctaaggatctcctgtatcgaaggtctaggtcactagtggattatgaaaatgctaataaagcactggataaagcaagagcaaaaaataaagatgttctacaggccgaaacttcccaacaattatgttgtcagaaatttgaaaaaatatctgagtctgcaaaacaagaacttatagattttaagacaagaagagttgctgcattcagaaaaaatttagtggaactggcagagttagaactgaagcatgcaaagggtaatctacagttgctgcagaactgcctggcagtgttaaatggagacacataagccacactccgccttcctgttaaaaagggctgccttccttcaaattttatttttgttttcttaatgatgttaagcatttatgctcactggaaacaaacaaaaagcagctgaaaaagtgcatcaactcctctttttctgagaaacatggagcagcgcacgcccaggcgatgccagtctgtgtgccgtgatgccgcactgtgttccccatgacagtggtccatcatcgtgcactcgtcatactcagaagtccaaagttcattcttctttaaagtagcctctataactctgtttattttataaatagtattccttatggctgccactcttatttacctttaaataatttctgaaatttaaccttttcagaatgcattgttgaaacaagataaagattgccttttttgaattttttaaattttgtttttaaaagcatataccaccttagttcattcatgtatcctggtaaagcatcttaatcagacttatttttaattactgaatatttcttagacgttttgggacagattttatgtaatctttataagtatgatttctgaagaaaagcaaatgcattagtatgtttgccttaaacttgtagactaaaccaagtattgtaaaataaacagcgataacagtgatagtttttaactctatggtcattgtatcactctggaaaatgtggagtagctgtaataaatctactcctgtattat

SEQ ID NO: 29536 - DNA, 3398 bp, Homo sapiens
  source 1..3398: mol_type = unassigned DNA
tgggtgttctccgcggcgccgagtcccgggagcgcggtgggggcagcgggcgcggggcgggcgcggggaccgcgccagcctgtcactaatgtctccctttgtgtctcccccatctcatccttttccccggcgcgccgtgcccgccgaccccacaggaaggcctggacgacggcccggacttcctctcagaagaggaccgcggacttaaagcaataaatgtagatcttcaaagtgatgctgctctgcaggtggacatttctgatgctcttagtgagcgggataaagtaaaattcactgttcacacaaagagttcattgccaaattttaaacaaaacgagttttcagttgttcggcaacatgaggaatttatctggcttcatgattcctttgttgaaaatgaagactatgcaggttatatcattccaccagcaccaccaagacctgattttgatgcttcaagggaaaaactacagaagcttggtgaaggagaagggtcaatgacgaaggaagaattcacaaagatgaaacaggaactggaagctgaatatttggcaatattcaagaagacagttgcgatgcatgaagtgttcctgtgtcgtgtggcagcacatcctattttgagaagagatttaaatttccatgtcttcttggaatataatcaagatttgagtgtgcgaggaaaaaataaaaaagagaaacttgaagacttctttaaaaacatggttaaatcagcagatggagtaatcgtttcaggagtaaaggatgtagatgatttctttgagcacgaacgaacatttcttttggagtatcataaccgagttaaggatgcatctgctaaatctgatagaatgacaagatcccacaaaagtgctgcagatgattacaatagaattggttcttcattatatgctttaggaactcaggattctacagatatatgcaagttttttctcaaagtttcagaactgttcgataaaacaagaaaaatagaagcacgagtgtctgctgatgaagacctcaaactttctgatcttttaaaatattacttaagagaatctcaagctgctaaggatctcctgtatcgaaggtctaggtcactagtggattatgaaaatgctaataaagcactggataaagcaagagcaaaaaataaagatgttctacaggccgaaacttcccaacaattatgttgtcagaaatttgaaaaaatatctgagtctgcaaaacaagaacttatagattttaagacaagaagagttgctgcattcagaaaaaatttagtggaactggcagagttagaactgaagcatgcaaagggtaatctacagttgctgcagaactgcctggcagtgttaaatggagacacataagccacactccgccttcctgttaaaaagggctgccttccttcaaattttatttttgttttcttaatgatgttaagcatttatgctcactggaaacaaacaaaaagcagctgaaaaagtgcatcaactcctctttttctgagaaacatggagcagcgcacgcccaggcgatgccagtctgtgtgccgtgatgccgcactgtgttccccatgacagtggtccatcatcgtgcactcgtcatactcagaagtccaaagttcattcttctttaaagtagcctctataactctgtttattttataaatagtattccttatggctgccactcttatttacctttaaataatttctgaaatttaaccttttcagaatgcattgttgaaacaagataaagattgccttttttgaattttttaaattttgtttttaaaagcatataccaccttagttcattcatgtatcctggtaaagcatcttaatcagacttatttttaattactgaatatttcttagacgttttgggacagattttatgtaatctttataagtatgatttctgaagaaaagcaaatgcattagtatgtttgccttaaacttgtagactaaaccaagtattgtaaaataaacagcgataacagtgatagtttttaactctatggtcattgtatcactctggaaaatgtggagtagctgtaataaatctactcctgtattatgctttacagtgcaggtcttagtttttcttttttctcatttcttttgaaatggcatctcgaacaaagtccaccaatccctttacaaaagaatgaactgctcctctgtgtgtacttcatagaaggtggaatcggacagaggcaggttagtgacagttattcctgaaatacaggagcagagtacagtctgttgtggtttcccggattccgcgcctagctcagccaattaagcatgagacataggccattgagccacttagtagttatgcgagtggatagattggtatgtagagggaaagaggtctgctgtaaagaacaacacttgtttgtctgtggggaaagaaaagcagaatacttgagatgaaagttggcatacaaataggatactatcgccagtagttatattacaaacattatcggcctttctagtgtgaatgaacattagacacattattgtcattcctagtttaaagttaaggttgcgtggttggatttttccactatctttttctaatttttctaccatttggagaccgtaggcatttgggcctgtcaccccttggatgggttcctagtttgtttacattttcctgaaccctcctgagcgcccgttcttggtctaatccccagtcgtgatgattccacacttcctcagccgcatgttgtcttgcctcattcatgagctggtcagcgtttcgtctctttaactgacatgttccccagtgctgtttgaactgttgagtttccgttgctggctgagtgcgttttgtccttcacgtaaccttcgctggtaaaaataagcccatgtgatgtccaccagtggatgaatgctggaccgagagccctagcttctggatccaggtctaggcccttcatctgctgctctgtggcccagggcaggtttgcttgacctctgcctcagttctcgactctaaaggacatactgacctacctcacaggggtgttgtgaggattaataaatgttggtactctgctttggaaatgtgaaaatgctgtgtaaatgttaagaaatactaagtatagggccagaagctatacagtgtttcacttaaccgtttgccattctgtatttaccaaggtggtcttttctggggaaggaagtagagtggaaggtgcatcccttggcccctggtttacattattagggtgcttattgtaggaatgcactctaaaaagtgggcgtagaatgaaagcagccgtccagtggtcctcccttttctgtagtttcacttttcttgcttcaagttacagcagtcacctgaaatctgaaaatactaaatgaaaaactccagaaaca

SEQ ID NO: 29537 - DNA, 3017 bp, Homo sapiens
  source 1..3017: mol_type = unassigned DNA
tgggtgttctccgcggcgccgagtcccgggagcgcggtgggggcagcgggcgcggggcgggcgcggggaccgcgccagcctgtcactaatgtctccctttgtgtctcccccatctcatccttttccccggcgcgccgtgcccgccgaccccacaggaaggcctggacgacggcccggacttcctctcagaagaggaccgcggacttaaagcaataaatgtagatcttcaaagtgatgctgctctgcaggtggacatttctgatgctcttagtgagcgggataaagtaaaattcactgttcacacaaagagttcattgccaaattttaaacaaaacgagttttcagttgttcggcaacatgaggaatttatctggcttcatgattcctttgttgaaaatgaagactatgcaggttatatcattccaccagcaccaccaagacctgattttgatgcttcaagggaaaaactacagaagcttggtgaaggagaagggtcaatgacgaaggaagaattcacaaagatgaaacaggaactggaagctgaatatttggcaatattcaagaagacagttgcgatgcatgaagtgttcctgtgtcgtgtggcagcacatcctattttgagaagagatttaaatttccatgtcttcttggaatataatcaagatttgagtgtgcgaggaaaaaataaaaaagagaaacttgaagacttctttaaaaacatggttaaatcagcagatggagtaatcgtttcaggagtaaaggatgtagatgatttctttgagcacgaacgaacatttcttttggagtatcataaccgagttaaggatgcatctgctaaatctgatagaatgacaagatcccacaaaagtgctgcagatgattacaatagaattggttcttcattatatgctttaggaactcaggattctacagatatatgcaagttttttctcaaagtttcagaactgttcgataaaacaagaaaaatagaagcacgagtgtctgctgatgaagacctcaaactttctgatcttttaaaatattacttaagagaatctcaagctgctaaggatctcctgtatcgaaggtctaggtcactagtggattatgaaaatgctaataaagcactggataaagcaagagcaaaaaataaagatgttctacaggccgaaacttcccaacaattatgttgtcagaaatttgaaaaaatatctgagtctgcaaaacaagaacttatagattttaagacaagaagagttgctgcattcagaaaaaatttagtggaactggcagagttagaactgaagcatgcaaagggtaatctacagttgctgcagaactgcctggcagtgttaaatggagacacataagccacactccgccttcctgttaaaaagggctgccttccttcaaattttatttttgttttcttaatgatgttaagcatttatgctcactggaaacaaacaaaaagcagctgaaaaagtgcatcaactcctctttttctgagaaacatggagcagcgcacgcccaggcgatgccagtctgtgtgccgtgatgccgcactgtgttccccatgacagtggtccatcatcgtgcactcgtcatactcagaagtccaaagttcattcttctttaaagtagcctctataactctgtttattttataaatagtattccttatggctgccactcttatttacctttaaataatttctgaaatttaaccttttcagaatgcattgttgaaacaagataaagattgccttttttgaattttttaaattttgtttttaaaagcatataccaccttagttcattcatgtatcctggtaaagcatcttaatcagacttatttttaattactgaatatttcttagacgttttgggacagattttatgtaatctttataagtatgatttctgaagaaaagcaaatgcattagtatgtttgccttaaacttgtagactaaaccaagtattgtaaaataaacagcgataacagtgatagtttttaactctatggtcattgtatcactctggaaaatgtggagtagctgtaataaatctactcctgtattatgctttacagtgcaggtcttagtttttcttttttctcatttcttttgaaatggcatctcgaacaaagtccaccaatccctttacaaaagaatgaactgctcctctgtgtgtacttcatagaaggtggaatcggacagaggcaggttagtgacagttattcctgaaatacaggagcagagtacagtctgttgtggtttcccggattccgcgcctagctcagccaattaagcatgagacataggccattgagccacttagtagttatgcgagtggatagattggtatgtagagggaaagaggtctgctgtaaagaacaacacttgtttgtctgtggggaaagaaaagcagaatacttgagatgaaagttggcatacaaataggatactatcgccagtagttatattacaaacattatcggcctttctagtgtgaatgaacattagacacattattgtcattcctagtttaaagttaaggttgcgtggttggatttttccactatctttttctaatttttacattttcctgaaccctcctgagcgcccgttcttggtctaatccccagtcgtgatgattccacacttcctcagccgcatgttgtcttgcctcattcatgagctggtcagcgtttcgtctctttaactgacatgttccccagtgctgtttgaactgttgagtttccgttgctggctgagtgcgttttgtccttcacgtaaccttcgctggtaaaaataagcccatgtgatgtccaccagtggatgaatgctggaccgagagccctagcttctggatccaggtctaggcccttcatctgctgctctgtggcccagggcaggtttgcttgacctctgcctcagttctcgactctaaaggacatactgacctacctcacaggggtgttgtgaggattaataaatgttggtactctgctttgg

SEQ ID NO: 29538 - DNA, 3562 bp, Homo sapiens
  source 1..3562: mol_type = unassigned DNA
tggctatttctgttttttcctctggagtttgtttctctggctgtatgacttgcatgatacttaatccattctttctgtgctgcttatagttatttttagggtttcattaatactgtatcatgatgccaaacaacagactttagaaaatataatgcattgaagataacccattgctacacagttggggctttttgcatgtaatgtttgtgagtgagtggcatgctagagttttctggagaatttggtcctgccatgaatgtgctggttttagttaaaaactttgacctgctttttcactcttgttcactgggcaccttttttattttaaggtggatattttggctcagattggttgtgtcgaaagtctcagccagtcaccaccttcttctccttctccttctccttcttccatatataaggttggcagtggcaatgacccctggtcagcctggagtgcctccaaatctgggaactgggaaagctcagaaggctggggggcccagccagagggggctggagcccaaagaaacacaaacactcccaacaactgggacactgccttcggccacccccaggcctaccaaggaccagcaactggtgatgatgatgactgggatgaagactgggatgggcccaaatcctcttcctactttaaggattcagagtcagctgatgcaggcggcgctcagcgaggaaacagtcgtgctagttcctcatccatgaaaattccccttaacaaatttcctggatttgcgaaacctggcacggaacagtatttgttggccaaacaactagcaaaacccaaagagaaaattcccatcattgttggagattatggcccaatgtgggtttatcctacctctacttttgactgtgtggtagcagatcccaggaaaggctccaaaatgtatggtctaaagagctacatcgaatatcagctaacacctactaacactaatcgatctgtaaaccacaggtataagcactttgactggttatatgagcgtctcctggttaagtttgggtcagccattccaatcccttctcttccagacaaacaagtcacaggccgctttgaagaggaatttatcaaaatgcgcatggagagacttcaggcctggatgaccaggatgtgtcgccatccagtaatctcagaaagtgaagttttccagcagttcctaaatttccgagatgagaaggaatggaaaactggaaagaggaaggccgagagagatgagctggcgggagtcatgatattttccaccatggaaccagaggcacctgacttggacttagtagaaatagagcagaagtgcgaggctgtggggaagttcaccaaggccatggatgacggcgtgaaggagctgctgacggtggggcaggagcactggaagcgctgcacgggcccattacccaaggaatatcagaagataggaaaggccttgcagagtttggccacagtgttcagttccagtggctatcaaggtgaaacagatctcaatgatgcaataacagaagcaggaaagacttatgaagaaattgccagtctcgtggcagaacagccaaagaaagatctccatttcctgatggaatgtaatcacgagtataaaggttttcttggctgcttccctgacatcattggcactcacaagggagcaatagaaaaagtgaaagaaagtgacaaactagttgcaacaagtaaaatcaccctacaagacaaacagaacatggtgaagagagtcagcatcatgtcttacgcgttgcaagctgagatgaatcactttcacagtaaccggatctatgattacaacagtgtcatccgcctgtacctggagcagcaagtgcaattttacgaaacgattgcagaaaagctgaggcaggccctcagccgctttccagtgatgtaggacagaacgggccttgaagagaatgccgcgtgctttctcctgacttggggcaatgcaattcaaaactttttttcccctattattcagaaaaaaaaggaaacaaaaccaaaaagaaagagttgcaaaaaactgcatttattttattagccaccctaaatgcgtcagttatttagggatggtcttttgttcatttccgcatccattatttaaaccagtggaaattgtctctatttttggaaagtacttaaaagttaccagaattttcaatggaaaatgaggggtttctccccactgatattttacatagagtcataatttatatgtcttataaattataagtcttatataatttataagtctcccacaatcttccagttcttacccagtgtcagataattaattactaattactttcttaaaaacatgaactatgccagaataaaaaatatctatgtttgtatatttttataactcctttcagtcctctggggctcctgtcattgagggaagtcgttacgcctttcactgccacagttacagctcaagtgcttacacttcaagagggaggacgctgggggcccctggggctgctagtgccatcgtggtgtgtggcaggtgggccatcccatgtccctccagggggaccccacagcctggcagatgagcagatacccctggccacccatgtcctcagcgacatttctgatgtgctgctcttatgtgaggaccagtgctttctctctttgcacttccttcctaatcttggttaaggcatgttttatgccatgaagaatacattagaagaattgagggactttgtagagaattttgtggctttggtccaacgggtgagtggctgtgcggaggcctgtgttcgggagggcctgggagaaggagggcacccagcaccccggcgtctctggccctttcttattctttggctcctcatccaccgtgatgagaagcgctgctgtggccacggcacactgcttggcttgggtggcgggttcatggccagttggtgtcatcagcaaagagaaaaagcacaggttagctccccattagatggaaaagtgtagggactgagaagggctgcagcctcagcagtgtacagagtccccggcgctctgaggttggagagaaagaacagaccagcgcccttcccgactacatccgaaacttcacacagggtgtttctgagcaccagcacttccagcgcttcacttaacggcataaagcaaaacaggaccttggcacaccgtcagctcgaactcaacactggcagccaccgtctcacccctgcggaggagcgctcccgtctcccacaggtgccttaccgcgttccctcccgctgctttcatttttctgacctaataattacgggaaatggaaagtctgggccagcatcaataaaatgacaccaaaaataagtagatgaaatcaaatgaatatgagaacatcttgttcttcaatatcacgggtttttgttaatgtttcataagtaattctccccacttgatttttcttctataaaatcccatagaacaatgtttatgctatagccatttaatatatgtacaaattgtaaagaatatgtataaatgttttacacgaatgtaagagcatgtagaagccaacatataaataaattgttt

SEQ ID NO: 29539 - DNA, 4198 bp, Homo sapiens
  source 1..4198: mol_type = unassigned DNA
agcggctgggcctgagcgtcgagactcggggccgaggcggaggagcggccgccgcgccggggcccagccggagccgccgccctcgcccttgcctttgcctgcgcggctcagaatcaccatccgcggcgcgggagacgagccggccgtcccgggccgggggacccgcccgccatggccaccaaggctcgggttatgtatgattttgctgctgaacctggaaataatgaactgacggttaatgaaggagaaatcatcacaatcacaaatccggatgtaggtggaggatggctggaaggaagaaacatcaaaggagaacgagggctggttcccacagactacgttgaaattttacccagtgatggaaaagatcaattttcttgtggaaattcagtggctgaccaagccttccttgattctctctcagccagcacagctcaggccagttcgtcggctgccagcaacaatcaccaggttggcagtggcaatgacccctggtcagcctggagtgcctccaaatctgggaactgggaaagctcagaaggctggggggcccagccagagggggctggagcccaaagaaacacaaacactcccaacaactgggacactgccttcggccacccccaggcctaccaaggaccagcaactggtgatgatgatgactgggatgaagactgggatgggcccaaatcctcttcctactttaaggattcagagtcagctgatgcaggcggcgctcagcgaggaaacagtcgtgctagttcctcatccatgaaaattccccttaacaaatttcctggatttgcgaaacctggcacggaacagtatttgttggccaaacaactagcaaaacccaaagagaaaattcccatcattgttggagattatggcccaatgtgggtttatcctacctctacttttgactgtgtggtagcagatcccaggaaaggctccaaaatgtatggtctaaagagctacatcgaatatcagctaacacctactaacactaatcgatctgtaaaccacaggtataagcactttgactggttatatgagcgtctcctggttaagtttgggtcagccattccaatcccttctcttccagacaaacaagtcacaggccgctttgaagaggaatttatcaaaatgcgcatggagagacttcaggcctggatgaccaggatgtgtcgccatccagtaatctcagaaagtgaagttttccagcagttcctaaatttccgagatgagaaggaatggaaaactggaaagaggaaggccgagagagatgagctggcgggagtcatgatattttccaccatggaaccagaggcacctgacttggacttagtagaaatagagcagaagtgcgaggctgtggggaagttcaccaaggccatggatgacggcgtgaaggagctgctgacggtggggcaggagcactggaagcgctgcacgggcccattacccaaggaatatcagaagataggaaaggccttgcagagtttggccacagtgttcagttccagtggctatcaaggtgaaacagatctcaatgatgcaataacagaagcaggaaagacttatgaagaaattgccagtctcgtggcagaacagccaaagaaagatctccatttcctgatggaatgtaatcacgagtataaaggttttcttggctgcttccctgacatcattggcactcacaagggagcaatagaaaaagtgaaagaaagtgacaaactagttgcaacaagtaaaatcaccctacaagacaaacagaacatggtgaagagagtcagcatcatgtcttacgcgttgcaagctgagatgaatcactttcacagtaaccggatctatgattacaacagtgtcatccgcctgtacctggagcagcaagtgcaattttacgaaacgattgcagaaaagctgaggcaggccctcagccgctttccagtgatgtaggacagaacgggccttgaagagaatgccgcgtgctttctcctgacttggggcaatgcaattcaaaactttttttcccctattattcagaaaaaaaaggaaacaaaaccaaaaagaaagagttgcaaaaaactgcatttattttattagccaccctaaatgcgtcagttatttagggatggtcttttgttcatttccgcatccattatttaaaccagtggaaattgtctctatttttggaaagtacttaaaagttaccagaattttcaatggaaaatgaggggtttctccccactgatattttacatagagtcataatttatatgtcttataaattataagtcttatataatttataagtctcccacaatcttccagttcttacccagtgtcagataattaattactaattactttcttaaaaacatgaactatgccagaataaaaaatatctatgtttgtatatttttataactcctttcagtcctctggggctcctgtcattgagggaagtcgttacgcctttcactgccacagttacagctcaagtgcttacacttcaagagggaggacgctgggggcccctggggctgctagtgccatcgtggtgtgtggcaggtgggccatcccatgtccctccagggggaccccacagcctggcagatgagcagatacccctggccacccatgtcctcagcgacatttctgatgtgctgctcttatgtgaggaccagtgctttctctctttgcacttccttcctaatcttggttaaggcatgttttatgccatgaagaatacattagaagaattgagggactttgtagagaattttgtggctttggtccaacgggtgagtggctgtgcggaggcctgtgttcgggagggcctgggagaaggagggcacccagcaccccggcgtctctggccctttcttattctttggctcctcatccaccgtgatgagaagcgctgctgtggccacggcacactgcttggcttgggtggcgggttcatggccagttggtgtcatcagcaaagagaaaaagcacaggttagctccccattagatggaaaagtgtagggactgagaagggctgcagcctcagcagtgtacagagtccccggcgctctgaggttggagagaaagaacagaccagcgcccttcccgactacatccgaaacttcacacagggtgtttctgagcaccagcacttccagcgcttcacttaacggcataaagcaaaacaggaccttggcacaccgtcagctcgaactcaacactggcagccaccgtctcacccctgcggaggagcgctcccgtctcccacaggtgccttaccgcgttccctcccgctgctttcatttttctgacctaataattacgggaaatggaaagtctgggccagcatcaataaaatgacaccaaaaataagtagatgaaatcaaatgaatatgagaacatcttgttcttcaatatcacgggtttttgttaatgtttcataagtaattctccccacttgatttttcttctataaaatcccatagaacaatgtttatgctatagccatttaatatatgtacaaattgtaaagaatatgtataaatgttttacacgaatgtaagagcatgtagaagccaacatataaataaattgtttaaaaaaactgtacagtaaattctcaaagcactttttcaaaacactttttggactttgtgtgtgatttttgttgttgttgttaagtactttttattccagctgctgaaaatggtccaggtaatgaattcttccccaaatcctatttcttctgacatgaattcatcatttcagttccgtaggtcagtgttgcggtccgggaagcgtatcataaccacctgggagttgccaagaagcagacagtctcccagtgtctgactctcggatatttggatttgactggtgtgaggcaaagtgaaaaagggatgggggaaatggagatggcacgggctcctcagagcgtggtagccgactgtgaggaaaagcagagggaatgtgaaagaaaataagagaatccacgggatttgatgcctggaagattctccttcaagtggcaacatggcatatatatccttctccggggagtcacatgcaccatttggttcttagatacgttgatgttttgatttttaatgatttgtatcaacctgtaggtaccacagaagagctgtagtcatacaatcacataacttttacaaatatagtgg

SEQ ID NO: 29540 - DNA, 1886 bp, Homo sapiens
  source 1..1886: mol_type = unassigned DNA
agtagccgagcgcccttgcctttgcctgcgcggctcagaatcaccatccgcggcgcgggagacgagccggccgtcccgggccgggggacccgcccgccatggccaccaaggctcgggttatgtatgattttgctgctgaacctggaaataatgaactgacggttaatgaaggagaaatcatcacaatcacaaatccggatgtaggtggaggatggctggaaggaagaaacatcaaaggagaacgagggctggttcccacagactacgttgaaattttacccagtgatggaaaagatcaattttcttgtggaaattcagtggctgaccaagccttccttgattctctctcagccagcacagctcaggccagttcgtcggctgccagcaacaatcaccaggttggcagtggcaatgacccctggtcagcctggagtgcctccaaatctgggaactgggaaagctcagaaggctggggggcccagccagagggggctggagcccaaagaaacacaaacactcccaacaactgggacactgccttcggccacccccaggcctaccaaggaccagcaactggtgatgatgatgactgggatgaagactgggatgggcccaaatcctcttcctactttaaggattcagagtcagctgatgcaggcggcgctcagcgaggaaacagtcgtgctagttcctcatccatgaaaattccccttaacaaatttcctggatttgcgaaacctggcacggaacagtatttgttggccaaacaactagcaaaacccaaagagaaaattcccatcattgttggagattatggcccaatgtgggtttatcctacctctacttttgactgtgtggtagcagatcccaggaaaggctccaaaatgtatggtctaaagagctacatcgaatatcagctaacacctactaacactaatcgatctgtaaaccacaggtataagcactttgactggttatatgagcgtctcctggttaagtttgggtcagccattccaatcccttctcttccagacaaacaagtcacaggccgctttgaagaggaatttatcaaaatgcgcatggagagacttcaggcctggatgaccaggatgtgtcgccatccagtaatctcagaaagtgaagttttccagcagttcctaaatttccgagatgagaaggaatggaaaactggaaagaggaaggccgagagagatgagctggcgggagtcatgatattttccaccatggaaccagaggcacctgacttggacttagtagaaatagagcagaagtgcgaggctgtggggaagttcaccaaggccatggatgacggcgtgaaggagctgctgacggtggggcaggagcactggaagcgctgcacgggcccattacccaaggaatatcagaagataggaaaggccttgcagagtttggccacagtgttcagttccagtggctatcaaggtgaaacagatctcaatgatgcaataacagaagcaggaaagacttatgaagaaattgccagtctcgtggcagaacagccaaagaaagatctccatttcctgatggaatgtaatcacgagtataaaggttttcttggctgcttccctgacatcattggcactcacaagggagcaatagaaaaagtgaaagaaagtgacaaactagttgcaacaagtaaaatcaccctacaagacaaacagaacatggtgaagagagtcagcatcatgtcttacgcgttgcaagctgagatgaatcactttcacagtaaccggatctatgattacaacagtgtcatccgcctgtacctggagcagcaagtgcaattttacgaaacgattgcagaaaagctgaggcaggccctcagccgctttccagtgatgtag

SEQ ID NO: 29541 - DNA, 1308 bp, Homo sapiens
  source 1..1308: mol_type = unassigned DNA
atgggattgtctttttccctttttccccttaggaaccacgtgaatgttgagggggcgacacacaagcaggtggtggacctgattcgagcaggcgagaaggaattgatcttgacagtgttatctgtacctcctcatgaggcagataacctagatcccagtgacgactcgttgggacaatcattttatgattacacagaaaagcaagcagtgcccatatcggtccccagatacaaacatgtggagcagaatggtgagaagtttgtggtatataatgtttacatggcagggaggcagctgtgttctaagcggtaccgggagtttgctatcctacaccagaacctgaagagagagtttgccaactttacatttcctcgactcccagggaagtggccattttcattatcagaacaacaattagatgcccgacgtcggggattggaagaatatctagaaaaagtgtgttcaatacgagtaattggtgagagtgacatcatgcaggaattcctatcagaatccgatgagaactacaatggtgtgtccgacgtagagctgagagtagcattaccagatggaacaacggttacagtcagggttaaaaagaacagtactacagaccaagtatatcaggctatcgcagcaaaggttggcatggacagtacgacagtgaattactttgccttatttgaagtgatcagtcactcctttgtacgtaaattggcacctaatgagtttcctcacaaactctacattcagaattatacatcagctgtgccaggcacctgcttgaccattcgaaagtggctttttacaacagaagaagaaattctcttaaatgacaatgaccttgctgttacctacttctttcatcaggcagtcgatgatgtgaagaaaggttacatcaaagcagaagaaaagtcctatcaattacagaagctatacgaacaaagaaaaatggtcatgtacctcaacatgctaaggacttgtgagggctacaatgaaatcatctttccccactgtgcctgtgactccaggaggaaggggcacgttatcacagccatcagcatcacgcactttaaactgcatgcctgcactgaagaaggacagctggagaaccaggtaattgcatttgaatgggatgagatgcagcgatgggacacagatgaagaagggatggccttctgtttcgaatatgcacgaggagagaagaagccccgatgggttaaaatcttcacgccatatttcaattacatgcatgagtgcttcgagagggtgttctgcgagctcaagtggagaaaagaggaatattag

SEQ ID NO: 29542 - DNA, 7197 bp, Homo sapiens
  source 1..7197: mol_type = unassigned DNA
tcccgcggccggcggatcgggcgcgcgcgtcgggggtcgtccggctgccaggcagggcgagcacgcgccgggaggccttggaggcgtagggggcgggggtacggctcgcctgctcgcaagatggcggacgaggacggggaagggattcatccctcagcccctcacaggaacggaggtggcggcggcggcggggggtctgggctccactgcgccgggaacggcggcgggggaggcggcggcccgcgggtcgtgcgcatcgtcaagtccgagtccggctacggcttcaacgtgcggggccaagtgagcgagggcgggcaactgcggagcatcaacggggagctgtacgcgccgctgcagcatgtgagcgccgtgctgcccgggggggcggccgatcgggccggggtgcgcaagggggaccgcatcctggaggtgaaccacgtgaatgttgagggggcgacacacaagcaggtggtggacctgattcgagcaggcgagaaggaattgatcttgacagtgttatctgtacctcctcatgaggcagataacctagatcccagtgacgactcgttgggacaatcattttatgattacacagaaaagcaagcagtgcccatatcggtccccagatacaaacatgtggagcagaatggtgagaagtttgtggtatataatgtttacatggcagggaggcagctgtgttctaagcggtaccgggagtttgctatcctacaccagaacctgaagagagagtttgccaactttacatttcctcgactcccagggaagtggccattttcattatcagaacaacaattagatgcccgacgtcggggattggaagaatatctagaaaaagtgtgttcaatacgagtaattggtgagagtgacatcatgcaggaattcctatcagaatccgatgagaactacaatggtgtgtccgacgtagagctgagagtagcattaccagatggaacaacggttacagtcagggttaaaaagaacagtactacagaccaagtatatcaggctatcgcagcaaaggttggcatggacagtacgacagtgaattactttgccttatttgaagtgatcagtcactcctttgtacgtaaattggcacctaatgagtttcctcacaaactctacattcagaattatacatcagctgtgccaggcacctgcttgaccattcgaaagtggctttttacaacagaagaagaaattctcttaaatgacaatgaccttgctgttacctacttctttcatcaggcagtcgatgatgtgaagaaaggttacatcaaagcagaagaaaagtcctatcaattacagaagctatacgaacaaagaaaaatggtcatgtacctcaacatgctaaggacttgtgagggctacaatgaaatcatctttccccactgtgcctgtgactccaggaggaaggggcacgttatcacagccatcagcatcacgcactttaaactgcatgcctgcactgaagaaggacagctggagaaccaggtaattgcatttgaatgggatgagatgcagcgatgggacacagatgaagaagggatggccttctgtttcgaatatgcacgaggagagaagaagccccgatgggttaaaatcttcacgccatatttcaattacatgcatgagtgcttcgagagggtgttctgcgagctcaagtggagaaaagaggaatattagttagagactgattatctcatgtgagccaggacattcttccagcaaggttggcctctggatggtgaacgggctgtgcaaaaaagccctgcttcttcccttgtctagagggtggacattggctacaggctcttccatctctcatgacttcatggaccctcctctgccagttttttaaatcagatcaccctccatgttgttcctgacccacaggggaagctgtcctcagttgtagccgtcttgactggatgagtcctggcagtctttctaggcgaaccaagaatgtttgtgtgagggaaggtgtttgctgttgctttactgctgtctgtatgtgccagtgctggaacagaatttggaagattctgaataattagttacttattctcaaagaaaatctttgaaagaatcaggaggtcaagtcaagaacatgaaaatttatattttagtacagtagaaagaacattgggctctgggaattttatctgggttttctcctggcttttttttccctctgtgtaattttgggtaaatcagcctccctagctttcagttttctcttctgtgaaacaggaagactgaaccacgtaattaatatccaaggtcccttccggctctaaaaggctatgattctagatgagaagttatatcaagaaagatgtggccaatcagattgagtcatccaggcatacctttttagcttctgtttgtggagttgtctccagataagaggagatgtgccttcccaataactctttttttttttcctttcagaacattttccagatggcgaggtcacagcagagagatgtggccacctagcctttccttatccccttcccttcccttcacccccatcctcttactcctttcatgtcccatttcagacagagtaaccattaacaaaaaagaagagaaaaagttaaagtcgttatattcaaaagccctaaactaaatattattaataaccccctctgaatttcatgtctctggaattgaggtggtagtgaacagcagatcggtcagcaccagaagtcaactgagttaaggcaggaaaagaaataagcccaaccaacttgccaaaggtatctttgtcctttcacctgggcctcataccaacagcctctccttgtactatatttttaaaactggaactatgaacttcatccatttgcactgttcagacatatatatgtatgtatgtaaaaattatatatacacaaattagctgcacgtatatacatatatatatttctttttaaatttcatattgatggcagtaccttttttagcttgtgtttttacacacctttcactagaatccatgacctccctcgtgctctctttcttttgaaacaaactttaaaaaggaaaaaaaagcattttacagggaaaaatacctctcctcatgaaggacttgaaaagtttacaacctgcttggatttttgcccctttttttgtattgagtatagattccggctcatgggttgccatagagtctaggaacaaggagtatagtttctttatcttccaagagggtgctggggaggagaaagaggtgtgtttctcaaggttaacaggctgtagttctgcagggagagcctgaagtcctggtatgggctcttgattctgtgacaatttttttgatccatctatttctctcactcctggctttctagccacattctgcacctccttcctgctttcctagagcctcggtatgctttccctcaaccgaccctggctcaggaggttgatgccatgggaacctgaacctgaaacacttcatggtagtaatttcctgttttccttgccttttttttttttttttttttttttttctgagacagggtcttactctgtcgcccagactggaatgtggtggcatgaacatagctcactgttaccttgaattctgggctcaggtgatccttccgcctcaccctcctgagtagctgggactacaggtgtgcaccaccacacctggctaattcttcttaaaatttttttgtagagacagggtctcactatgttgcccaggctggtctcaaactcctggcctcaggtgatcctcttgtctcagcctcccaaagtgctgggattacaggcatgagccactgtgtccttccctgccttttttgcagcagggatagtactcaggaccagagttaagctgataccttaggcacacaggttggacttacatagaggaaagaaagcaagaaatgccctatgtacatgaggttttacctcctccattcctgaccaataaccacccataactacggcattctctgtgacttccttaaacagcagtgatgggaagggatccaatagtatcttcaaggccttggggaaacttgcagtgggtcagtggtctgtgccaaccaaacgatagccccatccaagccagctgagaacctaggaaggagtagtaggaatatggttgattagattggatctcccaagttttaattgaaaggagactgaacgaaaacctttctgctttctgtccgttaaagagctcctcatctgatcttgcagctagaccctttgagacttaagagctgcatcccaggatcagaagccagggctaattggggtaggacaatattcccagcccctaagctctgtagataatgcataagaagcaccaagtcaggctcagatgcaactaaaacacatctttgagccttttctttttcccttctcccctttctaaacaaaaaccttcctaggatggcatcttttgctctaactgggagacagtcataattggttgtagtcaattctactaagcagtgttggggtggttggaaagtctcttttttgtaatttgtttttgcaaatcattgtgaggccactttttctttctttctttctttctttctttctttctttctttctttcgttctttcgttctttcgttctttctttctttctttctttctctttctttcttttgctttccttctttcatctcttttttgtaatttgttgttgcaaatcattgtgaggccacttttctttccccttccttccttcctttttttctgttttttttttttttttttcccagagtcttgctctgtcgcccaggttggagtgcagtggcacgatctcggctcactgcaccctctgcctcttgggttcaagcgattctcctgcctcagcctcccaagtagctgggattacaggcatacaccaccacgccccactaattttttgtatttttggtagggcggggtttcaccatgatggccaggttggttttgaactcctgacctcaagtaatctgcccacctcggcctcccaaagtgctaggattacaggagtgagccactgcgcctggcccacttttctttctttccttcttattttgttatgctggcagccatttgcccctgcatggtatgggatcaaagaggacagcctttcctccctcaccttctccaaatctaggtgaaatcacagagtacaaaacgtgagaatgctgaatgtgtaaagttgcagagggatccctaatttgaagactttgacacagaactaacttcttttgacttaaatgaatttaaaatgagccaaaggaccctgaaaagaagacatgttgatttcccactcctagatgctaaagagacttggcaccagctttgttcaaactgtaaaaatagcaatttgcccctactcgctcagagtgggacagtagtgaacagagctgggattccatgcgacagcttgaatgctgaccttcagacatgagacatagggatttggaggccccttagaatgggtagatggtgttatgttccctttctggcatagcattcacttggtgctttggagattaggtgagggccctataggtagttggcctgttggcagaatttatttaggaacagcccttttgaaagtgtcccagtaacaacgcacccagctgcagcaaggaggtggggaaggagggcaccccaaaggacagcgccttcttctcttccacccatgcacggccttgggtgatggaggcgggttccctgtggctgcgtggatcccataggatcaagcccttctttgcatgaagcagtgttgtgactcttctctctccccttcctctgcacttcctttctgtaatccctactgttcttcttagtcccagcttctgcccagggaggcttctacccagacttcttttgcaatttgtccctgggaagagggggtctcccagtgcccccagcttcatcccagcagaaccagcaggatcctcctggtctctcactggccttcctccacacttggtttctatcctcaggggtagaagctcagagctttttatggcccaggagaaaatgtagaccctgagaaacctgtccctgcagaaaggttcccttgggccatgctttgggccctctgctctttatatgtttattctattctccatttttccaccccgtccttaccctaggcctaaacacaggtacagatatgtgcatgctcagggcagctcctaggcctggactgagctctcaggggggaattagataaatattccaacatcctcatgcctggcccatttagtttcatcctttagttacccaggccagtagctttgggttatcccttcctgtagctccaaacccagcacttggagcagcaaaatagggcactgacaggagatgaaactctctcctatctcagaatttgccaacttctgggctgggctcctaggaggtagttttcttgaaggggactgcatcctagttgacctgaattttccagaccaggagggactgctgtgctctcccttctcgccatcatactgtttggctagattcattcagcagtagaagctgtttgatctgttgaccccagcatactgctgtttcttcaccagcttcattgtgtcacagtagcttcctttgggaggatgatgtgatagaacactcagagagagggagggagaagagagatagtgggtatgcttctctagctccccatcttccaggtccacctcttgacttcctgttcccctaaacctgagcacatcacgccaggcctctttgctgccaggacagcatcagctcactcctcagcaataatctagggtatgtgggaaggtcagggctgtggtaaggaatagaatcaaagaggggagtgatacggggtgggggcacttggccgcctgctaaacttggacattaattttatatcatgacccccttttaagccagtgagctgggcttcagtttttcccaggccatgcacatttaatttatttcagagaaactctaattgtattttcactgcagtatcttgtattttttatttgtgatttaagaaatgtgaagagaaaatacacagacacaataatggctaacattgtttctttcattccttgttctagagctaaccactctaaaattgtttggtaatgtcacttagtgtaattaattgtaacatattcttttaaataaattgatttattgatcaaacacttctttggtt

SEQ ID NO: 29543 - DNA, 6403 bp, Homo sapiens
  source 1..6403: mol_type = unassigned DNA
tcccgcggccggcggatcgggcgcgcgcgtcgggggtcgtccggctgccaggcagggcgagcacgcgccgggaggccttggaggcgtagggggcgggggtacggctcgcctgctcgcaagatggcggacgaggacggggaagggattcatccctcagcccctcacaggaacggaggtggcggcggcggcggggggtctgggctccactgcgccgggaacggcggcgggggaggcggcggcccgcgggtcgtgcgcatcgtcaagtccgagtccggctacggcttcaacgtgcggggccaagtgagcgagggcgggcaactgcggagcatcaacggggagctgtacgcgccgctgcagcatgtgagcgccgtgctgcccgggggggcggccgatcgggccggggtgcgcaagggggaccgcatcctggaggtgaaccacgtgaatgttgagggggcgacacacaagcaggtggtggacctgattcgagcaggcgagaaggaattgatcttgacagtgttatctgtacctcctcatgaggcagataacctagatcccagtgacgactcgttgggacaatcattttatgattacacagaaaagcaagcagtgcccatatcggtccccagatacaaacatgtggagcagaatggtgagaagtttgtggtatataatgtttacatggcagggaggcagctgtgttctaagcggtaccgggagtttgctatcctacaccagaacctgaagagagagtttgccaactttacatttcctcgactcccagggaagtggccattttcattatcagaacaacaattagatgcccgacgtcggggattggaagaatatctagaaaaagtgtgttcaatacgagtaattggtgagagtgacatcatgcaggaattcctatcagaatccgatgagaactacaatggtgtgtccgacgtagagctgagagtagcattaccagatggaacaacggttacagtcagggttaaaaagaacagtactacagaccaagtatatcaggctatcgcagcaaaggttggcatggacagtacgacagtgaattactttgccttatttgaagtgatcagtcactcctttgtacgtaaattggcacctaatgagtttcctcacaaactctacattcagaattatacatcagctgtgccaggcacctgcttgaccattcgaaagtggctttttacaacagaagaagaaattctcttaaatgacaatgaccttgctgttacctacttctttcatcaggcagtcgatgatgtgaagaaaggttacatcaaagcagaagaaaagtcctatcaattacagaagctatacgaacaaagaaaaatggtcatgtacctcaacatgctaaggacttgtgagggctacaatgaaatcatctttccccactgtgcctgtgactccaggaggaaggggcacgttatcacagccatcagcatcacgcactttaaactgcatgcctgcactgaagaaggacagctggagaaccaggtaattgcatttgaatgggatgagatgcagcgatgggacacagatgaagaagggatggccttctgtttcgaatatgcacgaggagagaagaagccccgatgggttaaaatcttcacgccatatttcaattacatgcatgagtgcttcgagagggtgttctgcgagctcaagtggagaaaagagaacattttccagatggcgaggtcacagcagagagatgtggccacctagcctttccttatccccttcccttcccttcacccccatcctcttactcctttcatgtcccatttcagacagagtaaccattaacaaaaaagaagagaaaaagttaaagtcgttatattcaaaagccctaaactaaatattattaataaccccctctgaatttcatgtctctggaattgaggtggtagtgaacagcagatcggtcagcaccagaagtcaactgagttaaggcaggaaaagaaataagcccaaccaacttgccaaaggtatctttgtcctttcacctgggcctcataccaacagcctctccttgtactatatttttaaaactggaactatgaacttcatccatttgcactgttcagacatatatatgtatgtatgtaaaaattatatatacacaaattagctgcacgtatatacatatatatatttctttttaaatttcatattgatggcagtaccttttttagcttgtgtttttacacacctttcactagaatccatgacctccctcgtgctctctttcttttgaaacaaactttaaaaaggaaaaaaaagcattttacagggaaaaatacctctcctcatgaaggacttgaaaagtttacaacctgcttggatttttgcccctttttttgtattgagtatagattccggctcatgggttgccatagagtctaggaacaaggagtatagtttctttatcttccaagagggtgctggggaggagaaagaggtgtgtttctcaaggttaacaggctgtagttctgcagggagagcctgaagtcctggtatgggctcttgattctgtgacaatttttttgatccatctatttctctcactcctggctttctagccacattctgcacctccttcctgctttcctagagcctcggtatgctttccctcaaccgaccctggctcaggaggttgatgccatgggaacctgaacctgaaacacttcatggtagtaatttcctgttttccttgccttttttttttttttttttttttttttctgagacagggtcttactctgtcgcccagactggaatgtggtggcatgaacatagctcactgttaccttgaattctgggctcaggtgatccttccgcctcaccctcctgagtagctgggactacaggtgtgcaccaccacacctggctaattcttcttaaaatttttttgtagagacagggtctcactatgttgcccaggctggtctcaaactcctggcctcaggtgatcctcttgtctcagcctcccaaagtgctgggattacaggcatgagccactgtgtccttccctgccttttttgcagcagggatagtactcaggaccagagttaagctgataccttaggcacacaggttggacttacatagaggaaagaaagcaagaaatgccctatgtacatgaggttttacctcctccattcctgaccaataaccacccataactacggcattctctgtgacttccttaaacagcagtgatgggaagggatccaatagtatcttcaaggccttggggaaacttgcagtgggtcagtggtctgtgccaaccaaacgatagccccatccaagccagctgagaacctaggaaggagtagtaggaatatggttgattagattggatctcccaagttttaattgaaaggagactgaacgaaaacctttctgctttctgtccgttaaagagctcctcatctgatcttgcagctagaccctttgagacttaagagctgcatcccaggatcagaagccagggctaattggggtaggacaatattcccagcccctaagctctgtagataatgcataagaagcaccaagtcaggctcagatgcaactaaaacacatctttgagccttttctttttcccttctcccctttctaaacaaaaaccttcctaggatggcatcttttgctctaactgggagacagtcataattggttgtagtcaattctactaagcagtgttggggtggttggaaagtctcttttttgtaatttgtttttgcaaatcattgtgaggccactttttctttctttctttctttctttctttctttctttctttctttcgttctttcgttctttcgttctttctttctttctttctttctctttctttcttttgctttccttctttcatctcttttttgtaatttgttgttgcaaatcattgtgaggccacttttctttccccttccttccttcctttttttctgttttttttttttttttttcccagagtcttgctctgtcgcccaggttggagtgcagtggcacgatctcggctcactgcaccctctgcctcttgggttcaagcgattctcctgcctcagcctcccaagtagctgggattacaggcatacaccaccacgccccactaattttttgtatttttggtagggcggggtttcaccatgatggccaggttggttttgaactcctgacctcaagtaatctgcccacctcggcctcccaaagtgctaggattacaggagtgagccactgcgcctggcccacttttctttctttccttcttattttgttatgctggcagccatttgcccctgcatggtatgggatcaaagaggacagcctttcctccctcaccttctccaaatctaggtgaaatcacagagtacaaaacgtgagaatgctgaatgtgtaaagttgcagagggatccctaatttgaagactttgacacagaactaacttcttttgacttaaatgaatttaaaatgagccaaaggaccctgaaaagaagacatgttgatttcccactcctagatgctaaagagacttggcaccagctttgttcaaactgtaaaaatagcaatttgcccctactcgctcagagtgggacagtagtgaacagagctgggattccatgcgacagcttgaatgctgaccttcagacatgagacatagggatttggaggccccttagaatgggtagatggtgttatgttccctttctggcatagcattcacttggtgctttggagattaggtgagggccctataggtagttggcctgttggcagaatttatttaggaacagcccttttgaaagtgtcccagtaacaacgcacccagctgcagcaaggaggtggggaaggagggcaccccaaaggacagcgccttcttctcttccacccatgcacggccttgggtgatggaggcgggttccctgtggctgcgtggatcccataggatcaagcccttctttgcatgaagcagtgttgtgactcttctctctccccttcctctgcacttcctttctgtaatccctactgttcttcttagtcccagcttctgcccagggaggcttctacccagacttcttttgcaatttgtccctgggaagagggggtctcccagtgcccccagcttcatcccagcagaaccagcaggatcctcctggtctctcactggccttcctccacacttggtttctatcctcaggggtagaagctcagagctttttatggcccaggagaaaatgtagaccctgagaaacctgtccctgcagaaaggttcccttgggccatgctttgggccctctgctctttatatgtttattctattctccatttttccaccccgtccttaccctaggcctaaacacaggtacagatatgtgcatgctcagggcagctcctaggcctggactgagctctcaggggggaattagataaatattccaacatcctcatgcctggcccatttagtttcatcctttagttacccaggccagtagctttgggttatcccttcctgtagctccaaacccagcacttggagcagcaaaatagggcactgacaggagatgaaactctctcctatctcagaatttgccaacttctgggctgggctcctaggaggtagttttcttgaaggggactgcatcctagttgacctgaattttccagaccaggagggactgctgtgctctcccttctcgccatcatactgtttggctagattcattcagcagtagaagctgtttgatctgttgaccccagcatactgctgtttcttcaccagcttcattgtgtcacagtagcttcctttgggaggatgatgtgatagaacactcagagagagggagggagaagagagatagtgggtatgcttctctagctccccatcttccaggtccacctcttgacttcctgttcccctaaacctgagcacatcacgccaggcctctttgctgccaggacagcatcagctcactcctcagcaataatctagggtatgtgggaaggtcagggctgtggtaaggaatagaatcaaagaggggagtgatacggggtgggggcacttggccgcctgctaaacttggacattaattttatatcatgacccccttttaagccagtgagctgggcttcagtttttcccaggccatgcacatttaatttatttcagagaaactctaattgtattttcactgcagtatcttgtattttttatttgtgatttaagaaatgtgaagagaaaatacacagacacaataatggctaacattgtttctttcattccttgttctagagctaaccactctaaaattgtttggtaatgtcacttagtgtaattaattgtaacatattcttttaaataaattgatttattgat

SEQ ID NO: 29544 - DNA, 3882 bp, Homo sapiens
  source 1..3882: mol_type = unassigned DNA
gtattgcacaaacaagtggacacccgggagctggccctgctcgtcccctgggccctccttccctggtcctgcaggtcttgctgcttgtcaggcctctcctccaaccctctgccacatttcagaaaagctgagaatcccttggagtgaaaaaggaggagaaacacagtgtccgtagcccagaaggaggttaaatactttcacttctcttttccccatttgggcggagccctttctgagtcagtctgtcggccgacttcctgcttggggcctgggcagccacactgcacgcaggctgggccgactgaggggctcagaggccaggctctgaggcccacgcagggcctagggtgggaagatggcaggtgggggcggcgacctgagcaccaggaggctgaatgaatgtatttcaccagtagcaaatgagatgaaccatcttcctgcacacagccacgatttgcaaaggatgttcacggaagaccagggtgtagatgacaggctgctctatgacattgtattcaagcacttcaaaagaaataaggtggagatttcaaatgcaataaaaaagacatttccattcctcgagggcctccgtgatcgtgatctcatcacaaataaaatgtttgaagattctcaagattcttgtagaaacctggtccctgtacagagagtggtgtacaatgttcttagtgaactggagaagacatttaacctgccagttctggaagcactgttcagcgatgtcaacatgcaggaataccccgatttaattcacatttataaaggctttgaaaatgtaatccatgacaaattgcctctccaagaaagtgaagaagaagagagggaggagaggtctggcctccaactaagtcttgaacaaggaactggtgaaaactcttttcgaagcctgacttggccaccttcgggttccccatctcatgctggtacaaccccacctgaaaatggactctcagagcacccctgtgaaacagaacagataaatgcaaagagaaaagatacaaccagtgacaaagatgattcgctaggaagccaacaaacaaatgaacaatgtgctcaaaaggctgagccaacagagtcctgcgaacaaattgctgtccaagtgaataatggggatgctggaagggagatgccctgcccgttgccctgtgatgaagaaagcccagaggcagagctacacaaccatggaatccaaattaattcctgttctgtgcgactggtggatataaaaaaggaaaagccattttctaattcaaaagttgagtgccaagcccaagcaagaactcatcataaccaggcatctgacataatagtcatcagcagtgaggactctgaaggatccactgacgttgatgagcccttagaagtcttcatctcagcaccgagaagtgagcctgtgatcaataatgacaaccctttagaatcaaatgatgaaaaggagggccaagaagccacttgctcacgaccccagattgtaccagagcccatggatttcagaaaattatctacattcagagaaagttttaagaaaagagtgataggacaagaccacgacttttcagaatccagtgaggaggaggcgcccgcagaagcctcgagcggggcactgagaagcaagcatggtgagaaggctcctatgacttctagaagtacatctacttggagaatacccagcaggaagagacgtttcagcagtagtgacttttcagacctgagtaatggagaagagcttcaggaaacctgcagctcatccctaagaagagggtcaggatcacagccacaagaacctgaaaataagaagtgctcctgtgtcatgtgttttccaaaaggtgtgccaagaagccaagaagcaaggactgaaagtagtcaagcatctgacatgatggataccatggatgttgaaaacaattctactttggaaaaacacagtgggaaaagaagaaaaaagagaaggcatagatctaaagtaaatggtctccaaagagggagaaagaaagacagacctagaaaacatttaactctgaataacaaagtccaaaagaaaagatggcaacaaagaggaagaaaagccaacactagacctttgaaaagaagaagaaaaagaggtccaagaattcccaaagatgaaaatattaattttaaacaatctgaacttcctgtgacctgtggtgaggtgaagggcactctatataaggagcgattcaaacaaggaacctcaaagaagtgtatacagagtgaggataaaaagtggttcactcccagggaatttgaaattgaaggagaccgcggagcatccaagaactggaagctaagtatacgctgcggtggatataccctgaaagtcctgatggagaacaaatttctgccagaaccaccaagcacaagaaaaaagagaatactggaatctcacaacaataccttagttgacccttgtgaggagcataagaagaagaacccagatgcttcagtcaagttctcagagtttttaaagaagtgctcagagacatggaagaccatttttgctaaagagaaaggaaaatttgaagatatggcaaaggcggacaaggcccattatgaaagagaaatgaaaacctatatccctcctaaaggggagaaaaaaaagaagttcaaggatcccaatgcacccaagaggcctcctttggcctttttcctgttctgctctgagtatcgcccaaaaatcaaaggagaacatcctggcctgtccattgatgatgttgtgaagaaactggcagggatgtggaataacaccgctgcagctgacaagcagttttatgaaaagaaggctgcaaagctgaaggaaaaatacaaaaaggatattgctgcatatcgagctaaaggaaagcctaattcagcaaaaaagagagttgtcaaggctgaaaaaagcaagaaaaagaaggaagaggaagaagatgaagaggatgaacaagaggaggaaaatgaagaagatgatgataaataagttgcttctagtgcagtttttttcttgtctataaagcatttaagctgcctgtacacaactcactccttttaaagaaaaaaacttcaacgtaagactgtgtaagatttgtttttaaaccgtacactgtgtttttttgtatagttaaccactaccgaatgtgtcttcagatagccctgtcctggtggtatttagccactaacctttgcctggtacagtatgggggttgtaaattggcatggaaatttaaagcaggttcttgttagtgcacagcacaaattagttgtatatgaggatggtagttttttcaccttcagttgtctctgatgtagcttatacaaaacatttgttgttctgttaactgaatgccactctgtaattgcaaaaaaaaaaaacagttgcagctgttttgttgacattctgaatgcttctaagtaaatacaatttttaaaaaaccgtatgagggaactgtgtagacaaggtaccaggtcagtcttcttccatgtctattagctccacaaagccaatctcaatccctcaaaacaatcttgtcatacttgaaaatatgacactctagtcaaagccttggtaaaataatcagtgtttccaatctgtcctgttacaaaagaaacagattattattgaacttatgcaaataaccattgtcataagaatgtttatgaatagtttccaaattatggcaaattcatgtagagagagaaaagtaactgttttggttttgctcacaaaagtctactttacctaagggctgtcagatataagtaacttaaaagaaagagaagttttcttgacttttgaaaacaaaatatgaaaagaatcggcaatgtttcaaacaaaaagtcataaaagtcactttattcctccatcaa

SEQ ID NO: 29545 - DNA, 2926 bp, Homo sapiens
  source 1..2926: mol_type = unassigned DNA
ctgaggcccacgcagggcctagggtgggaagatggcaggtgggggcggcgacctgagcaccaggaggctgaatgaatgtatttcaccagtagcaaatgagatgaaccatcttcctgcacacagccacgatttgcaaaggatgttcacggaagaccagggtgtagatgacaggctgctctatgacattgtattcaagcacttcaaaagaaataaggtggagatttcaaatgcaataaaaaagacatttccattcctcgagggcctccgtgatcgtgatctcatcacaaataaaatgtttgaagattctcaagattcttgtagaaacctggtccctgtacagagagtggtgtacaatgttcttagtgaactggagaagacatttaacctgccagttctggaagcactgttcagcgatgtcaacatgcaggaataccccgatttaattcacatttataaaggctttgaaaatgtaatccatgacaaattgcctctccaagaaagtgaagaagaagagagggaggagaggtctggcctccaactaagtcttgaacaaggaactggtgaaaactcttttcgaagcctgacttggccaccttcgggttccccatctcatgctggtacaaccccacctgaaaatggactctcagagcacccctgtgaaacagaacagataaatgcaaagagaaaagatacaaccagtgacaaagatgattcgctaggaagccaacaaacaaatgaacaatgtgctcaaaaggctgagccaacagagtcctgcgaacaaattgctgtccaagtgaataatggggatgctggaagggagatgccctgcccgttgccctgtgatgaagaaagcccagaggcagagctacacaaccatggaatccaaattaattcctgttctgtgcgactggtggatataaaaaaggaaaagccattttctaattcaaaagttgagtgccaagcccaagcaagaactcatcataaccaggcatctgacataatagtcatcagcagtgaggactctgaaggatccactgacgttgatgagcccttagaagtcttcatctcagcaccgagaagtgagcctgtgatcaataatgacaaccctttagaatcaaatgatgaaaaggagggccaagaagccacttgctcacgaccccagattgtaccagagcccatggatttcagaaaattatctacattcagagaaagttttaagaaaagagtgataggacaagaccacgacttttcagaatccagtgaggaggaggcgcccgcagaagcctcgagcggggcactgagaagcaagcatggtgagaaggctcctatgacttctagaagtacatctacttggagaatacccagcaggaagagacgtttcagcagtagtgacttttcagacctgagtaatggagaagagcttcaggaaacctgcagctcatccctaagaagagggtcaggatcacagccacaagaacctgaaaataagaagtgctcctgtgtcatgtgttttccaaaaggtgtgccaagaagccaagaagcaaggactgaaagtagtcaagcatctgacatgatggataccatggatgttgaaaacaattctactttggaaaaacacagtgggaaaagaagaaaaaagagaaggcatagatctaaagtaaatggtctccaaagagggagaaagaaagacagacctagaaaacatttaactctgaataacaaagtccaaaagaaaagatggcaacaaagaggaagaaaagccaacactagacctttgaaaagaagaagaaaaagaggtccaagaattcccaaagatgaaaatattaattttaaacaatctgaacttcctgtgacctgtggtgaggtgaagggcactctatataaggagcgattcaaacaaggaacctcaaagaagtgtatacagagtgaggataaaaagtggttcactcccagggaatttgaaattgaaggagaccgcggagcatccaagaactggaagctaagtatacgctgcggtggatataccctgaaagtcctgatggagaacaaatttctgccagaaccaccaagcacaagaaaaaagagaatactggaatctcacaacaataccttagttgacccttgtccggaaaactcaaatatatgtgaggtgtgcaacaaatggggacggctgttctgctgcgacacttgtccaagatcctttcatgagcactgccacatcccatccgtggaagctaacaagaacccgtggagttgcatcttctgcaggataaagactattcaggaaagatgcccagaaagccaatcaggtcatcaggaatctgaagtcctgatgaggcagatgctgcctgaggagcagttgaaatgtgaattcctcctcttgaaggtctactgtgattcgaaaagctgctttttcgcctcagaaccgtattataacagagaggggtctcagggcccacagaagcccatgtggttaaacaaagtcaagacaagtttgaatgagcagatgtacacccgagtagaagggtttgtgcaggacatgcgtctcatctttcataaccacaaggaattttacagggaagataaattcaccagactgggaattcaagtacaggacatctttgagaagaatttcagaaacatttttgcaattcaggaaacaagcaagaacattataatgtttatttagccattcttatctcctcccttcagatcctctggcagctagctacgcaatgtgcctgtggtcccactaatctgtgactgctcctgtggaaactccacatcacaattctccaaaatttatcattgccattttaaaaccgtcttttcagctttcaataaaattcaacaccccttcatgttaaaaattctcaataagctaggtattgaggaacatatcccaaaataataagagccatttatg

SEQ ID NO: 29546 - DNA, 1453 bp, Homo sapiens
  source 1..1453: mol_type = unassigned DNA
ctgaggcccacgcagggcctagggtgggaagatggcaggtgggggcggcgacctgagcaccaggaggctgaatgaatgtatttcaccagtagcaaatgagatgaaccatcttcctgcacacagccacgatttgcaaaggatgttcacggaagaccagggtgtagatgacaggctgctctatgacattgtattcaagcacttcaaaagaaataaggtggagatttcaaatgcaataaaaaagacatttccattcctcgagggcctccgtgatcgtgatctcatcacaaataaaatgtttgaagattctcaagattcttgtagaaacctggtccctgtacagagagtggtgtacaatgttcttagtgaactggagaagacatttaacctgccagttctggaagcactgttcagcgatgtcaacatgcaggaataccccgatttaattcacatttataaaggctttgaaaatgtaatccatgacaaattgcctctccaagaaagtgaagaagaagagagggaggagaggtctggcctccaactaagtcttgaacaaggaactggtgaaaactcttttcgaagcctgacttggccaccttcgggttccccatctcatgctggtacaaccccacctgaaaatggactctcagagcacccctgtgaaacagaacagataaatgcaaagagaaaagatacaaccagtgacaaagatgattcgctaggaagccaacaaacaaatgaacaatgtgctcaaaaggctgagccaacagagtcctgcgaacaaattgctgtccaagtgaataatggggatgctggaagggagatgccctgcccgttgccctgtgatgaagaaagcccagaggcagagctacacaaccatggaatccaaattaattcctgttctgtgcgactggtggatataaaaaaggaaaagccattttctaattcaaaagttgagtgccaagcccaagcaagaactcatcataaccaggcatctgacataatagtcatcagcagtgaggactctgaaggatccactgacgttgatgagcccttagaagtcttcatctcagcaccgagaagtgagcctgtgatcaataatgacaaccctttagaatcaaatgatgaaaaggagggccaagaagccacttgctcacgaccccagattgtaccagagcccatggatttcagaaaattatctacattcagagaaagttttaagaaaagagtgataggacaagaccacgacttttcagaatccagtgaggaggaggcgcccgcagaagcctcgagcggggcactgagaagcaagcatggtgagaaggctcctatgacttctagaagtacatctacttggagaatacccagcaggaagagacaattaaaaaaaaaaaagaagaagaaacaatgtcatccccagccccagcctcagagagggctcctggagcaatcttga

SEQ ID NO: 29547 - DNA, 2198 bp, Homo sapiens
  source 1..2198: mol_type = unassigned DNA
ctgaggcccacgcagggcctagggtgggaagatggcaggtgggggcggcgacctgagcaccaggaggctgaatgaatgtatttcaccagtagcaaatgagatgaaccatcttcctgcacacagccacgatttgcaaaggatgttcacggaagaccagggtgtagatgacaggctgctctatgacattgtattcaagcacttcaaaagaaataaggtggagatttcaaatgcaataaaaaagacatttccattcctcgagggcctccgtgatcgtgatctcatcacaaataaaatgtttgaagattctcaagattcttgtagaaacctggtccctgtacagagagtggtgtacaatgttcttagtgaactggagaagacatttaacctgccagttctggaagcactgttcagcgatgtcaacatgcaggaataccccgatttaattcacatttataaaggctttgaaaatgtaatccatgacaaattgcctctccaagaaagtgaagaagaagagagggaggagaggtctggcctccaactaagtcttgaacaaggaactggtgaaaactcttttcgaagcctgacttggccaccttcgggttccccatctcatgctggtacaaccccacctgaaaatggactctcagagcacccctgtgaaacagaacagataaatgcaaagagaaaagatacaaccagtgacaaagatgattcgctaggaagccaacaaacaaatgaacaatgtgctcaaaaggctgagccaacagagtcctgcgaacaaattgctgtccaagtgaataatggggatgctggaagggagatgccctgcccgttgccctgtgatgaagaaagcccagaggcagagctacacaaccatggaatccaaattaattcctgttctgtgcgactggtggatataaaaaaggaaaagccattttctaattcaaaagttgagtgccaagcccaagcaagaactcatcataaccaggcatctgacataatagtcatcagcagtgaggactctgaaggatccactgacgttgatgagcccttagaagtcttcatctcagcaccgagaagtgagcctgtgatcaataatgacaaccctttagaatcaaatgatgaaaaggagggccaagaagccacttgctcacgaccccagattgtaccagagcccatggatttcagaaaattatctacattcagagaaagttttaagaaaagagtgataggacaagaccacgacttttcagaatccagtgaggaggaggcgcccgcagaagcctcgagcggggcactgagaagcaagcatggtgagaaggctcctatgacttctagaagtacatctacttggagaatacccagcaggaagagacgtttcagcagtagtgacttttcagacctgagtaatggagaagagcttcaggaaacctgcagctcatccctaagaagagggtcaggatcacagccacaagaacctgaaaataagaagtgctcctgtgtcatgtgttttccaaaaggtgtgccaagaagccaagaagcaaggactgaaagtagtcaagcatctgacatgatggataccatggatgttgaaaacaattctactttggaaaaacacagtgggaaaagaagaaaaaagagaaggcatagatctaaagtaaatggtctccaaagagggagaaagaaagacagacctagaaaacatttaactctgaataacaaagtccaaaagaaaagatggcaacaaagaggaagaaaagccaacactagacctttgaaaagaagaagaaaaagaggtccaagaattcccaaagatgaaaatattaattttaaacaatctgaacttcctgtgacctgtggtgaggtgaagggcactctatataaggagcgattcaaacaaggaacctcaaagaagtgtatacagagtgaggataaaaagtggttcactcccagggaatttgaaattgaaggagaccgcggagcatccaagaactggaagctaagtatacgctgcggtggatataccctgaaagtcctgatggagaacaaatttctgccagaaccaccaagcacaagaaaaaaggtgatgatcaagtgatcttctgccaatgtctcgtctattatgttgttgattttctatctctgtggacttacagtctttaaattgacccatcatcataaaatttgattttataata

SEQ ID NO: 29548 - DNA, 1898 bp, Homo sapiens
  source 1..1898: mol_type = unassigned DNA
ggggctcagaggccaggctctgaggcccacgcagggcctagggtgggaagatggcaggtgggggcggcgacctgagcaccaggaggctgaatgaatgtatttcaccagtagcaaatgagatgaaccatcttcctgcacacagccacgatttgcaaaggatgttcacggaagaccagggtgtagatgacaggctgctctatgacattgtattcaagcacttcaaaagaaataaggtggagatttcaaatgcaataaaaaagacatttccattcctcgagggcctccgtgatcgtgatctcatcacaaataaaatgtttgaagattctcaagattcttgtagaaacctggtccctgtacagagagtggtgtacaatgttcttagtgaactggagaagacatttaacctgccagttctggaagcactgttcagcgatgtcaacatgcaggaataccccgatttaattcacatttataaaggctttgaaaatgtaatccatgacaaattgcctctccaagaaagtgaagaagaagagagggaggagaggtctggcctccaactaagtcttgaacaaggaactggtgaaaactcttttcgaagcctgacttggccaccttcgggttccccatctcatgctggtacaaccccacctgaaaatggactctcagagcacccctgtgaaacagaacagataaatgcaaagagaaaagatacaaccagtgacaaagatgattcgctaggaagccaacaaacaaatgaacaatgtgctcaaaaggctgagccaacagagtcctgcgaacaaattgctgtccaagtgaataatggggatgctggaagggagatgccctgcccgttgccctgtgatgaagaaagcccagaggcagagctacacaaccatggaatccaaattaattcctgttctgtgcgactggtggatataaaaaaggaaaagccattttctaattcaaaagttgagtgccaagcccaagcaagaactcatcataaccaggcatctgacataatagtcatcagcagtgaggactctgaaggatccactgacgttgatgagcccttagaagtcttcatctcagcaccgagaagtgagcctgtgatcaataatgacaaccctttagaatcaaatgatgaaaaggagggccaagaagccacttgctcacgaccccagattgtaccagagcccatggatttcagaaaattatctacattcagagaaagttttaagaaaagagtgataggacaagaccacgacttttcagaatccagtgaggaggaggcgcccgcagaagcctcgagcggggcactgagaagcaagcatggtgagaaggctcctatgacttctagaagtacatctacttggagaatacccagcaggaagagacgtttcagcagtagtgacttttcagacctgagtaatggagaagagcttcaggaaacctgcagctcatccctaagaagagggtcaggtaaagaagattaggatgccaagacttggcctgcagaatgtcaggaatgtgaattaaaagctgctgtttccagacgctttttattctgagcaccttcactaccttgtatccagttcatctgggaactcctttttgcattttagaaaatggaaagaggcaggaaattatgataaactcatgtttaacagaaagagtttcactgactaaatgtatgtaattatattttgttgttgtagaagaaataaatagcaaatttgtggtattcttttttttaaacctgctctcattcctattaacactaagatcttagatttttatagtgataaatgggttgacatcattgtcatttgtaattgtaaagcctcaaaagacaactgttcctactatgtaattatagacagaaataaaaacttcagatc

SEQ ID NO: 29549 - DNA, 2650 bp, Homo sapiens
  source 1..2650: mol_type = unassigned DNA
ctgaggcccacgcagggcctagggtgggaagatggcaggtgggggcggcgacctgagcaccaggaggctgaatgaatgtatttcaccagtagcaaatgagatgaaccatcttcctgcacacagccacgatttgcaaaggatgttcacggaagaccagggtgtagatgacaggctgctctatgacattgtattcaagcacttcaaaagaaataaggtggagatttcaaatgcaataaaaaagacatttccattcctcgagggcctccgtgatcgtgatctcatcacaaataaaatgtttgaagattctcaagattcttgtagaaacctggtccctgtacagagagtggtgtacaatgttcttagtgaactggagaagacatttaacctgccagttctggaagcactgttcagcgatgtcaacatgcaggaataccccgatttaattcacatttataaaggctttgaaaatgtaatccatgacaaattgcctctccaagaaagtgaagaagaagagagggaggagaggtctggcctccaactaagtcttgaacaaggaactggtgaaaactcttttcgaagcctgacttggccaccttcgggttccccatctcatgctggtacaaccccacctgaaaatggactctcagagcacccctgtgaaacagaacagataaatgcaaagagaaaagatacaaccagtgacaaagatgattcgctaggaagccaacaaacaaatgaacaatgtgctcaaaaggctgagccaacagagtcctgcgaacaaattgctgtccaagtgaataatggggatgctggaagggagatgccctgcccgttgccctgtgatgaagaaagcccagaggcagagctacacaaccatggaatccaaattaattcctgttctgtgcgactggtggatataaaaaaggaaaagccattttctaattcaaaagttgagtgccaagcccaagcaagaactcatcataaccaggcatctgacataatagtcatcagcagtgaggactctgaaggatccactgacgttgatgagcccttagaagtcttcatctcagcaccgagaagtgagcctgtgatcaataatgacaaccctttagaatcaaatgatgaaaaggagggccaagaagccacttgctcacgaccccagattgtaccagagcccatggatttcagaaaattatctacattcagagaaagttttaagaaaagagtgataggacaagaccacgacttttcagaatccagtgaggaggaggcgcccgcagaagcctcgagcggggcactgagaagcaagcatggtgagaaggctcctatgacttctagaagtacatctacttggagaatacccagcaggaagagacgtttcagcagtagtgacttttcagacctgagtaatggagaagagcttcaggaaacctgcagctcatccctaagaagagggtcaggatcacagccacaagaacctgaaaataagaagtgctcctgtgtcatgtgttttccaaaaggtgtgccaagaagccaagaagcaaggactgaaagtagtcaagcatctgacatgatggataccatggatgttgaaaacaattctactttggaaaaacacagtgggaaaagaagaaaaaagagaaggcatagatctaaagtaaatggtctccaaagagggagaaagaaagacagacctagaaaacatttaactctgaataacaaagtccaaaagaaaagatggcaacaaagaggaagaaaagccaacactagacctttgaaaagaagaagaaaaagaggtccaagaattcccaaagatgaaaatattaattttaaacaatctgaacttcctgtgacctgtggtgaggtgaagggcactctatataaggagcgattcaaacaaggaacctcaaagaagtgtatacagagtgaggataaaaagtggttcactcccagggaatttgaaattgaaggagaccgcggagcatccaagaactggaagctaagtatacgctgcggtggatataccctgaaagtcctgatggagagaatactggaatctcacaacaataccttagttgacccttgtccggaaaactcaaatatatgtgaggtgtgcaacaaatggggacggctgttctgctgcgacacttgtccaagatcctttcatgagcactgccacatcccatccgtggaagctaacaagaacccgtggagttgcatcttctgcaggataaagactattcaggaaagatgcccagaaagccaatcaggtcatcaggaatctgaagtcctgatgaggcagatgctgcctgaggagcagttgaaatgtgaattcctcctcttgaaggtctactgtgattcgaaaagctgctttttcgcctcagaaccgtattataacagagaggggtctcagggcccacagaagcccatgtggttaaacaaagtcaagacaagtttgaatgagcagatgtacacccgagtagaagggtttgtgcaggacatgcgtctcatctttcataaccacaaggaattttacagggaagataaattcaccagactgggaattcaagtacaggacatctttgagaagaatttcagaaacatttttgcaattcaggaaacaagcaagaacattataatgtttatttag

SEQ ID NO: 29550 - DNA, 1846 bp, Homo sapiens
  source 1..1846: mol_type = unassigned DNA
cacactgcacgcaggctgggccgactgaggggctcagaggccaggctctgaggcccacgcagggcctagggtgggaagatggcaggtgggggcggcgacctgagcaccaggatgttcacggaagaccagggtgtagatgacaggctgctctatgacattgtattcaagcacttcaaaagaaataaggtggagatttcaaatgcaataaaaaagacatttccattcctcgagggcctccgtgatcgtgatctcatcacaaataaaatgtttgaagattctcaagattcttgtagaaacctggtccctgtacagagagtggtgtacaatgttcttagtgaactggagaagacatttaacctgccagttctggaagcactgttcagcgatgtcaacatgcaggaataccccgatttaattcacatttataaaggctttgaaaatgtaatccatgacaaattgcctctccaagaaagtgaagaagaagagagggaggagaggtctggcctccaactaagtcttgaacaaggaactggtgaaaactcttttcgaagcctgacttggccaccttcgggttccccatctcatgctggtacaaccccacctgaaaatggactctcagagcacccctgtgaaacagaacagataaatgcaaagagaaaagatacaaccagtgacaaagatgattcgctaggaagccaacaaacaaatgaacaatgtgctcaaaaggctgagccaacagagtcctgcgaacaaattgctgtccaagtgaataatggggatgctggaagggagatgccctgcccgttgccctgtgatgaagaaagcccagaggcagagctacacaaccatggaatccaaattaattcctgttctgtgcgactggtggatataaaaaaggaaaagccattttctaattcaaaagttgagtgccaagcccaagcaagaactcatcataaccaggcatctgacataatagtcatcagcagtgaggactctgaaggatccactgacgttgatgagcccttagaagtcttcatctcagcaccgagaagtgagcctgtgatcaataatgacaaccctttagaatcaaatgatgaaaaggagggccaagaagccacttgctcacgaccccagattgtaccagagcccatggatttcagaaaattatctacattcagagaaagttttaagaaaagagtgataggacaagaccacgacttttcagaatccagtgaggaggaggcgcccgcagaagcctcgagcggggcactgagaagcaagcatgctcctatgacttctagaagtacatctacttggagaatacccagcaggaagagacgtttcagcagtagtgacttttcagacctgagtaatggagaagagcttcaggaaacctgcagctcatccctaagaagagggtcaggtaaagaagattaggatgccaagacttggcctgcagaatgtcaggaatgtgaattaaaagctgctgtttccagacgctttttattctgagcaccttcactaccttgtatccagttcatctgggaactcctttttgcattttagaaaatggaaagaggcaggaaattatgataaactcatgtttaacagaaagagtttcactgactaaatgtatgtaattatattttgttgttgtagaagaaataaatagcaaatttgtggtattcttttttttaaacctgctctcattcctattaacactaagatcttagatttttatagtgataaatgggttgacatcattgtcatttgtaattgtaaagcctcaaaagacaactgttcctactatgtaattatagacagaaataaaaacttcagatcaaac

SEQ ID NO: 29551 - DNA, 2037 bp, Homo sapiens
  source 1..2037: mol_type = unassigned DNA
agacgctgtggtctcacctgtcctggcaaggggcctctgccggctgttcccatgactggctcagggtctgagttcttattccatcaaccttgatcaaaagaaggaaagggaagaaaaaggcccagggaggctgaatgaatgtatttcaccagtagcaaatgagatgaaccatcttcctgcacacagccacgatttgcaaaggtttttggagaggaataaatttaatgaaagatgtacatgacttctaaaaactataagcagtgctgggtaaaattaaacacatgatgttcacggaagaccagggtgtagatgacaggctgctctatgacattgtattcaagcacttcaaaagaaataaggtggagatttcaaatgcaataaaaaagacatttccattcctcgagggcctccgtgatcgtgatctcatcacaaataaaatgtttgaagattctcaagattcttgtagaaacctggtccctgtacagagagtggtgtacaatgttcttagtgaactggagaagacatttaacctgccagttctggaagcactgttcagcgatgtcaacatgcaggaataccccgatttaattcacatttataaaggctttgaaaatgtaatccatgacaaattgcctctccaagaaagtgaagaagaagagagggaggagaggtctggcctccaactaagtcttgaacaaggaactggtgaaaactcttttcgaagcctgacttggccaccttcgggttccccatctcatgctggtacaaccccacctgaaaatggactctcagagcacccctgtgaaacagaacagataaatgcaaagagaaaagatacaaccagtgacaaagatgattcgctaggaagccaacaaacaaatgaacaatgtgctcaaaaggctgagccaacagagtcctgcgaacaaattgctgtccaagtgaataatggggatgctggaagggagatgccctgcccgttgccctgtgatgaagaaagcccagaggcagagctacacaaccatggaatccaaattaattcctgttctgtgcgactggtggatataaaaaaggaaaagccattttctaattcaaaagttgagtgccaagcccaagcaagaactcatcataaccaggcatctgacataatagtcatcagcagtgaggactctgaaggatccactgacgttgatgagcccttagaagtcttcatctcagcaccgagaagtgagcctgtgatcaataatgacaaccctttagaatcaaatgatgaaaaggagggccaagaagccacttgctcacgaccccagattgtaccagagcccatggatttcagaaaattatctacattcagagaaagttttaagaaaagagtgataggacaagaccacgacttttcagaatccagtgaggaggaggcgcccgcagaagcctcgagcggggcactgagaagcaagcatggtgagaaggctcctatgacttctagaagtacatctacttggagaatacccagcaggaagagacgtttcagcagtagtgacttttcagacctgagtaatggagaagagcttcaggaaacctgcagctcatccctaagaagagggtcaggtaaagaagattaggatgccaagacttggcctgcagaatgtcaggaatgtgaattaaaagctgctgtttccagacgctttttattctgagcaccttcactaccttgtatccagttcatctgggaactcctttttgcattttagaaaatggaaagaggcaggaaattatgataaactcatgtttaacagaaagagtttcactgactaaatgtatgtaattatattttgttgttgtagaagaaataaatagcaaatttgtggtattcttttttttaaacctgctctcattcctattaacactaagatcttagatttttatagtgataaatgggttgacatcattgtcatttgtaattgtaaagcctcaaaagacaactgttcctactatgtaattatagacagaaataaaaacttcagatcaaacactctcaaa

SEQ ID NO: 29552 - DNA, 2426 bp, Homo sapiens
  source 1..2426: mol_type = unassigned DNA
gtaactctcccaatcttgaggagtgatccctgtcccagcccctggaaaggggcaggaacgacaaactcaaagtccaggatgttcaccatgacaagagccatggaagaggctctttttcagcacttcatgcaccagaagctggggatcgcctatgccatacacaagccatttcccttctttgaaggcctcctagacaactccatcatcactaagagaatgtacatggaatctctggaagcctgtagaaatttgatccctgtatccagagtggtgcacaacattctcacccaactggagaggacttttaacctgtctcttctggtgacattgttcagtcaaattaacctgcgtgaatatcccaatctggtgacgatttacagaagcttcaaacgtgttggtgcttcctatgaatggcagagcagagacacaccaatcctacttgaagccccaactggcctagcagaaggaagctccctccataccccactggcgctgcccccaccacaaccccctcaaccaagctgttcaccctgtgcgccaagagtcagtgagcctggaacatcctcccagcaaagcgatgagatcctgagtgagtcgcccagcccatctgaccctgtcctgcctctccctgcactcatccaggaaggaagaagcacttcagtgaccaatgacaagttaacatccaaaatgaatgcggaagaagactcagaagagatgcccagcctcctcactagcactgtgcaagtggccagtgacaacctgatcccccaaataagagataaagaagaccctcaagagatgccccactctcccttgggctctatgccagagataagagataattctccagaaccaaatgacccagaagagccccaggaggtgtccagcacaccttcagacaagaaaggaaagaaaagaaaaagatgtatctggtcaactccaaaaaggagacataagaaaaaaagcctcccaggagggacagcctcatctagacacggaatccaaaagaagctcaaaagggtggatcaggttcctcaaaagaaagatgactcaacttgtaactccacggtagagacaagggcccaaaaggcgagaactgaatgtgcccgaaagtcgagatcagaggagatcattgatggcacttcagaaatgaatgaaggaaagaggtcccagaagacgcctagtacaccacgaagggtcacacaaggggcagcctcacctgggcatggcatccaagagaagctccaagtggtggataaggtgactcaaaggaaagacgactcaacctggaactcagaggtcatgatgagggtccaaaaggcaagaactaaatgtgcccgaaagtccagattgaaagaaaagaaaaaggagaaagatatctgttcaagctcaaaaaggagatttcagaaaaatattcaccgaagaggaaaacccaaaagtgacactgtggattttcactgttctaagctccccgtgacctgtggtgaggcgaaagggattttatataagaagaaaatgaaacacggatcctcagtgaagtgcattcggaatgaggatggaacttggttaacaccaaatgaatttgaagtcgaaggaaaaggaaggaacgcaaagaactggaaacggaatatacgttgtgaaggaatgaccctaggagagctgctgaagcggaaaaactcggatgaatgcgaggtgtgctgtcaagggggacaacttctctgctgcggtacttgtccacgagtcttccatgaggactgtcacatcccccctgtggaagccaagaggatgctgtggagttgcaccttctgcaggatgaagaggtcttcaggaagccaacagtgccatcatgtatctaagaccctggagaggcagatgcagcctcaggaccagctgaaatgtgagttcctcctcttgaaggcctactgtcatccacaaagctccttttttacgggcatcccatttaatattcgagattacggtgagccctttcaggaagcaatgtggttggacctggttaaggaaaggctgattacggaaatgtacacggtggcatggtttgtgcgagacatgcgcctgatgtttcgcaaccataaaacattttacaaggcttctgactttggccaggtaggacttgacttagaggcagaatttgaaaaagatctcaaagacgtgctcggttttcatgaagccaatgacggcggtttctggactcttccttgaccctgttctgtaaagactgaagcatccccacctcaggattcagctgatgggaccctggcttggactgttgattgccagtgagtctgggatgtaattggctgccctcaggacccaaacccagacacttcataggattatcacaccctccatctttattctttctttttacctttaaaagtctatatctacactaaaaaaaaaaaaaa

SEQ ID NO: 29553 - DNA, 2080 bp, Homo sapiens
  source 1..2080: mol_type = unassigned DNA
aagtgcccatgaggaggtggagagaggctgcaggcaccgacctgccttcagcttccggcttggcaaactccgaaaactttcacttttcttttctcggaagcccggccccttactgcgtttgtcaaagcacagacttcctgttttgcctgctagcatctccctgtaactctcccaatcttgaggagtgatccctgtcccagcccctggaaaggggcaggaacgacaaactcaaagtccaggatgttcaccatgacaagagccatggaagaggctctttttcagcacttcatgcaccagaagctggggatcgcctatgccatacacaagccatttcccttctttgaaggcctcctagacaactccatcatcactaagagaatgtacatggaatctctggaagcctgtagaaatttgatccctgtatccagagtggtgcacaacattctcacccaactggagaggacttttaacctgtctcttctggtgacattgttcagtcaaattaacctgcgtgaatatcccaatctggtgacgatttacagaagcttcaaacgtgttggtgcttcctatgaatggcagagcagagacacaccaatcctacttgaagccccaactggcctagcagaaggaagctccctccataccccactggcgctgcccccaccacaaccccctcaaccaagctgttcaccctgtgcgccaagagtcagtgagcctggaacatcctcccagcaaagcgatgagatcctgagtgagtcgcccagcccatctgaccctgtcctgcctctccctgcactcatccaggaaggaagaagcacttcagtgaccaatgacaagttaacatccaaaatgaatgcggaagaagactcagaagagatgcccagcctcctcactagcactgtgcaagtggccagtgacaacctgatcccccaaataagagataaagaagaccctcaagagatgccccactctcccttgggctctatgccagagataagagataattctccagaaccaaatgacccagaagagccccaggaggtgtccagcacaccttcagacaagaaaggaaagaaaagaaaaagatgtatctggtcaactccaaaaaggagacataagaaaaaaagcctcccaggagggacagcctcatctagacacggaatccaaaagaagctcaaaagggtggatcaggttcctcaaaagaaagatgactcaacttgtaactccacggtagagacaagggcccaaaaggcgagaactgaatgtgcccgaaagtcgagatcagaggagatcattgatggcacttcagaaatgaatgaaggaaagaggtcccagaagacgcctagtacaccacgaagggtcacacaaggggcagcctcacctgggcatggcatccaagagaagctccaagtggtggataaggtgactcaaaggaaagacgactcaacctggaactcagaggtcatgatgagggtccaaaaggcaagaactaaatgtgcccgaaagtccagattgaaagaaaagaaaaaggagaaagatatctgttcaagctcaaaaaggagatttcagaaaaatattcaccgaagaggaaaacccaaaagtgacactgtggattttcactgttctaagctccccgtgacctgtggtgaggcgaaagggattttatataagaagaaaatgaaacacggatcctcagtgaagtgcattcggaatgaggatggaacttggttaacaccaaatgaatttgaagtcgaaggaaaaggaaggaacgcaaagaactggaaacggaatatacgttgtgaaggaatgaccctaggagagctgctgaagagtggacttttgctctgtcctccaagaataaatctcaagagagagttaaatagcaagtgaatttctactaccctctcagtcaccatgttgcagactttccctgtctggaggctcaccttagagcttctgagtttccaagctctgagtcacctccacatttgggcatggcatcttcaaaacaattaatttgcatagttaatttgggatggggaagcaaatgactctaaaataaaaattaaatgaaaaagct

SEQ ID NO: 29554 - DNA, 1740 bp, Homo sapiens
  source 1..1740: mol_type = unassigned DNA
aagtgcccatgaggaggtggagagaggctgcaggcaccgacctgccttcagcttccggcttggcaaactccgaaaactttcacttttcttttctcggaagcccggccccttactgcgtttgtcaaagcacagacttcctgttttgcctgctagcatctccctgtaactctcccaatcttgaggagtgatccctgtcccagcccctggaaaggggcaggaacgacaaactcaaagtccaggatgttcaccatgacaagagccatggaagaggctctttttcagcacttcatgcaccagaagctggggatcgcctatgccatacacaagccatttcccttctttgaaggcctcctagacaactccatcatcactaagagaatgtacatggaatctctggaagcctgtagaaatttgatccctgtatccagagtggtgcacaacattctcacccaactggagaggacttttaacctgtctcttctggtgacattgttcagtcaaattaacctgcgtgaatatcccaatctggtgacgatttacagaagcttcaaacgtgttggtgcttcctatgaatggcagagcagagacacaccaatcctacttgaagccccaactggcctagcagaaggaagctccctccataccccactggcgctgcccccaccacaaccccctcaaccaagctgttcaccctgtgcgccaagagtcagtgagcctggaacatcctcccagcaaagcgatgagatcctgagtgagtcgcccagcccatctgaccctgtcctgcctctccctgcactcatccaggaaggaagaagcacttcagtgaccaatgacaagttaacatccaaaatgaatgcggaagaagactcagaagagatgcccagcctcctcactagcactgtgcaagtggccagtgacaacctgatcccccaaataagagataaagaagaccctcaagagatgccccactctcccttgggctctatgccagagataagagataattctccagaaccaaatgacccagaagagccccaggaggtgtccagcacaccttcagacaagaaaggaaagaaaagaaaaagatgtatctggtcaactccaaaaaggagacataagaaaaaaagcctcccaggagagatcattgatggcacttcagaaatgaatgaaggaaagaggtcccagaagacgcctagtacaccacgaagggtcacacaaggggcagcctcacctgggcatggcatccaagagaagctccaagtggtggataaggtgactcaaaggaaagacgactcaacctggaactcagaggtcatgatgagggtccaaaaggcaagaactaaatgtgcccgaaagtccagattgaaagaaaagaaaaaggagaaagatatctgttcaagctcaaaaaggagatttcagaaaaatattcaccgaagaggaaaacccaaaagtgacactgtggattttcactgttctaagctccccgtgacctgtggtgaggcgaaagggattttatataagaagaaaatgaaacacggatcctcagtgaagtgcattcggaatgaggatggaacttggttaacaccaaatgaatttgaagtcgaaggaaaaggaaggaacgcaaagaactggaaacggaatatacgttgtgaaggaatgaccctaggagagctgctgaagagtggacttttgctctgtcctccaagaataaatctcaagagagagttaaatagcaagtga

SEQ ID NO: 29555 - DNA, 2337 bp, Homo sapiens
  source 1..2337: mol_type = unassigned DNA
tgtaactctcccaatcttgaggagtgatccctgtcccagcccctggaaaggggcaggaacgacaaactcaaagtccaggatgttcaccatgacaagagccatggaagaggctctttttcagcacttcatgcaccagaagctggggatcgcctatgccatacacaagccatttcccttctttgaaggcctcctagacaactccatcatcactaagagaatgtacatggaatctctggaagcctgtagaaatttgatccctgtatccagagtggtgcacaacattctcacccaactggagaggacttttaacctgtctcttctggtgacattgttcagtcaaattaacctgcgtgaatatcccaatctggtgacgatttacagaagcttcaaacgtgttggtgcttcctatgaatggcagagcagagacacaccaatcctacttgaagccccaactggcctagcagaaggaagctccctccataccccactggcgctgcccccaccacaaccccctcaaccaagctgttcaccctgtgcgccaagagtcagtgagcctggaacatcctcccagcaaagcgatgagatcctgagtgagtcgcccagcccatctgaccctgtcctgcctctccctgcactcatccaggaaggaagaagcacttcagtgaccaatgacaagttaacatccaaaatgaatgcggaagaagactcagaagagatgcccagcctcctcactagcactgtgcaagtggccagtgacaacctgatcccccaaataagagataaagaagaccctcaagagatgccccactctcccttgggctctatgccagagataagagataattctccagaaccaaatgacccagaagagccccaggaggtgtccagcacaccttcagacaagaaaggaaagaaaagaaaaagatgtatctggtcaactccaaaaaggagacataagaaaaaaagcctcccaggagggacagcctcatctagacacggaatccaaaagaagctcaaaagggtggatcaggttcctcaaaagaaagatgactcaacttgtaactccacggtagagacaagggcccaaaaggcgagaactgaatgtgcccgaaagtcgagatcagaggagatcattgatggcacttcagaaatgaatgaaggaaagaggtcccagaagacgcctagtacaccacgaagggtcacacaaggggcagcctcacctgggcatggcatccaagagaagctccaagtggtggataaggtgactcaaaggaaagacgactcaacctggaactcagaggtcatgatgagggtccaaaaggcaagaactaaatgtgcccgaaagtccagattgaaagaaaagaaaaaggagaaagatatctgttcaagctcaaaaaggagatttcagaaaaatattcaccgaagaggaaaacccaaaagtgacactgtggattttcactgttctaagctccccgtgacctgtggtgaggcgaaagggattttatataagaagaaaatgaaacacggatcctcagtgaagtgcattcggaatgaggatggaacttggttaacaccaaatgaatttgaagtcgaaggaaaaggaaggaacgcaaagaactggaaacggaatatacgttgtgaaggaatgaccctaggagagctgctgaagcggaaaaactcggatgaatgcgaggtgtgctgtcaagggggacaacttctctgctgcggtacttgtccacgagtcttccatgaggactgtcacatcccccctgtggaagccaagaggatgctgtggagttgcaccttctgcaggatgaagaggtcttcaggaagccaacagtgccatcatgtatctaagaccctggagaggcagatgcagcctcaggaccagctgattcgagattacggtgagccctttcaggaagcaatgtggttggacctggttaaggaaaggctgattacggaaatgtacacggtggcatggtttgtgcgagacatgcgcctgatgtttcgcaaccataaaacattttacaaggcttctgactttggccaggtaggacttgacttagaggcagaatttgaaaaagatctcaaagacgtgctcggttttcatgaagccaatgacggcggtttctggactcttccttgaccctgttctgtaaagactgaagcatccccacctcaggattcagctgatgggaccctggcttggactgttgattgccagtgagtctgggatgtaattggctgccctcaggacccaaacccagacacttcataggattatcacaccctccatctttattctttctttttacctttaaaagtctatatcta

SEQ ID NO: 29556 - DNA, 1937 bp, Homo sapiens
  source 1..1937: mol_type = unassigned DNA
gttttgcctgctagcatctccctgtaactctcccaatcttgaggagtgatccctgtcccagcccctggaaaggggcaggaacgacaaactcaaagtccaggatgttcaccatgacaagagccatggaagaggctctttttcagcacttcatgcaccagaagctggggatcgcctatgccatacacaagccatttcccttctttgaaggcctcctagacaactccatcatcactaagagaatgtacatggaatctctggaagcctgtagaaatttgatccctgtatccagagtggtgcacaacattctcacccaactggagaggacttttaacctgtctcttctggtgacattgttcagtcaaattaacctgcgtgaatatcccaatctggtgacgatttacagaagcttcaaacgtgttggtgcttcctatgaatggcagagcagagacacaccaatcctacttgaagccccaactggcctagcagaaggaagctccctccataccccactggcgctgcccccaccacaaccccctcaaccaagctgttcaccctgtgcgccaagagtcagtgagcctggaacatcctcccagcaaagcgatgagatcctgagtgagtcgcccagcccatctgaccctgtcctgcctctccctgcactcatccaggaaggaagaagcacttcagtgaccaatgacaagttaacatccaaaatgaatgcggaagaagactcagaagagatgcccagcctcctcactagcactgtgcaagtggccagtgacaacctgatcccccaaataagagataaagaagaccctcaagagatgccccactctcccttgggctctatgccagagataagagataattctccagaaccaaatgacccagaagagccccaggaggtgtccagcacaccttcagacaagaaaggaaagaaaagaaaaagatgtatctggtcaactccaaaaaggagacataagaaaaaaagcctcccaggagcctcatctagacacggaatccaaaagaagctcaaaagggtggatcaggttcctcaaaagaaagatgactcaacttgtaactccacggtagagacaagggcccaaaaggcgagaactgaatgtgcccgaaagtcgagatcagaggagatcattgatggcacttcagaaatgaatgaaggaaagaggtcccagaagacgcctagtacaccacgaagggtcacacaaggggcagcctcacctgggcatggcatccaagagaagctccaagtggtggataaggtgactcaaaggaaagacgactcaacctggaactcagaggtcatgatgagggtccaaaaggcaagaactaaatgtgcccgaaagtccagattgaaagaaaagaaaaaggagaaagatatctgttcaagctcaaaaaggagatttcagaaaaatattcaccgaagaggaaaacccaaaagtgacactgtggattttcactgttctaagctccccgtgacctgtggtgaggcgaaagggattttatataagaagaaaatgaaacacggatcctcagtgaagtgcattcggaatgaggatggaacttggttaacaccaaatgaatttgaagtcgaaggaaaaggaaggaacgcaaagaactggaaacggaatatacgttgtgaaggaatgaccctaggagagctgctgaagagtggacttttgctctgtcctccaagaataaatctcaagagagagttaaatagcaagtgaatttctactaccctctcagtcaccatgttgcagactttccctgtctggaggctcaccttagagcttctgagtttccaagctctgagtcacctccacatttgggcatggcatcttcaaaacaattaatttgcatagttaatttgggatggggaagcaaatgactctaaaataaaaattaaatgaaaaagctca

SEQ ID NO: 29557 - DNA, 813 bp, Homo sapiens
  source 1..813: mol_type = unassigned DNA
ggggcaggaacgacaaactcaaagtccagagtccagcctgttattgtgaatggagccgagatttgccctctaccctcacctaagctctgatccttcagtgcccgcaataggcggctcatctgttatccattgtgtaaatgactagaggatgttcaccatgacaagagccatggaagaggctctttttcagcacttcatgcaccagaagctggggatcgcctatgccatacacaagccatttcccttctttgaaggcctcctagacaactccatcatcactaagagaatgtacatggaatctctggaagcctgtagaaatttgatccctgtatccagagtggtgcacaacattctcacccaactggagaggacttttaacctgtctcttctggtgacattgttcagtcaaattaacctgcgtgaatatcccaatctggtgacgatttacagaagcttcaaacgtgttggtgcttcctatgaatggcagagcagagacacaccaatcctacttgaagccccaactggcctagcagaaggaagctccctccataccccactggcgctgcccccaccacaaccccctcaaccaagctgttcaccctgtgcgccaagagtcagtgagcctggaacatcctcccagcaaagcgatgagatcctgagtgagtcgcccagcccatctgaccctgtcctgcctctccctgcactcatccaggaaggaagaagcacttcagtgaccaatgacaagttaacatccaaaatgaatgcggaagaagactcagaagagatgcccagcctcctcactagcactgtgca

SEQ ID NO: 29558 - DNA, 580 bp, Homo sapiens
  source 1..580: mol_type = unassigned DNA
gaaattgcctaactagctgacgtgggtgcaccaactctacagtcctccctccacccaatctccatgacgtctctcagtcaagggaggaggagcagagccagccccacgaggccacggaagacagggtcacttgttcctgccaaggaaagagggtggaaaagtcattcaactcaagcagatcaaagttgttttgagatctaaaggaagaagttcttgctgccaggatcctcagatgcccatgaaggggctttccaggtgatggggaggggcttcaggatgttcaccatgacaagagccatggaagaggctctttttcagcacttcatgcaccagaagctggggatcgcctatgccatacacaagccatttcccttctttgaaggcctcctagacaactccatcatcactaagagaatgtacatggaatctctggaagcctgtagaaatttgatccctgtatccagagtggtgcacaacattctcacccaactggagaggacttttaacctgtctcttctggtgacattgttcagtcaaattaacctgcgtgaatatcccaatctggtgacgatttacagaa

SEQ ID NO: 29559 - DNA, 2032 bp, Homo sapiens
  source 1..2032: mol_type = unassigned DNA
gaaattgcctaactagctgacgtgggtgcaccaactctacagtcctccctccacccaatctccatgacgtctctcagtcaagggaggaggagcagagccagccccacgaggccacggaagacagggtcacttgttcctgccaaggaaagagggtggaaaagtcattcaactcaagcagatcaaagttgttttgagatctaaaggaagaagttcttgctgccaggatcctcagatgcccatgaaggggctttccaggtgatggggaggggcttcaggatgttcaccatgacaagagccatggaagaggctctttttcagcacttcatgcaccagaagctggggatcgcctatgccatacacaagccatttcccttctttgaaggcctcctagacaactccatcatcactaagagaatgtacatggaatctctggaagcctgtagaaatttgatccctgtatccagagtggtgcacaacattctcacccaactggagaggacttttaacctgtctcttctggtgacattgttcagtcaaattaacctgcgtgaatatcccaatctggtgacgatttacagaagcttcaaacgtgttggtgcttcctatgaatggcagagcagagacacaccaatcctacttgaagccccaactggcctagcagaaggaagctccctccataccccactggcgctgcccccaccacaaccccctcaaccaagctgttcaccctgtgcgccaagagtcagtgagcctggaacatcctcccagcaaagcgatgagatcctgagtgagtcgcccagcccatctgaccctgtcctgcctctccctgcactcatccaggaaggaagaagcacttcagtgaccaatgacaagttaacatccaaaatgaatgcggaagaagactcagaagagatgcccagcctcctcactagcactgtgcaagtggccagtgacaacctgatcccccaaataagagataaagaagaccctcaagagatgccccactctcccttgggctctatgccagagataagagataattctccagaaccaaatgacccagaagagccccaggaggtgtccagcacaccttcagacaagaaaggaaagaaaagaaaaagatgtatctggtcaactccaaaaaggagacataagaaaaaaagcctcccaggagggacagcctcatctagacacggaatccaaaagaagctcaaaagggtggatcaggttcctcaaaagaaagatgactcaacttgtaactccacggtagagacaagggcccaaaaggcgagaactgaatgtgcccgaaagtcgagatcagaggagatcattgatggcacttcagaaatgaatgaaggaaagaggtcccagaagacgcctagtacaccacgaagggtcacacaaggggcagcctcacctgggcatggcatccaagagaagctccaagtggtggataaggtgactcaaaggaaagacgactcaacctggaactcagaggtcatgatgagggtccaaaaggcaagaactaaatgtgcccgaaagtccagattgaaagaaaagaaaaaggagaaagatatctgttcaagctcaaaaaggagatttcagaaaaatattcaccgaagaggaaaacccaaaagtgacactgtggattttcactgttctaagctccccgtgacctgtggtgaggcgaaagggattttatataagaagaaaatgaaacacggatcctcagtgaagtgcattcggaatgaggatggaacttggttaacaccaaatgaatttgaagtcgaaggaaaaggaaggaacgcaaagaactggaaacggaatatacgttgtgaaggaatgaccctaggagagctgctgaagagtggacttttgctctgtcctccaagaataaatctcaagagagagttaaatagcaagtgaatttctactaccctctcagtcaccatgttgcagactttccctgtctggaggctcaccttagagcttctgagtttccaagctctgagtcacctccacatttgggcat

SEQ ID NO: 29560 - DNA, 6359 bp, Homo sapiens
  source 1..6359: mol_type = unassigned DNA
gggacgaatttcctccccagctcagctcccctacagcttggctaggcctgctccgagcgcctgcaaggtggaggaggcctgcgcctcgggcctggcagcggcagccggcgagggaggcgggcacagcggggtaaccggcgagccgtagccgctctcgaaaacctacgctgccacggccgctcattgtctctccccttccacccgggggcaaacaggaagcgcgccgcctggcagaccgacggacaggcgcctggaccaatgagcacagccgacaaagagcacggcggcgaatgagagccaagaagaggggcgggagttccgggcgggctgtcaccctcttccccccttttgggctggaggctccaccttttgtgtttcccgcacagtcaatcaaaataggaaaaaaaaatccccggaccgctccggccgtgtccgccgccgcttcccgcatcctctcccgccgccgccgccttcgctcctcaccatgtgtaaggcggcggggagccccgcctgaggtgccctaaacacactatgaccgctcccgaaaagcccgtgaaacaagaggaaatggctgccttggacgtggatagcggcggcggcggtggcggcggcggcggccacggcgagtatctgcagcagcagcaacagcacggaaacggtgcggtggcggcggcagcggcggcccaggacactcagccgtcaccgctcgctctgctggccgctacctgcagcaagatagggccgccatcgccgggcgacgacgaggaggaggcggccgccgcagccggggcccccgccgccgccggagcgacaggtgatttggcttctgcacagttaggaggagcaccaaaccgatgggaggttttgtcagccacacctacaactataaaagatgaagctggtaatctagtccagattccaagtgctgctacttcaagtgggcagtatgttcttccccttcagaatttgcagaatcaacaaatattttccgttgcaccaggatcagattcatcaaatggtacagtgtccagtgttcaatatcaagtgataccacagatccagtcagcagatggtcagcaggttcaaattggtttcacaggctcttcagataatgggggtataaatcaagaaagcagtcaaattcagatcattcctggctctaatcaaaccttacttgcctctggaacaccttctgctaacatccagaatctcataccacagactggtcaagtccaggttcagggagttgcaattggtggttcatcttttcctggtcaaacccaagtagttgctaatgtgcctcttggtctgccaggaaatattacgtttgtaccaatcaatagtgtcgatctagattctttgggactctcgggcagttctcagacaatgactgcaggcattaatgccgacggacatttgataaacacaggacaagctatggatagttcagacaattcagaaaggactggtgagcgggtttctcctgatattaatgaaactaatactgatacagatttatttgtgccaacatcctcttcatcacagttgcctgttacgatagatagtacaggtatattacaacaaaacacaaatagcttgactacatctagtgggcaggttcattcttcagatcttcagggaaattatatccagtcgcctgtttctgaagagacacaggcacagaatattcaggtttctacagcacagcctgttgtacagcatctacaacttcaagagtctcagcagccaaccagtcaagcccaaattgtgcaaggtattacaccacagacaatccatggtgtgcaagccagtggtcaaaatatatcacaacaggctttgcaaaatcttcagttgcagctgaatcctggaacctttttaattcaggcacagacagtgaccccttctggacaggtaacttggcaaacgtttcaagtacaaggggtccagaacttgcagaatttgcaaatacagaatactgctgcccaacaaataactttgacgcctgttcaaaccctcacacttggtcaagttgcggcaggtggagccttcacttcaactccagttagtctaagcactggtcagttgccaaatctacaaacagttacagtgaactctatagattctgctggtatacagctacatccaggagagaatgctgacagtcctgcagatattaggatcaaggaagaagaacctgatcctgaagagtggcagctcagtggtgattctaccttgaataccaatgacctaacacacttaagagtacaggtggtagatgaagaaggggaccaacaacatcaagaaggaaaaagacttcggagggtagcttgcacctgtcccaactgtaaagaaggtggtggaagaggtaccaatcttgggaaaaagaagcaacacatttgtcatataccaggatgtggtaaagtctatgggaagacctcacatctgagagctcatctgcgttggcattctggagaacgcccttttgtttgtaactggatgtactgtggtaaaagatttactcgaagtgatgaattacagaggcacagaagaacacatacaggtgagaagaaatttgtttgtccagaatgttcaaaacgctttatgagaagtgaccaccttgccaaacatattaaaacacaccagaataaaaaaggtattcactctagcagtacagtgctggcatctgtggaagctgcgcgagatgatactttgattactgcaggaggaacaacgcttatccttgcaaatattcaacaaggttctgtttcagggataggaactgttaatacttccgccaccagcaatcaagatatccttaccaacactgaaatacctttacagcttgtcacagtttctggaaatgagacaatggagtaaatattacacaaatacttattcattgtggttatttttatacagtagtgagaagaatattgttcctaagttcttagatatctttttattgatgtgcaaaaatttttggattgacagtaacttggttatacatgacactgaaatgccttactttgtatgatattccatagtatattaaaaatggtaaaattgcatgggttttgtaggtacttttggaatctagaagaaatgaaattttaccaagttatataaagagaaaattgaatttaacaatgcgaatggtagtctaaccaaatgcatcaatcctgtgtggtttagtgtaaaaatgagaacatgttggtatttatctattgtaagataaaaaagctggtgggtgaaagaaatcatgttatgataaaaaattttgtaattttcttgatgactggaatttttattatgcataactgacaaatcaagtttccaagcaaatgttacatagtgtaggctttacttagcttatcaatttgtcattttgaagctaattattttaattaggttaactatgtacaatattttaagcattactcttgtaagattttgaaaactacattttaacatggaactctagggatagtcaccttttaaatcctgttgaaaagccatgtttaagatttaatttgccaaaataatgtcttgttaatattctttcaataacgaagttgggcaatataaccaatgtttaaaaaagtttaaaatgtataagttgaggcatttgggtggtaagagaatgttatagtgaattatcccttttcttgactattggaggaccaaaaaaataaggtgtattgcgtcttagcagtgatttttatccaatcttgtttccaaaaaccatgtctcccagggccttaaaagccatcatgtaaattaccagtaaagtgtaacatatgcaaacataacaaaatcacttccatagtgacgatactccaaccatatggatattagtcatagaagaactagaggttttatgatatttttttaagtcttttttttttttgtctaggtagtcagtctgcacttaaatatcaatcattttccttttttgcttcttcccttaaaatttatatgtatccagtacatttaattgagaagcgtatgttttttattatgctgtattttctttttattttttaattattgtttatattttcaattcaaaaatgtacaaaataaagttacattgctggtcttgtaagagctatacagttttcctaaatgtatacctgtaactgcagcagttcacctatttcaaaaatttggaattctgttcatttgttattcttaagaccacctcaaatttaaaggctaccttattgtacgtttaaagtgtattataacagtgtggtagttaataaaacactatttttttttcttttgagtttgttgtattcctatgcataaaaaatattgcagtggtatggggtaagaattggtggtttatttttcttcaacttggctttttatttttagattcttgattttagacactgaattgtaaacaggcatttatttgaagaagagatatatagagacactggtcatttactaattttttacctagagtaaataagaatgagcttattaaataaaatttttgaaaaaaagtcttagcccttagcccacattgattcatatcagttttatcagtaccattttgcaatttttttgttttccgttttaaagcaatgcagaatattttgatttatcgaaaacctgaatttacattaagactcctgaaaatgataagacaagcgttggtaaccatggcaggagttacttgaaaaagttgcctttgaatttgcatgtgtttcatcattataaaggcagagtaggaggaaagagtattaatgtgattgtgtattgtagatgttttaaagtaaaaatcaagtttcttaacacatgtatacagtgggggtaaagatgtccattttctgttttccaggcccagtctgactctgtctgtaatacctgattgcattggagaactctagacacgcataaacatggacagtttttctaaatgtgagacttaagcctgtgatgtaaaataggaagttctacttggaataatataaaggaaccactagaatttacaattattttgaagttacagggattagattttgaatcttaaaatcctttaggtaatttttagaatttttaaattaagattaatgtgaagagaattaagtgagcagcaggtggttcacttgagcaaactgcccattaagtcagattaaaccatttgaatgatagtagagatgttttaagtaatactggatttttacagtaagtttatggtgtactttgaatcgataggtgtccatgcatattttatgaattcgtggagaatgaatgcaatgaagaaagtaagtagtcttgaaaattatttaaataaagttgtagatttttttagtgccccctaggaatatattagtgaactttggaacttttaccaaagttatgtaacctcagtgtagataattttaaatatttctatttttatattttaaaatgttgaatatactctggaaacaacatttgaagatttgctctgatgtcaactttttctggttataaaacctattagtattgtgtataattctcagggtaggtatactctaataggtgttttgtcaattgctttatttttgtaaaggctagagttagtgcatattgaatatatttatgtacaaataattcctgttgtaacatttagtggacgcgattatctgtatacctcaaattttaatttaagaaagtatcacttaaagagcatctcattttctatagattgaggcttaattactgaaaagtgactcaaccaaaaagcacataaccttttaaaggagctacacctaccgcagaaagtcagatgccctgtaaataactttggtctttcaaaatagtggcaatgcttaagatacttaaaaatacacatacatataagctgaaagcatgtcaagcctatttcatagaaaatagttcttaaacagtattgttcattagaaattgctggggagcattttagagattccataggcctggtagccacctcagcttactaaatcaacatctctggagatggagtgtatatgtgttttgaaacagctgctcaagtggttctgttaaacactcctgcgttacaatcacttaaaatagagcaagcatccccttaggctcttaattgtagtttaaattccagtactgcctactcagacccaaaagttttgttttatgaaaaatttgtattgtgttcaatattgtttgaaatttggggttgttgcataaatgattatggaataacatttggttttaaaataatataaactgacatgttatgctacctgttacacaatttggttttcagttttaattatatgaagctggtaacaatcgtttttgttgtaaaagaattatttttcactaaacagtatgtttaaaactga

SEQ ID NO: 29561 - DNA, 3627 bp, Homo sapiens
  source 1..3627: mol_type = unassigned DNA
ctcccgaaaagcccgtgaaacaagaggaaatggctgccttggacgtggatagcggcggcggcggtggcggcggcggcggccacggcgagtatctgcagcagcagcaacagcacggaaacggtgcggtggcggcggcagcggcggcccagacaggtgatttggcttctgcacagttaggaggagcaccaaaccgatgggaggttttgtcagccacacctacaactataaaagatgaagctggtaatctagtccagattccaagtgctgctacttcaagtgggcagtatgttcttccccttcagaatttgcagaatcaacaaatattttccgttgcaccaggatcagattcatcaaatggtacagtgtccagtgttcaatatcaagtgataccacagatccagtcagcagatggtcagcaggttcaaattggtttcacaggctcttcagataatgggggtataaatcaagaaagcagtcaaattcagatcattcctggctctaatcaaaccttacttgcctctggaacaccttctgctaacatccagaatctcataccacagactggtcaagtccaggttcagggagttgcaattggtggttcatcttttcctggtcaaacccaagtagttgctaatgtgcctcttggtctgccaggaaatattacgtttgtaccaatcaatagtgtcgatctagattctttgggactctcgggcagttctcagacaatgactgcaggcattaatgccgacggacatttgataaacacaggacaagctatggatagttcagacaattcagaaaggactggtgagcgggtttctcctgatattaatgaaactaatactgatacagatttatttgtgccaacatcctcttcatcacagttgcctgttacgatagatagtacaggtatattacaacaaaacacaaatagcttgactacatctagtgggcaggttcattcttcagatcttcagggaaattatatccagtcgcctgtttctgaagagacacaggcacagaatattcaggtttctacagcacagcctgttgtacagcatctacaacttcaagagtctcagcagccaaccagtcaagcccaaattgtgcaaggtattacaccacagacaatccatggtgtgcaagccagtggtcaaaatatatcacaacaggctttgcaaaatcttcagttgcagctgaatcctggaacctttttaattcaggcacagacagtgaccccttctggacaggtaacttggcaaacgtttcaagtacaaggggtccagaacttgcagaatttgcaaatacagaatactgctgcccaacaaataactttgacgcctgttcaaaccctcacacttggtcaagttgcggcaggtggagccttcacttcaactccagttagtctaagcactggtcagttgccaaatctacaaacagttacagtgaactctatagattctgctggtatacagctacatccaggagagaatgctgacagtcctgcagatattaggatcaaggaagaagaacctgatcctgaagagtggcagctcagtggtgattctaccttgaataccaatgacctaacacacttaagagtacaggtggtagatgaagaaggggaccaacaacatcaagaaggaaaaagacttcggagggtagcttgcacctgtcccaactgtaaagaaggtggtggaagaggtaccaatcttgggaaaaagaagcaacacatttgtcatataccaggatgtggtaaagtctatgggaagacctcacatctgagagctcatctgcgttggcattctggagaacgcccttttgtttgtaactggatgtactgtggtaaaagatttactcgaagtgatgaattacagaggcacagaagaacacatacaggtgagaagaaatttgtttgtccagaatgttcaaaacgctttatgagaagtgaccaccttgccaaacatattaaaacacaccagaataaaaaaggtattcactctagcagtacagtgctggcatctgtggaagctgcgcgagatgatactttgattactgcaggaggaacaacgcttatccttgcaaatattcaacaaggttctgtttcagggataggaactgttaatacttccgccaccagcaatcaagatatccttaccaacactgaaatacctttacagcttgtcacagtttctggaaatgagacaatggagtaaatattacacaaatacttattcattgtggttatttttatacagtagtgagaagaatattgttcctaagttcttagatatctttttattgatgtgcaaaaatttttggattgacagtaacttggttatacatgacactgaaatgccttactttgtatgatattccatagtatattaaaaatggtaaaattgcatgggttttgtaggtacttttggaatctagaagaaatgaaattttaccaagttatataaagagaaaattgaatttaacaatgcgaatggtagtctaaccaaatgcatcaatcctgtgtggtttagtgtaaaaatgagaacatgttggtatttatctattgtaagataaaaaagctggtgggtgaaagaaatcatgttatgataaaaaattttgtaattttcttgatgactggaatttttattatgcataactgacaaatcaagtttccaagcaaatgttacatagtgtaggctttacttagcttatcaatttgtcattttgaagctaattattttaattaggttaactatgtacaatattttaagcattactcttgtaagattttgaaaactacattttaacatggaactctagggatagtcaccttttaaatcctgttgaaaagccatgtttaagatttaatttgccaaaataatgtcttgttaatattctttcaataacgaagttgggcaatataaccaatgtttaaaaaagtttaaaatgtataagttgaggcatttgggtggtaagagaatgttatagtgaattatcccttttcttgactattggaggaccaaaaaaataaggtgtattgcgtcttagcagtgatttttatccaatcttgtttccaaaaaccatgtctcccagggccttaaaagccatcatgtaaattaccagtaaagtgtaacatatgcaaacataacaaaatcacttccatagtgacgatactccaaccatatggatattagtcatagaagaactagaggttttatgatatttttttaagtcttttttttttttgtctaggtagtcagtctgcacttaaatatcaatcattttccttttttgcttcttcccttaaaatttatatgtatccagtacatttaattgagaagcgtatgttttttattatgctgtattttctttttattttttaattattgtttatattttcaattcaaaaatgtacaaaataaagttacattgctggtcttgtaagagctatacagttttcctaaatgtatacctgtaactgcagcagttcacctatttcaaaaatttggaattctgttcatttgttattcttaagaccacctcaaatttaaaggctaccttattgtacgtttaaagtgtattataacagtgtggtagttaataaaacactatttttttttcttttga

SEQ ID NO: 29562 - DNA, 3937 bp, Homo sapiens
  source 1..3937: mol_type = unassigned DNA
cctcgcccgcctgccgcctttttgtgcgcgtgtgagtgtgggccccagcgtgccctcccgggggtgggttccgggcggaaggcggaggcccggcgcgcagcccgccgcccgcctgcccgcggaccggggagccggggtgcttggagcgggggacgccaggcgtgggctggcggcgggaccaggaggaggaggaggaggaggaggagagcgcgggctggcgcttgcccgggcgcagtcggcggggaccgagtcgtacttcctgtgcgaaaggcggcccgaccctaaccgccaccccctccccctgtctccctctctgaacccgcccattgggggtaggacactcagccgtcaccgctcgctctgctggccgctacctgcagcaagatagggccgccatcgccgggcgacgacgaggaggaggcggccgccgcagccggggcccccgccgccgccggagcgacaggtgatttggcttctgcacagttaggaggagcaccaaaccgatgggaggttttgtcagccacacctacaactataaaagatgaagctggtaatctagtccagattccaagtgctgctacttcaagtgggcagtatgttcttccccttcagaatttgcagaatcaacaaatattttccgttgcaccaggatcagattcatcaaatggtacagtgtccagtgttcaatatcaagtgataccacagatccagtcagcagatggtcagcaggttcaaattggtttcacaggctcttcagataatgggggtataaatcaagaaagcagtcaaattcagatcattcctggctctaatcaaaccttacttgcctctggaacaccttctgctaacatccagaatctcataccacagactggtcaagtccaggttcagggagttgcaattggtggttcatcttttcctggtcaaacccaagtagttgctaatgtgcctcttggtctgccaggaaatattacgtttgtaccaatcaatagtgtcgatctagattctttgggactctcgggcagttctcagacaatgactgcaggcattaatgccgacggacatttgataaacacaggacaagctatggatagttcagacaattcagaaaggactggtgagcgggtttctcctgatattaatgaaactaatactgatacagatttatttgtgccaacatcctcttcatcacagttgcctgttacgatagatagtacaggtatattacaacaaaacacaaatagcttgactacatctagtgggcaggttcattcttcagatcttcagggaaattatatccagtcgcctgtttctgaagagacacaggcacagaatattcaggtttctacagcacagcctgttgtacagcatctacaacttcaagagtctcagcagccaaccagtcaagcccaaattgtgcaaggtattacaccacagacaatccatggtgtgcaagccagtggtcaaaatatatcacaacaggctttgcaaaatcttcagttgcagctgaatcctggaacctttttaattcaggcacagacagtgaccccttctggacaggtaacttggcaaacgtttcaagtacaaggggtccagaacttgcagaatttgcaaatacagaatactgctgcccaacaaataactttgacgcctgttcaaaccctcacacttggtcaagttgcggcaggtggagccttcacttcaactccagttagtctaagcactggtcagttgccaaatctacaaacagttacagtgaactctatagattctgctggtatacagctacatccaggagagaatgctgacagtcctgcagatattaggatcaaggaagaagaacctgatcctgaagagtggcagctcagtggtgattctaccttgaataccaatgacctaacacacttaagagtacaggtggtagatgaagaaggggaccaacaacatcaagaaggaaaaagacttcggagggtagcttgcacctgtcccaactgtaaagaaggtggtggaagaggtaccaatcttgggaaaaagaagcaacacatttgtcatataccaggatgtggtaaagtctatgggaagacctcacatctgagagctcatctgcgttggcattctggagaacgcccttttgtttgtaactggatgtactgtggtaaaagatttactcgaagtgatgaattacagaggcacagaagaacacatacaggtgagaagaaatttgtttgtccagaatgttcaaaacgctttatgagaagtgaccaccttgccaaacatattaaaacacaccagaataaaaaaggtattcactctagcagtacagtgctggcatctgtggaagctgcgcgagatgatactttgattactgcaggaggaacaacgcttatccttgcaaatattcaacaaggttctgtttcagggataggaactgttaatacttccgccaccagcaatcaagatatccttaccaacactgaaatacctttacagcttgtcacagtttctggaaatgagacaatggagtaaatattacacaaatacttattcattgtggttatttttatacagtagtgagaagaatattgttcctaagttcttagatatctttttattgatgtgcaaaaatttttggattgacagtaacttggttatacatgacactgaaatgccttactttgtatgatattccatagtatattaaaaatggtaaaattgcatgggttttgtaggtacttttggaatctagaagaaatgaaattttaccaagttatataaagagaaaattgaatttaacaatgcgaatggtagtctaaccaaatgcatcaatcctgtgtggtttagtgtaaaaatgagaacatgttggtatttatctattgtaagataaaaaagctggtgggtgaaagaaatcatgttatgataaaaaattttgtaattttcttgatgactggaatttttattatgcataactgacaaatcaagtttccaagcaaatgttacatagtgtaggctttacttagcttatcaatttgtcattttgaagctaattattttaattaggttaactatgtacaatattttaagcattactcttgtaagattttgaaaactacattttaacatggaactctagggatagtcaccttttaaatcctgttgaaaagccatgtttaagatttaatttgccaaaataatgtcttgttaatattctttcaataacgaagttgggcaatataaccaatgtttaaaaaagtttaaaatgtataagttgaggcatttgggtggtaagagaatgttatagtgaattatcccttttcttgactattggaggaccaaaaaaataaggtgtattgcgtcttagcagtgatttttatccaatcttgtttccaaaaaccatgtctcccagggccttaaaagccatcatgtaaattaccagtaaagtgtaacatatgcaaacataacaaaatcacttccatagtgacgatactccaaccatatggatattagtcatagaagaactagaggttttatgatatttttttaagtcttttttttttttgtctaggtagtcagtctgcacttaaatatcaatcattttccttttttgcttcttcccttaaaatttatatgtatccagtacatttaattgagaagcgtatgttttttattatgctgtattttctttttattttttaattattgtttatattttcaattcaaaaatgtacaaaataaagttacattgctggtcttgtaagagctatacagttttcctaaatgtatacctgtaactgcagcagttcacctatttcaaaaatttggaattctgttcatttgttattcttaagaccacctcaaatttaaaggctaccttattgtacgtttaaagtgtattataacagtgtggtagttaataaaacactatttttttttcttttga

SEQ ID NO: 29563 - DNA, 6236 bp, Homo sapiens
  source 1..6236: mol_type = unassigned DNA
gggacgaatttcctccccagctcagctcccctacagcttggctaggcctgctccgagcgcctgcaaggtggaggaggcctgcgcctcgggcctggcagcggcagccggcgagggaggcgggcacagcggggtaaccggcgagccgtagccgctctcgaaaacctacgctgccacggccgctcattgtctctccccttccacccgggggcaaacaggaagcgcgccgcctggcagaccgacggacaggcgcctggaccaatgagcacagccgacaaagagcacggcggcgaatgagagccaagaagaggggcgggagttccgggcgggctgtcaccctcttccccccttttgggctggaggctccaccttttgtgtttcccgcacagtcaatcaaaataggaaaaaaaaatccccggaccgctccggccgtgtccgccgccgcttcccgcatcctctcccgccgccgccgccttcgctcctcaccatgtgtaaggcggcggggagccccgcctgaggtgccctaaacacactatgaccgctcccgaaaagcccgtgaaacaagaggaaatggctgccttggacgtggatagcggcggcggcggtggcggcggcggcggccacggcgagtatctgcagcagcagcaacagcacggaaacggtgcggtggcggcggcagcggcggcccagacaggtgatttggcttctgcacagttaggaggagcaccaaaccgatgggaggttttgtcagccacacctacaactataaaagatgaagctggtaatctagtccagattccaagtgctgctacttcaagtgggcagtatgttcttccccttcagaatttgcagaatcaacaaatattttccgttgcaccaggatcagattcatcaaatggtacagtgtccagtgttcaatatcaagtgataccacagatccagtcagcagatggtcagcaggttcaaattggtttcacaggctcttcagataatgggggtataaatcaagaaagcagtcaaattcagatcattcctggctctaatcaaaccttacttgcctctggaacaccttctgctaacatccagaatctcataccacagactggtcaagtccaggttcagggagttgcaattggtggttcatcttttcctggtcaaacccaagtagttgctaatgtgcctcttggtctgccaggaaatattacgtttgtaccaatcaatagtgtcgatctagattctttgggactctcgggcagttctcagacaatgactgcaggcattaatgccgacggacatttgataaacacaggacaagctatggatagttcagacaattcagaaaggactggtgagcgggtttctcctgatattaatgaaactaatactgatacagatttatttgtgccaacatcctcttcatcacagttgcctgttacgatagatagtacaggtatattacaacaaaacacaaatagcttgactacatctagtgggcaggttcattcttcagatcttcagggaaattatatccagtcgcctgtttctgaagagacacaggcacagaatattcaggtttctacagcacagcctgttgtacagcatctacaacttcaagagtctcagcagccaaccagtcaagcccaaattgtgcaaggtattacaccacagacaatccatggtgtgcaagccagtggtcaaaatatatcacaacaggctttgcaaaatcttcagttgcagctgaatcctggaacctttttaattcaggcacagacagtgaccccttctggacaggtaacttggcaaacgtttcaagtacaaggggtccagaacttgcagaatttgcaaatacagaatactgctgcccaacaaataactttgacgcctgttcaaaccctcacacttggtcaagttgcggcaggtggagccttcacttcaactccagttagtctaagcactggtcagttgccaaatctacaaacagttacagtgaactctatagattctgctggtatacagctacatccaggagagaatgctgacagtcctgcagatattaggatcaaggaagaagaacctgatcctgaagagtggcagctcagtggtgattctaccttgaataccaatgacctaacacacttaagagtacaggtggtagatgaagaaggggaccaacaacatcaagaaggaaaaagacttcggagggtagcttgcacctgtcccaactgtaaagaaggtggtggaagaggtaccaatcttgggaaaaagaagcaacacatttgtcatataccaggatgtggtaaagtctatgggaagacctcacatctgagagctcatctgcgttggcattctggagaacgcccttttgtttgtaactggatgtactgtggtaaaagatttactcgaagtgatgaattacagaggcacagaagaacacatacaggtgagaagaaatttgtttgtccagaatgttcaaaacgctttatgagaagtgaccaccttgccaaacatattaaaacacaccagaataaaaaaggtattcactctagcagtacagtgctggcatctgtggaagctgcgcgagatgatactttgattactgcaggaggaacaacgcttatccttgcaaatattcaacaaggttctgtttcagggataggaactgttaatacttccgccaccagcaatcaagatatccttaccaacactgaaatacctttacagcttgtcacagtttctggaaatgagacaatggagtaaatattacacaaatacttattcattgtggttatttttatacagtagtgagaagaatattgttcctaagttcttagatatctttttattgatgtgcaaaaatttttggattgacagtaacttggttatacatgacactgaaatgccttactttgtatgatattccatagtatattaaaaatggtaaaattgcatgggttttgtaggtacttttggaatctagaagaaatgaaattttaccaagttatataaagagaaaattgaatttaacaatgcgaatggtagtctaaccaaatgcatcaatcctgtgtggtttagtgtaaaaatgagaacatgttggtatttatctattgtaagataaaaaagctggtgggtgaaagaaatcatgttatgataaaaaattttgtaattttcttgatgactggaatttttattatgcataactgacaaatcaagtttccaagcaaatgttacatagtgtaggctttacttagcttatcaatttgtcattttgaagctaattattttaattaggttaactatgtacaatattttaagcattactcttgtaagattttgaaaactacattttaacatggaactctagggatagtcaccttttaaatcctgttgaaaagccatgtttaagatttaatttgccaaaataatgtcttgttaatattctttcaataacgaagttgggcaatataaccaatgtttaaaaaagtttaaaatgtataagttgaggcatttgggtggtaagagaatgttatagtgaattatcccttttcttgactattggaggaccaaaaaaataaggtgtattgcgtcttagcagtgatttttatccaatcttgtttccaaaaaccatgtctcccagggccttaaaagccatcatgtaaattaccagtaaagtgtaacatatgcaaacataacaaaatcacttccatagtgacgatactccaaccatatggatattagtcatagaagaactagaggttttatgatatttttttaagtcttttttttttttgtctaggtagtcagtctgcacttaaatatcaatcattttccttttttgcttcttcccttaaaatttatatgtatccagtacatttaattgagaagcgtatgttttttattatgctgtattttctttttattttttaattattgtttatattttcaattcaaaaatgtacaaaataaagttacattgctggtcttgtaagagctatacagttttcctaaatgtatacctgtaactgcagcagttcacctatttcaaaaatttggaattctgttcatttgttattcttaagaccacctcaaatttaaaggctaccttattgtacgtttaaagtgtattataacagtgtggtagttaataaaacactatttttttttcttttgagtttgttgtattcctatgcataaaaaatattgcagtggtatggggtaagaattggtggtttatttttcttcaacttggctttttatttttagattcttgattttagacactgaattgtaaacaggcatttatttgaagaagagatatatagagacactggtcatttactaattttttacctagagtaaataagaatgagcttattaaataaaatttttgaaaaaaagtcttagcccttagcccacattgattcatatcagttttatcagtaccattttgcaatttttttgttttccgttttaaagcaatgcagaatattttgatttatcgaaaacctgaatttacattaagactcctgaaaatgataagacaagcgttggtaaccatggcaggagttacttgaaaaagttgcctttgaatttgcatgtgtttcatcattataaaggcagagtaggaggaaagagtattaatgtgattgtgtattgtagatgttttaaagtaaaaatcaagtttcttaacacatgtatacagtgggggtaaagatgtccattttctgttttccaggcccagtctgactctgtctgtaatacctgattgcattggagaactctagacacgcataaacatggacagtttttctaaatgtgagacttaagcctgtgatgtaaaataggaagttctacttggaataatataaaggaaccactagaatttacaattattttgaagttacagggattagattttgaatcttaaaatcctttaggtaatttttagaatttttaaattaagattaatgtgaagagaattaagtgagcagcaggtggttcacttgagcaaactgcccattaagtcagattaaaccatttgaatgatagtagagatgttttaagtaatactggatttttacagtaagtttatggtgtactttgaatcgataggtgtccatgcatattttatgaattcgtggagaatgaatgcaatgaagaaagtaagtagtcttgaaaattatttaaataaagttgtagatttttttagtgccccctaggaatatattagtgaactttggaacttttaccaaagttatgtaacctcagtgtagataattttaaatatttctatttttatattttaaaatgttgaatatactctggaaacaacatttgaagatttgctctgatgtcaactttttctggttataaaacctattagtattgtgtataattctcagggtaggtatactctaataggtgttttgtcaattgctttatttttgtaaaggctagagttagtgcatattgaatatatttatgtacaaataattcctgttgtaacatttagtggacgcgattatctgtatacctcaaattttaatttaagaaagtatcacttaaagagcatctcattttctatagattgaggcttaattactgaaaagtgactcaaccaaaaagcacataaccttttaaaggagctacacctaccgcagaaagtcagatgccctgtaaataactttggtctttcaaaatagtggcaatgcttaagatacttaaaaatacacatacatataagctgaaagcatgtcaagcctatttcatagaaaatagttcttaaacagtattgttcattagaaattgctggggagcattttagagattccataggcctggtagccacctcagcttactaaatcaacatctctggagatggagtgtatatgtgttttgaaacagctgctcaagtggttctgttaaacactcctgcgttacaatcacttaaaatagagcaagcatccccttaggctcttaattgtagtttaaattccagtactgcctactcagacccaaaagttttgttttatgaaaaatttgtattgtgttcaatattgtttgaaatttggggttgttgcataaatgattatggaataacatttggttttaaaataatataaactgacatgttatgctacctgttacacaatttggttttcagttttaattatatgaagctggtaacaatcgtttttgttgtaaaagaattatttttcactaaacagtatgtttaaaactga

SEQ ID NO: 29564 - DNA, 6126 bp, Homo sapiens
  source 1..6126: mol_type = unassigned DNA
atcaagggcgagtcagccgggctcgggcggagagaggagctgctacgccacagcccagcggcggccattcgcggaaaaagaggcagagcctgtgccagctacagcctcctccgagccaccgcgggcgggcgggaccggcctctcctcccgcctcgcccccacccccacccacctctatcccagtgtctccgtctgagggtttgtcctgttaatgcgggatgagcgatcagaagaaggaggaggaggaggaggcggcagcggcagcggcgatggctacagaaggagggaaaacctctgagccagagaataacaataaaaaacccaaaacctcaggctcccaggactctcagccctctcctctggctttactggcagctacttgcagcaaaatagggactcctggtgaaaatcaagcaactggacaacaacaaattattatagatccaagtcaaggattggtgcaacttcaaaatcaaccacaacagctagaactggtaacaacgcaacttgctggaaacgcttggcaacttgttgcctccactcctcctgcttcaaaagagaataacgtttctcaaccagcctctagttcgtctagttcttccagcagtaataacgggagtgcatctcctacaaaaactaaatcaggtaattcttccacccctggtcaatttcaagtcatacaagtacaaaatccaagtggtagtgtacagtaccaagtaattccacaacttcagacagtggaaggtcaacaaattcaaatcaatccaactagtagttcatctctacaggatttgcagggtcaaattcagctcatttctgcaggtaataatcaagctatactcacagctgctaacaggacagcttctgggaatattcttgctcaaaacctggcaaatcagacagttccggtccaaattagacctggtgtttcaataccactgcagttacagactcttcctggtactcaggctcaagttgtaacaaccctaccaattaacattggaggagtgactctagctttgccagtgataaacaacgtggctgccggaggagggactgggcaggttggccagcctgctgctactgctgatagtgggacttccaatgggaatcaattagtttccacacccaccaacaccactacttctgccagtactatgccagaatctccctcctcctccactacctgcacaaccactgcttcaacgtctttgacaagcagtgacacattagtgagctcagcagatactggccagtatgcaagcacatcagccagtagttctgaacgcaccattgaagaatctcaaacacctgctgctactgagtctgaagcccagagctccagtcagcttcagcctaatggaatgcagaatgcacaggatcaatcaaattctcttcagcaggtgcaaattgtaggccaacctatcttacagcagatccagatccaacagcctcagcaacagatcattcaggctattccaccacagtcgtttcaactccagtcagggcagacgattcagaccatccagcagcagcctttacagaatgttcaacttcaagcagtaaatccgactcaggtgcttatcagggctccaactttaacaccttcagggcaaatcagttggcaaactgtacaggttcagaatattcagagtctttcaaatttgcaagttcagaatgctgggttatcccaacaattaaccatcaccccagtgtcttcaagtggtggcacaactcttgctcagattgctcctgtggctgttgctggtgccccaataactttgaatactgcccagcttgcatcagtgcctaaccttcagacagtgagcgttgccaacctgggtgctgcaggtgttcaagtgcagggagttcccgttacaatcactagtgttgcaggtcagcagcaaggacaagatggagtaaaagtccagcaagctactatagctcctgtaactgtagcagttggaggaattgctaatgccacgataggtgctgttagtcctgaccaactcacacaagtgcatttgcagcaaggccagcagacttctgatcaagaggtacaacctggcaagaggcttcgaagagttgcctgttcctgtcctaattgtagggaaggagaaggaagaggcagtaatgaaccaggaaaaaagaagcagcatatctgtcatattgaaggatgtggtaaagtttatggcaaaacatctcatttacgagcacatcttcgctggcatactggagaaagaccttttatatgcaactggatgttttgtggcaaaagattcacacggagtgatgagctccagagacatagaagaacccatacaggtgaaaagagatttgaatgcccggaatgttctaaaaggtttatgcggagtgatcatctctccaaacatgtcaaaacgcaccagaataaaaaaggtggtgggacagctcttgccattgttacctcgggagaactggactcatctgttacagaggtgcttggctccccaagaattgtcacagttgcagccatttctcaagattcgaatccagcaactcccaatgtttcaaccaacatggaagaattctgaaaagttatttataacagagacctctagtgctgcacttgtttacacacctttgaaaatctggaaatgggctggtcaagtggattacagagtaggaaattatgttttcattcttggcttctttaagtattccagggtttggggtcaacacgtgaagtgttgaattttaaaaaatacaaaaagcagactgatgtactggaaacagaaaagtatttcctccatactataagttgtagttgtttggaaatatatcacataacctttatacagaatcttcccatctcttaatatcatgtgttaacatgtttaaaaagaccttagtagtttgcaggctggaccttaattggacttattttctttgaaagtactttgttataaattcagtcagtaataatttacgtgtattctttttctctatagcacagaaaacagatagttaactgatgatagggataatactgtatttccttagcttgatttttggaaaatcaaccgaaaatagtttggccgtcttttctaaatgttagaaattcttcaacagttgaattaggtaagttccaaaacagtaatctgagatgcatctcagatctttattaccactacattatagtagtgtgtatgcagacaatcagtgaagtccaattactttctccatttggagacacaagaggaacatagagttaaatcttaggttaaattttaggttgacaccttaggaaaatgctgggaaaaaaatggttaaaacaaaactcatcatagcttcagaaaaataaaatgaggcatcttaacatgcaatgttctaaagttaggattgattatattcctaaccctaggttgaaccacaaaatttcatttaaaatgtttatatttggaaatatttgcatagagtgtaaattgttctgtagtttcatattttgtaaatatgagttatgttgacaatgtgcagaattctttatgctttgatgtggtagccaaagaaagaattacacttttttccaaggccagcagaaaattctcttttaactacattgtaattcttgttttcctctactaaaaattggccagtcccattttatttctagtgctatgtaagaaggtaattaggaattataacacagtaatgtttttatgttacatcaataactgaattttccctaaaaattagcctaatatataatagatatattatgaagcaaaacttttatttttgaaaaggcagaataattttcagtgaagtaagtgactaaagaaaaaaactatattattgtttatgcaagggtcttacaggaaagggtctttttttttttttttttgagatggagtctcgctctcttgcccaggctggagtgcaatggcacgatctcagcttactgcaaccgccgcctcccaggttcaagcgattctcctgtcttagcctcctgagtagctgggattaacaggcgcctgccaccatgcctggctaatttttgtatttttagtagagacagggtttcgccatgttggccaggctggtttcaaactcctgacctcaggtgatctgcccacctcggcctcccagagtgctgggattacaggcatgagccaccatgcccggctaggaaagggtcttactaggaaagatggccaaaagtttcatatgaaaaaaattggattataaaccagtaacttaaatattaataaggatattttatgttttaaaaaagtatttacacagaatcataatcagtgaaattgaccatttgaaaactaaaagtttttacctacctgctcaatttattaacatcattgctttggggactgtttgaatataggtacgtgttttcttgtgcattctctataatttcaggaaaagtactaatgcgaattctcttccaaaattgtgatgtttcttgtatttttgatgaaggagaaatactgtaatgatcactgtttacactatgtacactttaggccagccctttgtagcgttatataaaactgaaggtcttttgtgctttcagtttgtataaaaaagctttgagattaaaggaaaaaaaaaatttttacactgtggttataaatttcaagtttcttaaagcttttgtagacttgtaacagagtctttaaatttaagttggattttgtaaattgttttgtatattttatttaatgtactcttaacaactgatgtatctggctttaaaacatcagaattggtttgttgttttgtttggtacagaggagcatttggtagtgttcattttaattttattatataggagctgaaacatcaaatatatattttatctatcattatgctacacaatcagtgctataaatttttttatgcaaagaaactttcttaatgttttaatcatgtttcctcagagtgacactttttgttgttgttaataccaagtatgaacactctgcatcattattccatgaaccagttctaatgcaaacctatgtatgtccattagaaatggaagttattttttaatcaacaatgaggcctattataaatttatcagatgaatctagatagctttatagcatataaaatatgttaatttgtgttagcaggtgcacatttcaccactgaaattagaaatattttgacagtctgttctgcataccattctgagtctacttttctgtctttagaagaatcgtaaatttcagtgtcctttatttgactcagtgggatatagctgttataagtaatagggcacagatgtgcagtagagtcttgtttaatggcatttcactgttcattccctttaccaccgttataaaacttttctttattgtaattatcagtgcaaagctatgtatttatcatggtaaaactccagtgttagaatagttttttcttacagtatactttctttggttaggtttgtgtatgtgttgctgattacattagaacttgatgttaagtcatttatcacactctcatgagagcagtaataaaagtgtgtaatctaggagaaaaagttaatttgtcaaacttagataagcatgatgtttaggtcctatttttcaattttataactgttttattgcaacaatatttgtatttaagtctccattttaatgccttgtggtgtttttttatgcatgtcactaagttgtcatcccacataaattgatgtgcagcatagggtattaaatctacataatgattttaaaacagaaatagttgatggtaaaatgtaaatgttttgcaaaaattccttataaaaagttttgtagtaacatttcacttgtaaattttttttgtaaaaaaaaaaaaatgaaaaaaaaagatgaatccagaaaaaaacctgtttcccatattctagaatttagacaattattctgccagcaaagcctctggggctgtaattgacatttttacagtgctgatttgtataaaatttgttttttgtggatttggaaataaaatcatgtacaagttgttgcctgcaataacaattgcaagtaacctattaaaaattcccttgagtttaacatgtttcatttaattatgtatactataaagcagcaataaattatttgaactatcaaccta

SEQ ID NO: 29565 - DNA, 806 bp, Homo sapiens
  source 1..806: mol_type = unassigned DNA
gagtcagccgggctcgggcggagagaggagctgctacgccacagcccagcggcggccattcgcggaaaaagaggcagagcctgtgccagctacagcctcctccgagccaccgcgggcgggcgggaccggcctctcctcccgcctcgcccccacccccacccacctctatcccagtgtctccgtctgagggtttgtcctgttaatgcgggatgagcgatcagaagaaggaggaggaggaggaggcggcagcggcagcggcgatggctacagaaggagggaaaacctctgagccagagaataacaataaaaaacccaaaacctcaggctcccaggactctcagccctctcctctggctttactggcagctacttgcagcaaaatagggactcctggtgaaaatcaagcaactggacaacaacaacgcaacttgctggaaacgcttggcaacttgttgcctccactcctcctgcttcaaaagagaataacgtttctcaaccagcctctagttcgtctagttcttccagcagtaataacgggagtgcatctcctacaaaaactaaatcaggtaattcttccacccctggtcaatttcaagtcatacaagtacaaaatccaagtggtagtgtacagtaccaagtaattccacaacttcagacagtggaaggtcaacaaattcaaatcaatccaactagtagttcatctctacaggatttgcagggtcaaattcagctcatttctgcaggtaataatcaagctatactcacagctgctaacaggacagcttctgggaatattcttgctcaaa

SEQ ID NO: 29566 - DNA, 2971 bp, Homo sapiens
  source 1..2971: mol_type = unassigned DNA
attctcccattctccctccctctcccttttctctctctaccccccccaccccccggctcagctctctccatctgcctggctccttgggacccgttccccagcctcaggatggcgtcctccctgcttgaggaggaagttcactatggctccagtcccctggccatgctgacggcagcgtgcagcaaatttggtggctctagccctctgcgggactcaacaactctgggcaaagcaggcacaaagaagccgtactctgtgggcagtgacctttcagcctccaaaaccatgggggatgcttatccagccccctttacaagcactaatgggctcctttcacctgcaggcagtcctccagcacccacctcaggctatgctaatgattaccctcccttttcccactcattccctgggcccacaggcacccaggaccctgggctactagtgcccaaggggcacagctcttctgactgtctgcccagtgtctacacctctctggacatgacacacccctatggctcctggtacaaggcaggcatccatgcaggcatttcaccaggcccaggcaacactcctactccatggtgggatatgcaccctggaggcaactggctaggtggtgggcagggccagggtgatgggctgcaagggacactgcccacaggtccagctcagcctccactgaacccccagctgcccacctacccatctgactttgctccccttaatccagccccctacccagctccccacctcttgcaaccagggccccagcatgtcttgccccaagatgtctataaacccaaggcagtgggaaatagtgggcagctagaagggagtggtggagccaaacccccacggggtgcaagcactgggggtagtggtggatatgggggcagtggggcagggcgctcctcctgcgactgccctaattgccaggagctagagcggctgggagcagcagcggctgggctgcggaagaagcccatccacagctgccacatccctggctgcggcaaggtgtatggcaaggcttcgcacctgaaggcccacttgcgctggcacacaggcgagaggcccttcgtctgcaactggctcttctgcggcaagaggttcactcgttcggatgagctggagcgtcatgtgcgcactcacacccgggagaagaagttcacctgcctgctctgctccaagcgctttacccgaagcgaccacctgagcaaacaccagcgcacccatggagaaccaggcccgggtccccctcccagtggccccaaggagctgggggagggccgcagcacgggggaagaggaggccagtcagacgccccgaccttctgcctcgccagcaaccccagagaaagcccctggaggcagccctgagcagagcaacttgctggagatctgagccgggtggaaggtctcccaccccagggctgccctgacagtctctcttggctctctagaccactgcttgccaatcactctctttaccccatgcatgccatccttcggggctctctccctctgtctccctcctggccattctgggcttgggtatctccttgcatgcctcctcagctcaccttctctcttcaccatgagactggctttccacaaactctcatctcaggccctccccttgtgcctgatacctgcactccggcttcctagactctggccctgccacaccaacacactttctatttgggctcccaacactatttctccatctcactccttgacatgtacccctttctgcttctcaagcttatttcctgctgtccctcagcctccaggcttcagtcttcccaacttcttacaccattgctttccattctccagaactcttttttcctttttacaaacacaatgataatgataatttattgccccctggtggcctcttcatcaggggtattggggttagtgacctggccagagggtgccaagaggggggcagaccagtggggatctgatcccaaagatggggtgaccccagggtcagggaggctgcccccaggcctgtatatttaacccctatgtaccaggagtaatgaatagtaataattctatttatgtaagttatgatgacgggtcaggtagagtgagctggggagggaagtggatccatttctgctaaggaaattctagtcaaatgcatctctgtatagacaaaatgttagtggagaagatcttgttaatagaatgtctatcatcagaatctcagttgatagggtttctcttgtaatgaagtctctacaaattgggttagctacatctctgctaaacagttgatggggtatctcttgattagggggatccctaatatccccagccccagccagaagctgtgaaacctcaagtcctatggaggggagaaggactggaatgtaccccatctcccttgactgcagagcaggttcctccactgccccaccccttagacaccatgaccccatcaggttaatcccctgttgccatggttatggagagcttgcagctgccatcttagatgtgctctttggggaagcccatctaacaggaggacattggtttgggggtgcacctcctgaagaatgggtggggaaggctttctctaggatcagattcaaataagtatgtattgagtgcctactctgtgcaaggcactatgctagatctggtgcctagaagccctgagaaagaacttaaagagctaggaggacagaggcccccaagctgatctggtggtgcatccacgcacccccaccctgggactttggatgctcccatctccacctccagtgacttttaaagccgcttcgtgcctttcctgtaacgttggatcctccttttctgtcccctgctgtctcaaggccccaagttaaagggttaaagccgctggagcttggggagagaacattgtggaatggaagggatcatgccctttgtggagtcttttttttttaatttaataaataaaagttggattt

SEQ ID NO: 29567 - DNA, 3148 bp, Homo sapiens
  source 1..3148: mol_type = unassigned DNA
ggcgggcggcagcagcctaggcagcagcagtagcagaagcagcagccgccgagcagcagcaaggactctggagtcagagtaggactgtaggaccggagcctgagtggaacaggagtggagctggcctgggagagagcggatccctcccagcaccctcaggccacccgttgcctgcactctccctgccagacctccagagaggagagactcgggacagccagccccaggttcccccagctctctccatctgcctggctccttgggacccgttccccagcctcaggatggcgtcctccctgcttgaggaggaagttcactatggctccagtcccctggccatgctgacggcagcgtgcagcaaatttggtggctctagccctctgcgggactcaacaactctgggcaaagcaggcacaaagaagccgtactctgtgggcagtgacctttcagcctccaaaaccatgggggatgcttatccagccccctttacaagcactaatgggctcctttcacctgcaggcagtcctccagcacccacctcaggctatgctaatgattaccctcccttttcccactcattccctgggcccacaggcacccaggaccctgggctactagtgcccaaggggcacagctcttctgactgtctgcccagtgtctacacctctctggacatgacacacccctatggctcctggtacaaggcaggcatccatgcaggcatttcaccaggcccaggcaacactcctactccatggtgggatatgcaccctggaggcaactggctaggtggtgggcagggccagggtgatgggctgcaagggacactgcccacaggtccagctcagcctccactgaacccccagctgcccacctacccatctgactttgctccccttaatccagccccctacccagctccccacctcttgcaaccagggccccagcatgtcttgccccaagatgtctataaacccaaggcagtgggaaatagtgggcagctagaagggagtggtggagccaaacccccacggggtgcaagcactgggggtagtggtggatatgggggcagtggggcagggcgctcctcctgcgactgccctaattgccaggagctagagcggctgggagcagcagcggctgggctgcggaagaagcccatccacagctgccacatccctggctgcggcaaggtgtatggcaaggcttcgcacctgaaggcccacttgcgctggcacacaggcgagaggcccttcgtctgcaactggctcttctgcggcaagaggttcactcgttcggatgagctggagcgtcatgtgcgcactcacacccgggagaagaagttcacctgcctgctctgctccaagcgctttacccgaagcgaccacctgagcaaacaccagcgcacccatggagaaccaggcccgggtccccctcccagtggccccaaggagctgggggagggccgcagcacgggggaagaggaggccagtcagacgccccgaccttctgcctcgccagcaaccccagagaaagcccctggaggcagccctgagcagagcaacttgctggagatctgagccgggtggaaggtctcccaccccagggctgccctgacagtctctcttggctctctagaccactgcttgccaatcactctctttaccccatgcatgccatccttcggggctctctccctctgtctccctcctggccattctgggcttgggtatctccttgcatgcctcctcagctcaccttctctcttcaccatgagactggctttccacaaactctcatctcaggccctccccttgtgcctgatacctgcactccggcttcctagactctggccctgccacaccaacacactttctatttgggctcccaacactatttctccatctcactccttgacatgtacccctttctgcttctcaagcttatttcctgctgtccctcagcctccaggcttcagtcttcccaacttcttacaccattgctttccattctccagaactcttttttcctttttacaaacacaatgataatgataatttattgccccctggtggcctcttcatcaggggtattggggttagtgacctggccagagggtgccaagaggggggcagaccagtggggatctgatcccaaagatggggtgaccccagggtcagggaggctgcccccaggcctgtatatttaacccctatgtaccaggagtaatgaatagtaataattctatttatgtaagttatgatgacgggtcaggtagagtgagctggggagggaagtggatccatttctgctaaggaaattctagtcaaatgcatctctgtatagacaaaatgttagtggagaagatcttgttaatagaatgtctatcatcagaatctcagttgatagggtttctcttgtaatgaagtctctacaaattgggttagctacatctctgctaaacagttgatggggtatctcttgattagggggatccctaatatccccagccccagccagaagctgtgaaacctcaagtcctatggaggggagaaggactggaatgtaccccatctcccttgactgcagagcaggttcctccactgccccaccccttagacaccatgaccccatcaggttaatcccctgttgccatggttatggagagcttgcagctgccatcttagatgtgctctttggggaagcccatctaacaggaggacattggtttgggggtgcacctcctgaagaatgggtggggaaggctttctctaggatcagattcaaataagtatgtattgagtgcctactctgtgcaaggcactatgctagatctggtgcctagaagccctgagaaagaacttaaagagctaggaggacagaggcccccaagctgatctggtggtgcatccacgcacccccaccctgggactttggatgctcccatctccacctccagtgacttttaaagccgcttcgtgcctttcctgtaacgttggatcctccttttctgtcccctgctgtctcaaggccccaagttaaagggttaaagccgctggagcttggggagagaacattgtggaatggaagggatcatgccctttgtggagtcttttttttttaatttaataaataaaagttggatttg

SEQ ID NO: 29568 - DNA, 1472 bp, Homo sapiens
  source 1..1472: mol_type = unassigned DNA
agcagccgccgagcagcagcaaggactctggagtcagagtaggactgtaggaccggagcctgagtggaacaggagtggagctggcctgggagagagcggatccctcccagcaccctcaggccacccgttgcctgcactctccctgccagacctccagagaggagagactcgggacagccagccccaggttcccccaggaggaagttcactatggctccagtcccctggccatgctgacggcagcgtgcagcaaatttggtggctctagccctctgcgggactcaacaactctgggcaaagcaggcacaaagaagccgtactctgtgggcagtgacctttcagcctccaaaaccatgggggatgcttatccagccccctttacaagcactaatgggctcctttcacctgcaggcagtcctccagcacccacctcaggctatgctaatgattaccctcccttttcccactcattccctgggcccacaggcacccaggaccctgggctactagtgcccaaggggcacagctcttctgactgtctgcccagtgtctacacctctctggacatgacacacccctatggctcctggtacaaggcaggcatccatgcaggcatttcaccaggcccaggcaacactcctactccatggtgggatatgcaccctggaggcaactggctaggtggtgggcagggccagggtgatgggctgcaagggacactgcccacaggtccagctcagcctccactgaacccccagctgcccacctacccatctgactttgctccccttaatccagccccctacccagctccccacctcttgcaaccagggccccagcatgtcttgccccaagatgtctataaacccaaggcagtgggaaatagtgggcagctagaagggagtggtggagccaaacccccacggggtgcaagcactgggggtagtggtggatatgggggcagtggggcagggcgctcctcctgcgactgccctaattgccaggagctagagcggctgggagcagcagcggctgggctgcggaagaagcccatccacagctgccacatccctggctgcggcaaggtgtatggcaaggcttcgcacctgaaggcccacttgcgctggcacacaggcgagaggcccttcgtctgcaactggctcttctgcggcaagaggttcactcgttcggatgagctggagcgtcatgtgcgcactcacacccgggagaagaagttcacctgcctgctctgctccaagcgctttacccgaagcgaccacctgagcaaacaccagcgcacccatggagaaccaggcccgggtccccctcccagtggccccaaggagctgggggagggccgcagcacgggggaagaggaggccagtcagacgccccgaccttctgcctcgccagcaaccccagagaaagcccctggaggcagccctgagcagagcaacttgctggagatctga

SEQ ID NO: 29569 - DNA, 3495 bp, Homo sapiens
  source 1..3495: mol_type = unassigned DNA
attgtattgcacacctctaaaaaaaacactgcctctgatttatcaatataaaaaagatcctctgagaggaggagggcacttttgtgtgatggcaacttcacttctaggggaagaaccgaggttgggatcgactcctctggccatgcttgccgctacctgtaataagataggcagccccagcccgtctccctcctccctctcggacagctcttcttccttcggcaaaggcttccacccctggaaacgctcctcgtcctcttcttccgccagctgcaacgtagtgggttccagtctctcaagcttcggcgtgtccggggcctccaggaacggcggctcgtcctcggcggctgcggcggccgcggcagcagccgcggctgccgcggccctggtgtccgactcgttcagctgcggcggctcgcctggctccagcgccttctccctcacctccagcggcggctcctccgcgcactcgcaggacggctcccaccagccggtgttcatctccaaggtgcacacctctgtggacgggctgcagggcatctacccgcgggtgggcatggcgcacccgtacgagtcgtggtttaagccctcgcacccgggcctgggtgctgcgggcgaggtgggctcggccggcgcctccagctggtgggacgtgggggccggctggatcgacgtgcagaacccgaacagcgcggctgcgctgcccggctcgctgcaccctgccgccggggggctccaaacctcgctgcactcgccgctcggaggctacaactcggattactcgggcctgagtcactcggccttcagcagcggcgcctcctcgcacctgctcagccccgccgggcagcacctcatggacggcttcaagccagtgctacccggctcctacccggactcggccccgtcgccgctggccggcgcggggggctccatgttgagcgctgggccttcggcgccgctggggggctccccgcgctcctcagctcgccgctactccggccgcgccacctgcgactgccccaactgccaggaggcagagcggctgggccctgccggggcgagcttgcggcgcaagggcctgcacagctgccacatcccgggctgcggcaaggtgtacggcaagacttcgcacctcaaggcgcacctgcgctggcacacgggcgagcggcccttcgtgtgcaactggcttttctgcggcaagcgcttcacgcgctccgacgagctgcagcggcacctgcggacccacaccggcgagaagcgcttcgcctgtccagtttgcaacaagcgcttcatgcgcagcgaccacctcagcaagcacgtgaagacgcacagtggcggcggcggcggcggcggctcggcgggctcgggcagcggcggcaagaagggcagcgacaccgacagcgagcacagcgccgcgggcagcccgccctgccactccccagagctgctgcagccccccgagcccgggcaccgcaacggcctagagtgacgcccaccctgcgcccgcccctctccccgacctcctcccaccaagtcctcttgggccctgtctgtccggacttcaactccagcctttccctattgcatccgactcgctctctgtctctttctgtttctgcccctcttccttcttccttctgtgacttaactttgtaaaggggatatggacaagtaagtaacacgcatcgctgtcccgggccctggctttccctttccacgggtaacgctgcctgaacccgttgcagccggaacccgcgcctcgtcgggcctttatttctcgttctctcttccttgtcctcccctcctccaccccccaggttgtgaagggcgtaacttttagagggaacggccactggaggtagagctggactaatccagtgcctggtagacagcgggcctcgcgcgggcaggagcggctcggctgacaagcctgagcggagcggtggagagggagaggctggaggcctgggcagaacagcgccgcccgggcagacggctgcttggttccagagccgctgtactgagcacctcggcttcggagcaccctgccaggcccctgggcatcgccggacgtcctactcaggctgtcggggcttggtgggggtgacttttggcagcccgagacccagagtttgtagagtttagatctcccaatgtcagtctgcctctttttctttgttccctgaggtggaaccgatgcaagtttcagcaaagggcagtcttgtcgaatcgctgcagcagctttctttcatctttatagcatatattttatttttaaaaaaactagggggaaaatagcaaccttccatttggtttcccttctataatagttttttcctctaacggggagcaatctttctctcgaaactgctaatattgatcccaaagttactttgactgcattaacttaacttacggggtgggggcgggggtgagggtaggtgcttttttcttatgcaaaaatactcctttccggtgagaccagattaactatctccatgtttgtccttttctacctcgttttttcaccactcccaaacataacctcccaatcttttttgttagtccggccgtcaattgtatagtaccaatttcgtaaattctctcaattcatgaagatcgtagggttaaacttttttgtgtgtgatttaaacttacaaacaagtgaagaagctatcgtttatttcagacgaggctgtagtttaaataccaaaagagggaaaataaaaaagaacctttgtaaaatatatctgaacctaatggtttgtacaactggagaatcgttctagattagttaccaattaaatataactccgccagtgtaagggtgtgaggtgcagttgtccaggagacgattttgtatagtatttttcttgtacattacttccagtaaatatttgaaaatatattgaagtaaacttgattttttttttttgtcacaagaaaatattaagagttattgttgcagttctgatgagctgcaggttttttgaactcacttctggaggtgcagagccacaaacgcactttcggggcctagttttgctcgaatatgaatttagataggtatcaagctgtaactaagacaatattgataaatgttggatgacatttaatttaatggagcatgtacttatttgcatttgctggcagttcaggcatagttaaagtgagagttctcctatatttcataataagtggtctgccaaaacccatgtattaaataaattgtccaagtgaaactcgactaactttggcctttgtgtatttcctgaaggtaatattgttaactgttaataaatacttctgacactacatttaaatgtttgcagattctgcaaactaattgctcattgtaatgttgaaataatttggatatttcacattgaaatgaaaagcctttctctggagcattttagatttgcattttaaatgcatgaaatgtaattgatttatttgtaatattttaaatggtataataaactcagataaaag

SEQ ID NO: 29570 - DNA, 1714 bp, Homo sapiens
  source 1..1714: mol_type = unassigned DNA
attgtattgcacacctctaaaaaaaacactgcctctgatttatcaatataaaaaagatcctctgagaggaggagggcacttttgtgtgatggcaacttcacttctagggcgtggtgcttgctcccgaatcagacgccggcagccaaacttgtcccctcctgtagagtaggaagcggccgggcgccggggctgttgggggtgccaggaagaaccgaggttgggatcgactcctctggccatgcttgccgctacctgtaataagataggcagccccagcccgtctccctcctccctctcggacagctcttcttccttcggcaaaggcttccacccctggaaacgctcctcgtcctcttcttccgccagctgcaacgtagtgggttccagtctctcaagcttcggcgtgtccggggcctccaggaacggcggctcgtcctcggcggctgcggcggccgcggcagcagccgcggctgccgcggccctggtgtccgactcgttcagctgcggcggctcgcctggctccagcgccttctccctcacctccagcagcgccgcagccgccgccgccgccgccgcagccgccgcctccagctcgcccttcgccaacgactactctgttttccaggcccccggagtttccgggggcagcggcggcggcggcgggggcggcggcggcggctcctccgcgcactcgcaggacggctcccaccagccggtgttcatctccaaggtgcacacctctgtggacgggctgcagggcatctacccgcgggtgggcatggcgcacccgtacgagtcgtggtttaagccctcgcacccgggcctgggtgctgcgggcgaggtgggctcggccggcgcctccagctggtgggacgtgggggccggctggatcgacgtgcagaacccgaacagcgcggctgcgctgcccggctcgctgcaccctgccgccggggggctccaaacctcgctgcactcgccgctcggaggctacaactcggattactcgggcctgagtcactcggccttcagcagcggcgcctcctcgcacctgctcagccccgccgggcagcacctcatggacggcttcaagccagtgctacccggctcctacccggactcggccccgtcgccgctggccggcgcggggggctccatgttgagcgctgggccttcggcgccgctggggggctccccgcgctcctcagctcgccgctactccggccgcgccacctgcgactgccccaactgccaggaggcagagcggctgggccctgccggggcgagcttgcggcgcaagggcctgcacagctgccacatcccgggctgcggcaaggtgtacggcaagacttcgcacctcaaggcgcacctgcgctggcacacgggcgagcggcccttcgtgtgcaactggcttttctgcggcaagcgcttcacgcgctccgacgagctgcagcggcacctgcggacccacaccggcgagaagcgcttcgcctgtccagtttgcaacaagcgcttcatgcgcagcgaccacctcagcaagcacgtgaagacgcacagtggcggcggcggcggcggcggctcggcgggctcgggcagcggcggcaagaagggcagcgacaccgacagcgagcacagcgccgcgggcagcccgccctgccactccccagagctgctgcagccccccgagcccgggcaccgcaacggcctagagtgacgc

SEQ ID NO: 29571 - DNA, 1618 bp, Homo sapiens
  source 1..1618: mol_type = unassigned DNA
attgtattgcacacctctaaaaaaaacactgcctctgatttatcaatataaaaaagatcctctgagaggaggagggcacttttgtgtgatggcaacttcacttctaggggaagaaccgaggttgggatcgactcctctggccatgcttgccgctacctgtaataagataggcagccccagcccgtctccctcctccctctcggacagctcttcttccttcggcaaaggcttccacccctggaaacgctcctcgtcctcttcttccgccagctgcaacgtagtgggttccagtctctcaagcttcggcgtgtccggggcctccaggaacggcggctcgtcctcggcggctgcggcggccgcggcagcagccgcggctgccgcggccctggtgtccgactcgttcagctgcggcggctcgcctggctccagcgccttctccctcacctccagcagcgccgcagccgccgccgccgccgccgcagccgccgcctccagctcgcccttcgccaacgactactctgttttccaggcccccggagtttccgggggcagcggcggcggcggcgggggcggcggcggcggctcctccgcgcactcgcaggacggctcccaccagccggtgttcatctccaaggtgcacacctctgtggacgggctgcagggcatctacccgcgggtgggcatggcgcacccgtacgagtcgtggtttaagccctcgcacccgggcctgggtgctgcgggcgaggtgggctcggccggcgcctccagctggtgggacgtgggggccggctggatcgacgtgcagaacccgaacagcgcggctgcgctgcccggctcgctgcaccctgccgccggggggctccaaacctcgctgcactcgccgctcggaggctacaactcggattactcgggcctgagtcactcggccttcagcagcggcgcctcctcgcacctgctcagccccgccgggcagcacctcatggacggcttcaagccagtgctacccggctcctacccggactcggccccgtcgccgctggccggcgcggggggctccatgttgagcgctgggccttcggcgccgctggggggctccccgcgctcctcagctcgccgctactccggccgcgccacctgcgactgccccaactgccaggaggcagagcggctgggccctgccggggcgagcttgcggcgcaagggcctgcacagctgccacatcccgggctgcggcaaggtgtacggcaagacttcgcacctcaaggcgcacctgcgctggcacacgggcgagcggcccttcgtgtgcaactggcttttctgcggcaagcgcttcacgcgctccgacgagctgcagcggcacctgcggacccacaccggcgagaagcgcttcgcctgtccagtttgcaacaagcgcttcatgcgcagcgaccacctcagcaagcacgtgaagacgcacagtggcggcggcggcggcggcggctcggcgggctcgggcagcggcggcaagaagggcagcgacaccgacagcgagcacagcgccgcgggcagcccgccctgccactccccagagctgctgcagccccccgagcccgggcaccgcaacggcctagagtgacgc

SEQ ID NO: 29572 - DNA, 691 bp, Homo sapiens
  source 1..691: mol_type = unassigned DNA
attaaacatggagaaatgaggagcggcggcagatcggtttgggatgcatcttcaggggatgctgaaacaacagcagcatttggtttgctctacacccctgtcacccctcgcccgcaagcccagggagtggtcagcagtggggctttgtgatgtgaagccaccctagggctgccattggctgggacactgcctgtatgatcaaacaaagctcaagggtgtggctttgccttgtcaccaggagggtatacatagggagggcaagagctccgggccactgagaagattcaaaacctacaaaagcctgccactgacattgaagaaccaatatatacaatggacaaacaatccagtgccggcggggtgaagaggagcgtcccctgtgattccaacgaggccaacgagatgatgccggagaccccaactggggactcagacccgcaacctgctcctaaaaaaatgaaaacatctgagtcctcgaccatactagtggttcgctacaggaggaactttaaaagaacatctccagaggaactgctgaatgaccacgcccgagagaacagaatcaaccccctccaaatggaggaggaggaattcatggaaataatggttgaaatacctgcaaagtagcaagaagctacatctctcaaccttgggcaatgaaaataaagtttgagaagctgatggctgtgta

SEQ ID NO: 29573 - DNA, 387 bp, Homo sapiens
  source 1..387: mol_type = unassigned DNA
caaaagcctgccgcagacattgaagaaccaatatatacaatggacaaacaatccagtgccggcggggtgaagaggagcgtcccctgtgaatccaacgaggtgaatgagacgatgccggagaccccaactggggactcagacccgcaacctgctcctaaaaaaatgaaaacatctgagtcctcgaccatactagtggttcgctacaggaggaacgtgaaaagaacatctccagaggaactgctgaatgaccacgcccgagagaacagaatcaaccccctccaaatggaggaggaggaattcatggaaataatggttgaaatacctgcaaagtagcaagaagctacatctctcaaccttgggcaatgaaaataaagtttgagaagctga

SEQ ID NO: 29574 - DNA, 2040 bp, Homo sapiens
  source 1..2040: mol_type = unassigned DNA
aggcgtccaacctgctgccgcctgggccccgccgagcggagctagcgccgcgcgcagagcacacgctcgcgctccagctcccctcctgcgcggttcatgactgtgtcccctgaccgcagcctctgcgagcccccgccgcaggaccacggcccgctccccgccgccgcgagggccccgagcgaaggaaggaagggaggcgcgctgtgcgccccgcggagcccgcgaaccccgctcgctgccggctgcccagcctggctggcaccatgctgcccgcgcgctgcgcccgcctgctcacgccccacttgctgctggtgttggtgcagctgtcccctgctcgcggccaccgcaccacaggccccaggtttctaataagtgaccgtgacccacagtgcaacctccactgctccaggactcaacccaaacccatctgtgcctctgatggcaggtcctacgagtccatgtgtgagtaccagcgagccaagtgccgagacccgaccctgggcgtggtgcatcgaggtagatgcaaagatgctggccagagcaagtgtcgcctggagcgggctcaagccctggagcaagccaagaagcctcaggaagctgtgtttgtcccagagtgtggcgaggatggctcctttacccaggtgcagtgccatacttacactgggtactgctggtgtgtcaccccggatgggaagcccatcagtggctcttctgtgcagaataaaactcctgtatgttcaggttcagtcaccgacaagcccttgagccagggtaactcaggaaggaaagatgacgggtctaagccgacacccacgatggagacccagccggtgttcgatggagatgaaatcacagccccaactctatggattaaacacttggtgatcaaggactccaaactgaacaacaccaacataagaaattcagagaaagtctattcgtgtgaccaggagaggcagagtgccctggaagaggcccagcagaatccccgtgagggtattgtcatccctgaatgtgcccctgggggactctataagccagtgcaatgccaccagtccactggctactgctggtgtgtgctggtggacacagggcgcccgctgcctgggacctccacacgctacgtgatgcccagttgtgagagcgacgccagggccaagactacagaggcggatgaccccttcaaggacagggagctaccaggctgtccagaagggaagaaaatggagtttatcaccagcctactggatgctctcaccactgacatggttcaggccattaactcagcagcgcccactggaggtgggaggttctcagagccagaccccagccacaccctggaggagcgggtagtgcactggtatttcagccagctggacagcaatagcagcaacgacattaacaagcgggagatgaagcccttcaagcgctacgtgaagaagaaagccaagcccaagaaatgtgcccggcgtttcaccgactactgtgacctgaacaaagacaaggtcatttcactgcctgagctgaagggctgcctgggtgttagcaaagaagtaggacgcctcgtctaaggagcagaaaacccaagggcaggtggagagtccagggaggcaggatggatcaccagacacctaaccttcagcgttgcccatggccctgccacatcccgtgtaacataagtggtgcccaccatgtttgcacttttaataactcttacttgcgtgttttgtttttggtttcattttaaaacaccaatatctaataccacagtgggaaaaggaaagggaagaaagactttattctctctcttattgtaagtttttggatctgctactgacaacttttagagggttttgggggggtgggggagggtgttgttggggctgagaagaaagagatttatatgctgtatataaatatatatgtaaattgtatagttcttttgtacaggcattggcattgctgtttgtttatttctctccctctgcctgctgtgggtggtgggcactctggacacatagtccagctttctaaaatcca

SEQ ID NO: 29575 - DNA, 3666 bp, Homo sapiens
  source 1..3666: mol_type = unassigned DNA
cctgctgccgcctgggccccgccgagcggagctagcgccgcgcgcagagcacacgctcgcgctccagctcccctcctgcgcggttcatgactgtgtcccctgaccgcagcctctgcgagcccccgccgcaggaccacggcccgctccccgccgccgcgagggccccgagcgaaggaaggaagggaggcgcgctgtgcgccccgcggagcccgcgaaccccgctcgctgccggctgcccagcctggctggcaccatgctgcccgcgcgctgcgcccgcctgctcacgccccacttgctgctggtgttggtgcagctgtcccctgctcgcggccaccgcaccacaggccccaggtttctaataagtgaccgtgacccacagtgcaacctccactgctccaggactcaacccaaacccatctgtgcctctgatggcaggtcctacgagtccatgtgtgagtaccagcgagccaagtgccgagacccgaccctgggcgtggtgcatcgaggtagatgcaaagatgctggccagagcaagtgtcgcctggagcgggctcaagccctggagcaagccaagaagcctcaggaagctgtgtttgtcccagagtgtggcgaggatggctcctttacccaggtgcagtgccatacttacactgggtactgctggtgtgtcaccccggatgggaagcccatcagtggctcttctgtgcagaataaaactcctgtatgttcaggttcagtcaccgacaagcccttgagccagggtaactcaggaaggaaagatgacgggtctaagccgacacccacgatggagacccagccggtgttcgatggagatgaaatcacagccccaactctatggattaaacacttggtgatcaaggactccaaactgaacaacaccaacataagaaattcagagaaagtctattcgtgtgaccaggagaggcagagtgccctggaagaggcccagcagaatccccgtgagggtattgtcatccctgaatgtgcccctgggggactctataagccagtgcaatgccaccagtccactggctactgctggtgtgtgctggtggacacagggcgcccgctgcctgggacctccacacgctacgtgatgcccagttgtgagagcgacgccagggccaagactacagaggcggatgaccccttcaaggacagggagctaccaggctgtccagaagggaagaaaatggagtttatcaccagcctactggatgctctcaccactgacatggttcaggccattaactcagcagcgcccactggaggtgggaggttctcagagccagaccccagccacaccctggaggagcgggtagtgcactggtatttcagccagctggacagcaatagcagcaacgacattaacaagcgggagatgaagcccttcaagcgctacgtgaagaagaaagccaagcccaagaaatgtgcccggcgtttcaccgactactgtgacctgaacaaagacaaggtcatttcactgcctgagctgaagggctgcctgggtgttagcaaagaaggacgcctcgtctaaggagcagaaaacccaagggcaggtggagagtccagggaggcaggatggatcaccagacacctaaccttcagcgttgcccatggccctgccacatcccgtgtaacataagtggtgcccaccatgtttgcacttttaataactcttacttgcgtgttttgtttttggtttcattttaaaacaccaatatctaataccacagtgggaaaaggaaagggaagaaagactttattctctctcttattgtaagtttttggatctgctactgacaacttttagagggttttgggggggtgggggagggtgttgttggggctgagaagaaagagatttatatgctgtatataaatatatatgtaaattgtatagttcttttgtacaggcattggcattgctgtttgtttatttctctccctctgcctgctgtgggtggtgggcactctggacacatagtccagctttctaaaatccaggactctatcctgggcctactaaacttctgtttggagactgacccttgtgtataaagacgggagtcctgcaattgtactgcggactccacgagttcttttctggtgggaggactatattgccccatgccattagttgtcaaaattgataagtcacttggctctcggccttgtccagggaggttgggctaaggagagatggaaactgccctgggagaggaagggagtccagatcccatgaatagcccacacaggtaccggctctcagagggtccgtgcattcctgctctccggacccccaaagggcccagcattggtgggtgcaccagtatcttagtgaccctcggagcaaattatccacaaaggatttgcattacgtcactcgaaacgttttcatccatgcttagcatctactctgtataacgcatgagaggggaggcaaagaagaaaaagacacacagaagggcctttaaaaaagtagatatttaatatctaagcaggggaggggacaggacagaaagcctgcactgaggggtgcggtgccaacagggaaactcttcacctccctgcaaacctaccagtgaggctcccagagacgcagctgtctcagtgccaggggcagattgggtgtgacctctccactcctccatctcctgctgttgtcctagtggctatcacaggcctgggtgggtgggttgggggaggtgtcagtcaccttgttggtaacactaaagttgttttgttggttttttaaaaacccaatactgaggttcttcctgttccctcaagttttcttatgggcttccaggctttaagctaattccagaagtaaaactgatcttgggtttcctattctgcctcccctagaagggcaggggtgataacccagctacagggaaatcccggcccagctttccacaggcatcacaggcatcttccgcggattctagggtgggctgcccagccttctggtctgaggcgcagctccctctgcccaggtgctgtgcctattcaagtggccttcaggcagagcagcaagtggcccttagcgccccttcccataagcagctgtggtggcagtgagggaggttgggtagccctggactggtcccctcctcagatcacccttgcaaatctggcctcatcttgtattccaacccgacatccctaaaagtacctccacccgttccgggtctggaaggcgttggcaccacaagcactgtccctgtgggaggagcacaaccttctcgggacaggatctgatggggtcttgggctaaaggaggtccctgctgtcctggagaaagtcctagaggttatctcaggaatgactggtggccctgccccaacgtggaaaggtgggaaggaagccttctcccattagccccaatgagagaactcaacgtgccggagctgagtgggccttgcacgagacactggccccactttcaggcctggaggaagcatgcacacatggagacggcgcctgcctgtagatgtttggatcttcgagatctccccaggcatcttgtctcccacaggatcgtgtgtgtaggtggtgttgtgtggttttcctttgtgaaggagagagggaaactatttgtagcttgttttataaaaaataaaaaatgggtaaatcttg

SEQ ID NO: 29576 - DNA, 3150 bp, Homo sapiens
  source 1..3150: mol_type = unassigned DNA
gggtatttgacaggagcgagggcggacgcaaagaacgcggaggacctctgggtgcctgcaggggagctgctccagccgggccgccgggagcggtggggagagcatcgcggagccgcccctccacgcgcccgcccagccgcgctcgcccactgggctctcccggctgcagtgccagggcgcaggacgcggccgatctcccgctcccgccacctccgccaccatgctgctcccccagctctgctggctgccgctgctcgctgggctgctcccgccggtgcccgctcagaagttctcggcgctcacgtttttgagagtggatcaagataaagacaaggattgtagcttggactgtgcgggttcgccccagaaacctctctgcgcatctgacggaaggaccttcctttcccgttgtgaatttcaacgtgccaagtgcaaagatccccagctagagattgcatatcgaggaaactgcaaagacgtgtccaggtgtgtggccgaaaggaagtatacccaggagcaagcccggaaggagtttcagcaagtgttcattcctgagtgcaatgacgacggcacctacagtcaggtccagtgtcacagctacacgggatactgctggtgcgtcacgcccaacgggaggcccatcagcggcactgccgtggcccacaagacgccccggtgcccgggttccgtaaatgaaaagttaccccaacgcgaaggcacaggaaaaacagtctccttgcaaatcttttccgttctgaattcagatgatgccgcagctccagcgttggagactcagcctcaaggagatgaagaagatattgcatcacgttaccctaccctttggactgaacaggttaaaagtcggcagaacaaaaccaataagaattcagtgtcatcctgtgaccaagagcaccagtctgccctggaggaagccaagcagcccaagaacgacaatgtggtgatccctgagtgtgcgcacggcggcctctacaagccagtgcagtgccacccctccacggggtactgctggtgcgtcctggtggacacggggcgccccattcccggcacatccacaaggtacgagcagccgaaatgtgacaacacggccagggcccacccagccaaagcccgggacctgtacaagggccgccagctacaaggttgtccgggtgccaaaaagcatgagtttctgaccagcgttctggacgcgctgtccacggacatggtccacgccgcctccgacccctcctcctcgtcaggcaggctctcagaacccgaccccagccataccctagaggagcgggtggtgcactggtacttcaaactactggataaaaactccagtggagacatcggcaaaaaggaaatcaaacccttcaagaggttccttcgcaaaaaatcaaagcccaaaaaatgtgtgaagaagtttgttgaatactgtgacgtgaataatgacaaatccatctccgtacaagaactgatgggctgcctgggcgtggcgaaagaggacggcaaagcggacaccaagaaacgccacacccccagaggtcatgctgaaagtacgtctaatagacagccaaggaaacaaggataaatggctcataccccgaaggcagttcctagacacatgggaaatttccctcaccaaagagcaattaagaaaacaaaaacagaaacacatagtatttgcactttgtactttaaatgtaaattcactttgtagaaatgagctatttaaacagactgttttaatctgtgaaaatggagagctggcttcagaaaattaatcacatacaatgtatgtgtcctcttttgaccttggaaatctgtatgtggtggagaagtatttgaatgcatttaggcttaatttcttcgccttccacatgttaacagtagagctctatgcactccggctgcaatcgtatggctttctctaacccctgcagtcacttccagatgcctgtgcttacagcattgtggaatcatgttggaagctccacatgtccatggaagtttgtgatgtacggccgaccctacaggcagttaacatgcatgggctggtttgtttcttgggattttctgttagtttgtcttgttttgctttccagagatcttgctcatacaatgaatcacgcaaccactaaagctatccagttaagtgcaggtagttcccctggaggaaataatattttcaaactgtcgttggtgtgatactttggctcaaaggatctttgcttttccattttaagcttctgttttgagttttgccctggggcttgaatgagtcccagagagtcgttcggatggtgggaggctgcctaggaggcagtaaatccagtcacagtgcctgggaggggcccatccttccaaaatgtaaatccagtcgcggtgtgaccgagctggctaacaggcttgtctgcctggttttcctcctacacgtggacattattctcctgatcctcctacctggtccaccccagggctaccggaaggtaaaatcttcacctgaaccaattatgagcagtctccttactgaaggtacagccggatacgtggtgcccccggggctggtgttggcagccggggggaggtgcctgagggtccccacggttcctttctgcttttctgaatgcatcaagggtacgagaacttgccaatgggaaattcatccgagtggcactggcagagaaggataggagtggaatgcccacacagtgaccaacagaactggtctgcgtgcataaccagctgccaccctcaggcctgggccccagagctcagggcacccagtgtcttaaggaaccatttggaggacagtctgagagcaggaacttcaagctgtgattctatctcggctcagacttttggttggaaaaagatcttcatggccccaaatcccctgagacatgccttgtagaatgattttgtgatgttgtgatgcttgtggagcatcgcgtaaggcttcttgcttatttaaactgtgcaaggtaaaaatcaagcctttggagccacagaaccagctcaagtacatgccaatgttgtttaagaaacagttatgatcctaaactttttggataatcttttatatttctgacctttgaatttaatcattgttcttagattaaaataaaatatgctattgaaactata

SEQ ID NO: 29577 - DNA, 3117 bp, Homo sapiens
  source 1..3117: mol_type = unassigned DNA
gggtatttgacaggagcgagggcggacgcaaagaacgcggaggacctctgggtgcctgcaggggagctgctccagccgggccgccgggagcggtggggagagcatcgcggagccgcccctccacgcgcccgcccagccgcgctcgcccactgggctctcccggctgcagtgccagggcgcaggacgcggccgatctcccgctcccgccacctccgccaccatgctgctcccccagctctgctggctgccgctgctcgctgggctgctcccgccggtgcccgctcagaagttctcggcgctcacgtttttgagagtggatcaagataaagacaaggattgtagcttggactgtgcgggttcgccccagaaacctctctgcgcatctgacggaaggaccttcctttcccgttgtgaatttcaacgtgccaagtgcaaagatccccagctagagattgcatatcgaggaaactgcaaagacgtgtccaggtgtgtggccgaaaggaagtatacccaggagcaagcccggaaggagtttcagcaagtgttcattcctgagtgcaatgacgacggcacctacagtcaggtccagtgtcacagctacacgggatactgctggtgcgtcacgcccaacgggaggcccatcagcggcactgccgtggcccacaagacgccccggtgcccgggttccgtaaatgaaaagttaccccaacgcgaaggcacaggaaaaacagatgatgccgcagctccagcgttggagactcagcctcaaggagatgaagaagatattgcatcacgttaccctaccctttggactgaacaggttaaaagtcggcagaacaaaaccaataagaattcagtgtcatcctgtgaccaagagcaccagtctgccctggaggaagccaagcagcccaagaacgacaatgtggtgatccctgagtgtgcgcacggcggcctctacaagccagtgcagtgccacccctccacggggtactgctggtgcgtcctggtggacacggggcgccccattcccggcacatccacaaggtacgagcagccgaaatgtgacaacacggccagggcccacccagccaaagcccgggacctgtacaagggccgccagctacaaggttgtccgggtgccaaaaagcatgagtttctgaccagcgttctggacgcgctgtccacggacatggtccacgccgcctccgacccctcctcctcgtcaggcaggctctcagaacccgaccccagccataccctagaggagcgggtggtgcactggtacttcaaactactggataaaaactccagtggagacatcggcaaaaaggaaatcaaacccttcaagaggttccttcgcaaaaaatcaaagcccaaaaaatgtgtgaagaagtttgttgaatactgtgacgtgaataatgacaaatccatctccgtacaagaactgatgggctgcctgggcgtggcgaaagaggacggcaaagcggacaccaagaaacgccacacccccagaggtcatgctgaaagtacgtctaatagacagccaaggaaacaaggataaatggctcataccccgaaggcagttcctagacacatgggaaatttccctcaccaaagagcaattaagaaaacaaaaacagaaacacatagtatttgcactttgtactttaaatgtaaattcactttgtagaaatgagctatttaaacagactgttttaatctgtgaaaatggagagctggcttcagaaaattaatcacatacaatgtatgtgtcctcttttgaccttggaaatctgtatgtggtggagaagtatttgaatgcatttaggcttaatttcttcgccttccacatgttaacagtagagctctatgcactccggctgcaatcgtatggctttctctaacccctgcagtcacttccagatgcctgtgcttacagcattgtggaatcatgttggaagctccacatgtccatggaagtttgtgatgtacggccgaccctacaggcagttaacatgcatgggctggtttgtttcttgggattttctgttagtttgtcttgttttgctttccagagatcttgctcatacaatgaatcacgcaaccactaaagctatccagttaagtgcaggtagttcccctggaggaaataatattttcaaactgtcgttggtgtgatactttggctcaaaggatctttgcttttccattttaagcttctgttttgagttttgccctggggcttgaatgagtcccagagagtcgttcggatggtgggaggctgcctaggaggcagtaaatccagtcacagtgcctgggaggggcccatccttccaaaatgtaaatccagtcgcggtgtgaccgagctggctaacaggcttgtctgcctggttttcctcctacacgtggacattattctcctgatcctcctacctggtccaccccagggctaccggaaggtaaaatcttcacctgaaccaattatgagcagtctccttactgaaggtacagccggatacgtggtgcccccggggctggtgttggcagccggggggaggtgcctgagggtccccacggttcctttctgcttttctgaatgcatcaagggtacgagaacttgccaatgggaaattcatccgagtggcactggcagagaaggataggagtggaatgcccacacagtgaccaacagaactggtctgcgtgcataaccagctgccaccctcaggcctgggccccagagctcagggcacccagtgtcttaaggaaccatttggaggacagtctgagagcaggaacttcaagctgtgattctatctcggctcagacttttggttggaaaaagatcttcatggccccaaatcccctgagacatgccttgtagaatgattttgtgatgttgtgatgcttgtggagcatcgcgtaaggcttcttgcttatttaaactgtgcaaggtaaaaatcaagcctttggagccacagaaccagctcaagtacatgccaatgttgtttaagaaacagttatgatcctaaactttttggataatcttttatatttctgacctttgaatttaatcattgttcttagattaaaataaaatatgctattgaaactata

SEQ ID NO: 29578 - DNA, 1564 bp, Homo sapiens
  source 1..1564: mol_type = unassigned DNA
gggtatttgacaggagcgagggcggacgcaaagaacgcggaggacctctgggtgcctgcaggggagctgctccagccgggccgccgggagcggtggggagagcatcgcggagccgcccctccacgcgcccgcccagccgcgctcgcccactgggctctcccggctgcagtgccagggcgcaggacgcggccgatctcccgctcccgccacctccgccaccatgctgctcccccagctctgctggctgccgctgctcgctgggctgctcccgccggtgcccgctcagaagttctcggcgctcacgtttttgagagtggatcaagataaagacaaggattgtagcttggactgtgcgggttcgccccagaaacctctctgcgcatctgacggaaggaccttcctttcccgttgtgaatttcaacgtgccaagtgcaaagatccccagctagagattgcatatcgaggaaactgcaaagacgtgtccaggtgtgtggccgaaaggaagtatacccaggagcaagcccggaaggagtttcagcaagtgttcattcctgagtgcaatgacgacggcacctacagtcaggtccagtgtcacagctacacgggatactgctggtgcgtcacgcccaacgggaggcccatcagcggcactgccgtggcccacaagacgccccggtgcccgggttccgtaaatgaaaagttaccccaacgcgaaggcacaggaaaaacagatgatgccgcagctccagcgttggagactcagcctcaaggagatgaagaagatattgcatcacgttaccctaccctttggactgaacaggttaaaagtcggcagaacaaaaccaataagaattcagtgtcatcctgtgaccaagagcaccagtctgccctggaggaagccaagcagcccaagaacgacaatgtggtgatccctgagtgtgcgcacggcggcctctacaagccagtgcagtgccacccctccacggggtactgctggtgcgtcctggtggacacggggcgccccattcccggcacatccacaaggtacgagcagccgaaatgtgacaacacggccagggcccacccagccaaagcccgggacctgtacaagggccgccagctacaaggttgtccgggtgccaaaaagcatgagtttctgaccagcgttctggacgcgctgtccacggacatggtccacgccgcctccgacccctcctcctcgtcaggcaggctctcagaacccgaccccagccataccctagaggagcgggtggtgcactggtacttcaaactactggataaaaactccagtggagacatcggcaaaaaggaaatcaaacccttcaagaggttccttcgcaaaaaatcaaagcccaaaaaatgtgtgaagaagtttgttgaatactgtgacgtgaataatgacaaatccatctccgtacaagaactgatgggctgcctgggcgtggcgaaagaggacggcaaagcggacaccaagaaacgccacacccccagaggtcatgctgaaagtacgtctaatagacaggaaaatccaagaaaagaaggg

SEQ ID NO: 29579 - DNA, 672 bp, Homo sapiens
  source 1..672: mol_type = unassigned DNA
aaaaaatcaaagcccaaaaaatgtgtgaagaagtttgttgaatactgtgacgtgaataatgacaaatccatctccgtacaagaactgatgggctgcctgggcgtggcgaaagaggacggcaaagcggacaccaagaaacgccacacccccagaggtcatgctgaaagtacgtctaatagacaggatgcaatggtggtgtcctccagacccaaagccacaacccatcgcaagtcaagaacactttccagaagataaacatgagtgggttcatgtctctctccttcaaagccaggacaaaatccccacttctttgctgccgcgagtcaatttgtgatttattttgtctgcacctgtttgatgccaggtcgacatttcctaaggcaagcccctgtatttgttgtggatttaagtggaggcggccagcacacaccttggatgtaatttaaaaccatttcctgaggaaagatgtgtgatatgctttcctttgtttagcaaatgtttatggttttaactttaaatctcaccgcaaatcacttacacttgaaaacagggctggtctgaaagtaattaccctccctgagtgccaagacctccagaagttgttttcattcccgaatggcaatcactgtactcatgcgctccacgcatcttaaataaactcagttcaaagca

SEQ ID NO: 29580 - DNA, 5328 bp, Homo sapiens
  source 1..5328: mol_type = unassigned DNA
agttgttatacggcttttgtcttaacgaagccacccattacggtatgatgatgtcaaacgtgatgctgatgctacagttacagcccctgctggcgcagcctctctgattctctctccctctccgcgtccagtgctgggctttttcagacaagtgcatctcctaaccaggtcacatttcagccgcgacccactctccgccagtcaccggaggcagaccgcgggaggagagctgaggacagccgcgtgcgcttcgccagcagcggggtgggaggaaggacattaaaatactgcagaagtcaagacccccccaggtcgaacccagaccacgatgcgcgccccgggctgcgggcggctggtgctgccgctgctgctcctggccgcggcagccctggccgaaggcgacgccaaggggctcaaggagggcgagacccccggcaatttcatggaggacgagcaatggctgtcgtccatctcgcagtacagcggcaagatcaagcactggaaccgcttccgagacgaagtggaggatgactatatcaagagctgggaggacaatcagcaaggagatgaagccctggataccaccaaggacccctgccagaaggtgaagtgcagccgccacaaggtgtgcattgcccagggctaccagcgggccatgtgcatcagtcgcaagaagctggagcacaggatcaagcagccgaccgtgaaactccatggaaacaaagactccatctgcaagccctgccacatggcccagcttgcctctgtctgcggctcagatggccacacttacagctctgtgtgtaagctggagcaacaggcgtgcctgagcagcaagcagctggcggtgcgatgcgagggcccctgcccctgccccacggagcaggctgccacctccaccgccgatggcaaaccagagacttgcaccggtcaggacctggctgacctgggagatcggctgcgggactggttccagctccttcatgagaactccaagcagaatggctcagccagcagtgtagccggcccggccagcgggctggacaagagcctgggggccagctgcaaggactccattggctggatgttctccaagctggacaccagtgctgacctcttcctggaccagacggagctggccgccatcaacctggacaagtacgaggtctgcatccgtcccttcttcaactcctgtgacacctacaaggatggccgggtctctactgctgagtggtgcttctgcttctggagggagaagcccccctgcctggcagagctggagcgcatccagatccaggaggccgccaagaagaagccaggcatcttcatcccgagctgcgacgaggatggctactaccggaagatgcagtgtgaccagagcagcggtgactgctggtgtgtggaccagctgggcctggagctgactggcacgcgcacgcatgggagccccgactgcgatgacatcgtgggcttctcgggggactttggaagcggtgtcggctgggaggatgaggaggagaaggagacggaggaagcaggcgaggaggccgaggaggaggagggcgaggcaggcgaggctgacgacgggggctacatctggtagacgccctcaggagccggctgccgggggggactcaacagcagagctctgagcagcagcaggcaacttcgagaacggatccagaaatgcagtcagaaggaccctgctccacctggggggactgggagtgtgagtgtgcatggcatgtgtgtggcacagatggctgggacgggtgacagtgtgagtgcatgtgtgcatgcatgtgtgtatgtgtgtgtgtgtgtggcatgcgctgacaaatgtgtccttgatccacactgctcctggcagagtgagtcacccaaaggccccttcggcctccttgtagctgttttctttccttttgttgttggttttaaaatacattcacacacaaatacaaattgacaggtcaaaatccatgaaatgagatcccccagccgtgtcctccagcccagccctgaccccttggtttctaccctggctccccttggtttctaccctggctcaaccgacccctgtctgcccttctccctcttgcttctgaggtcaagctctggcctgcgagcctgtccccattgcaaaggggagggaggggcagggagctgtctaccagctgaggtcctcccaaaactgggccgatgtggtgtgacatccccaccagcctcagatgagacgggccaggacgcccagccacagcaagccctgtccctttgccggatccccaaacactagagaagctctcctaacccaaggcggagaatgaaggtggtggcggcagaggaggagggcagcagctgagaggccagggacagggtgcctcgccaagctgtctgaggtctgtcccaggtggcccaggtggtgcaggtagaacagggtgaggagagggggtcggctcagcaggaggaggctgtggctgcagagcctgggggagcttttaggtgttgagatggggcagctctgaatcctagaccctggaatagcctgtcccttttctctgggtctcgtggtggagccatgatctgggctgctctcttggggacactgggtggtggttacacagttgacctctgcctggctcccccttggtgcaactcctgcctccatcccccttgctggggtcccctcatccacttgagggcgcctgagggccaggagcagcaggcaaggagcctgggtctaggctaagggggtgtgtgcccacctcctccctgacccttaacactcctgtcctgcccagaccaacagagagagctgtccctgagaccccggagagaagcagctgccgaaagctgcagcctttccgcactctgagaccatgatcttcctcctgccaggggagagccacccacaggccatgtccagccccacttccctcagcccccagggcttccttctggcccctctgaggattccctagggctgccccgcagaggggcttccccaagctctgttttgaagcctgcaatgtggaaaagtgagaagtcagagggaacaggacaggtgcagccgggctctgaggccacacctcacacctcgctgttccccaacatcccctgagcagtgtgagctcatctcaccagatgagaagaggccctgtgcatttcttttgtttgtttgttgctgttttcccccacccatccagttctcctcagcaaagcaaattccttaacacctttggtggagaatttcttacccagacttggggctgtgatgcccttcagtgcgtggtgagtgcagcgtgtgtgcgtgtgcctgtgtgtgaacctgggggccatcctggtggcctgggagcgtgaggagaggccccctgtgtgctgggtgagtggtgggtgtggggtcaatgcagtgaggctctctgggtgaggctcccaacctggcagtccccagcctcccagcatctgtgagcgtctgttggactttacagaagagcctcatcctgtctgcccctcactctgccctggaatcaacatcttccgagtccttcttgggggaaatagcagagccccacttaactccataaactgcttcccattccgcagcccagttctgattgttgaggtgtcgcgtcgttccaggtcccccagtcccctctttctcctgtcctctctctgtccttcacctccccactccagccccggctcagttcagggaaatgctgttccacatcagccctctgctctctgaggcagccgcgcctctgactcggagctacttgaaacttctgctcttgctaggattggagtctacctatctcttccatttgtcccagctggagttctggaactttcctcctcggggtgggggtgggggttgttaaggatgctggggggcctggggaaggaaggagttcagaggaagggtgtcccctgtcctcttgatgtcaccctccgctcctgggacacgtgctctctctgtctctgggtcttctggctgtgcacgtttgtgtgtccttgtaaatatgttttaggaagaaagcaaaagggactgaactagcctctggtaggattgcaggggtccagccttgcctgtttccgaagcccccacactgcctttcgccctactgagactggtcccctcaaaaggtagacaaaacagcagctccctgtggagctgaagggcggcctcaaagtggctttttgttagacaaggttaaggtttcctcatgagcaaggttgcagatcggtccttcctcagctccttgatttgtgaccttgaccaaggggcctgccacccagcccctccagtgccctctcctcgatgcctcgctccttcctgcccccactcccctggcttaggcaggtaggggaattagggccatgctggaagaagcttaaccatgtgttcaaagaacggtttcttgcttgcttggtcctggaactccccttggctgccccaggcctccttggcccatgggtgctgggggaggtggatgtcagatctggtaggttgcagcagagaaaataaatgtgccttgagagaccactcagagagggtccaagggtgatggagaaggaagcatggcctgggagcttggaagggaggggtggtgggtggcggcatcttgactgccccctgttgtcccacacgtggggggtggtcaccccccttcactccagcccgcctgccttcagccttccatgagcttcacctgcttccaacttcactttggagggggtggggtccgttggcatcaacacggggaccctctgcttcaccaaagcccgagccctcagcccctggggagaacaaatggctgagctttgatacctggggtcgtcgagaggctgcgggctggcggcagtcccaggggagagacaccacagaaggagacccagacatcccgaggaagttcccagcagagcaaactgctttccagcctgaagcctgcttaaactgtgtgatgtgcaataactgagcttagagttaggaattgtgttcaagtgcttggatttccgtctgtagatttaactgctgaaattgtatctctcagtaattttagatgtcttttaaaaaattgaaaaacaaagtgttagactgtgtgcgtgtgcgttgatgggcactcaagagtcccgtgagtcatccagccctgcctttcccctgcgcccccatcctctcacgtcccgccccgcctccacttggggaccctgcctcgtgtcgtctttatctgcctattactcagcctaaggaaacaagtacactccacacatgcataaaggaaatcaaatgttatttttaagaaaatggaaaataaaaactttataaacacc

SEQ ID NO: 29581 - DNA, 5436 bp, Homo sapiens
  source 1..5436: mol_type = unassigned DNA
cagggacatttcgggattctggatttcttggtctgcaactccctgtgtgccaggcggggctgggccccgctgcggctggctggcgtttggcgctctcatcgagggagcgcttcgctttgaaatctacccactccttttttttttttttttttaaaccaggtatgatgatgtcaaacgtgatgctgatgctacagttacagcccctgctggcgcagcctctctgattctctctccctctccgcgtccagtgctgggctttttcagacaagtgcatctcctaaccaggtcacatttcagccgcgacccactctccgccagtcaccggaggcagaccgcgggaggagagctgaggacagccgcgtgcgcttcgccagcagcggggtgggaggaaggacattaaaatactgcagaagtcaagacccccccaggtcgaacccagaccacgatgcgcgccccgggctgcgggcggctggtgctgccgctgctgctcctggccgcggcagccctggccgaaggcgacgccaaggggctcaaggagggcgagacccccggcaatttcatggaggacgagcaatggctgtcgtccatctcgcagtacagcggcaagatcaagcactggaaccgcttccgagacgatgactatatcaagagctgggaggacaatcagcaaggagatgaagccctggataccaccaaggacccctgccagaaggtgaagtgcagccgccacaaggtgtgcattgcccagggctaccagcgggccatgtgcatcagtcgcaagaagctggagcacaggatcaagcagccgaccgtgaaactccatggaaacaaagactccatctgcaagccctgccacatggcccagcttgcctctgtctgcggctcagatggccacacttacagctctgtgtgtaagctggagcaacaggcgtgcctgagcagcaagcagctggcggtgcgatgcgagggcccctgcccctgccccacggagcaggctgccacctccaccgccgatggcaaaccagagacttgcaccggtcaggacctggctgacctgggagatcggctgcgggactggttccagctccttcatgagaactccaagcagaatggctcagccagcagtgtagccggcccggccagcgggctggacaagagcctgggggccagctgcaaggactccattggctggatgttctccaagctggacaccagtgctgacctcttcctggaccagacggagctggccgccatcaacctggacaagtacgaggtctgcatccgtcccttcttcaactcctgtgacacctacaaggatggccgggtctctactgctgagtggtgcttctgcttctggagggagaagcccccctgcctggcagagctggagcgcatccagatccaggaggccgccaagaagaagccaggcatcttcatcccgagctgcgacgaggatggctactaccggaagatgcagtgtgaccagagcagcggtgactgctggtgtgtggaccagctgggcctggagctgactggcacgcgcacgcatgggagccccgactgcgatgacatcgtgggcttctcgggggactttggaagcggtgtcggctgggaggatgaggaggagaaggagacggaggaagcaggcgaggaggccgaggaggaggagggcgaggcaggcgaggctgacgacgggggctacatctggtagacgccctcaggagccggctgccgggggggactcaacagcagagctctgagcagcagcaggcaacttcgagaacggatccagaaatgcagtcagaaggaccctgctccacctggggggactgggagtgtgagtgtgcatggcatgtgtgtggcacagatggctgggacgggtgacagtgtgagtgcatgtgtgcatgcatgtgtgtatgtgtgtgtgtgtgtggcatgcgctgacaaatgtgtccttgatccacactgctcctggcagagtgagtcacccaaaggccccttcggcctccttgtagctgttttctttccttttgttgttggttttaaaatacattcacacacaaatacaaattgacaggtcaaaatccatgaaatgagatcccccagccgtgtcctccagcccagccctgaccccttggtttctaccctggctccccttggtttctaccctggctcaaccgacccctgtctgcccttctccctcttgcttctgaggtcaagctctggcctgcgagcctgtccccattgcaaaggggagggaggggcagggagctgtctaccagctgaggtcctcccaaaactgggccgatgtggtgtgacatccccaccagcctcagatgagacgggccaggacgcccagccacagcaagccctgtccctttgccggatccccaaacactagagaagctctcctaacccaaggcggagaatgaaggtggtggcggcagaggaggagggcagcagctgagaggccagggacagggtgcctcgccaagctgtctgaggtctgtcccaggtggcccaggtggtgcaggtagaacagggtgaggagagggggtcggctcagcaggaggaggctgtggctgcagagcctgggggagcttttaggtgttgagatggggcagctctgaatcctagaccctggaatagcctgtcccttttctctgggtctcgtggtggagccatgatctgggctgctctcttggggacactgggtggtggttacacagttgacctctgcctggctcccccttggtgcaactcctgcctccatcccccttgctggggtcccctcatccacttgagggcgcctgagggccaggagcagcaggcaaggagcctgggtctaggctaagggggtgtgtgcccacctcctccctgacccttaacactcctgtcctgcccagaccaacagagagagctgtccctgagaccccggagagaagcagctgccgaaagctgcagcctttccgcactctgagaccatgatcttcctcctgccaggggagagccacccacaggccatgtccagccccacttccctcagcccccagggcttccttctggcccctctgaggattccctagggctgccccgcagaggggcttccccaagctctgttttgaagcctgcaatgtggaaaagtgagaagtcagagggaacaggacaggtgcagccgggctctgaggccacacctcacacctcgctgttccccaacatcccctgagcagtgtgagctcatctcaccagatgagaagaggccctgtgcatttcttttgtttgtttgttgctgttttcccccacccatccagttctcctcagcaaagcaaattccttaacacctttggtggagaatttcttacccagacttggggctgtgatgcccttcagtgcgtggtgagtgcagcgtgtgtgcgtgtgcctgtgtgtgaacctgggggccatcctggtggcctgggagcgtgaggagaggccccctgtgtgctgggtgagtggtgggtgtggggtcaatgcagtgaggctctctgggtgaggctcccaacctggcagtccccagcctcccagcatctgtgagcgtctgttggactttacagaagagcctcatcctgtctgcccctcactctgccctggaatcaacatcttccgagtccttcttgggggaaatagcagagccccacttaactccataaactgcttcccattccgcagcccagttctgattgttgaggtgtcgcgtcgttccaggtcccccagtcccctctttctcctgtcctctctctgtccttcacctccccactccagccccggctcagttcagggaaatgctgttccacatcagccctctgctctctgaggcagccgcgcctctgactcggagctacttgaaacttctgctcttgctaggattggagtctacctatctcttccatttgtcccagctggagttctggaactttcctcctcggggtgggggtgggggttgttaaggatgctggggggcctggggaaggaaggagttcagaggaagggtgtcccctgtcctcttgatgtcaccctccgctcctgggacacgtgctctctctgtctctgggtcttctggctgtgcacgtttgtgtgtccttgtaaatatgttttaggaagaaagcaaaagggactgaactagcctctggtaggattgcaggggtccagccttgcctgtttccgaagcccccacactgcctttcgccctactgagactggtcccctcaaaaggtagacaaaacagcagctccctgtggagctgaagggcggcctcaaagtggctttttgttagacaaggttaaggtttcctcatgagcaaggttgcagatcggtccttcctcagctccttgatttgtgaccttgaccaaggggcctgccacccagcccctccagtgccctctcctcgatgcctcgctccttcctgcccccactcccctggcttaggcaggtaggggaattagggccatgctggaagaagcttaaccatgtgttcaaagaacggtttcttgcttgcttggtcctggaactccccttggctgccccaggcctccttggcccatgggtgctgggggaggtggatgtcagatctggtaggttgcagcagagaaaataaatgtgccttgagagaccactcagagagggtccaagggtgatggagaaggaagcatggcctgggagcttggaagggaggggtggtgggtggcggcatcttgactgccccctgttgtcccacacgtggggggtggtcaccccccttcactccagcccgcctgccttcagccttccatgagcttcacctgcttccaacttcactttggagggggtggggtccgttggcatcaacacggggaccctctgcttcaccaaagcccgagccctcagcccctggggagaacaaatggctgagctttgatacctggggtcgtcgagaggctgcgggctggcggcagtcccaggggagagacaccacagaaggagacccagacatcccgaggaagttcccagcagagcaaactgctttccagcctgaagcctgcttaaactgtgtgatgtgcaataactgagcttagagttaggaattgtgttcaagtgcttggatttccgtctgtagatttaactgctgaaattgtatctctcagtaattttagatgtcttttaaaaaattgaaaaacaaagtgttagactgtgtgcgtgtgcgttgatgggcactcaagagtcccgtgagtcatccagccctgcctttcccctgcgcccccatcctctcacgtcccgccccgcctccacttggggaccctgcctcgtgtcgtctttatctgcctattactcagcctaaggaaacaagtacactccacacatgcataaaggaaatcaaatgttatttttaagaaaatggaaaataaaaactttataaacacc

SEQ ID NO: 29582 - DNA, 1284 bp, Homo sapiens
  source 1..1284: mol_type = unassigned DNA
agttgttatacggcttttgtcttaacgaagccacccattacggtatgatgatgtcaaacgtgatgctgatgctacagttacagcccctgctggcgcagcctctctgattctctctccctctccgcgtccagtgctgggctttttcagacaagtgcatctcctaaccaggtcacatttcagccgcgacccactctccgccagtcaccggaggcagaccgcgggaggagagctgaggacagccgcgtgcgcttcgccagcagcggggtgggaggaaggacattaaaatactgcagaagtcaagacccccccaggtcgaacccagaccacgatgcgcgccccgggctgcgggcggctggtgctgccgctgctgctcctggccgcggcagccctggccgaaggcgacgccaaggggctcaaggagggcgagacccccggcaatttcatggaggacgagcaatggctgtcgtccatctcgcagtacagcggcaagatcaagcactggaaccgcttccgagacgttccctcgtccgacccacccagtacaacgcaggccacaccatgacctctcccgttttctccttaaactgcgtgcatccacaagttccttggaaatttgtttaaaacacacatgcttcataggctatccagccaagtgatgggaagaggcagagatttggatctttttgttaccgtcagacaagtgactgtttctccccaaagtcaaactggcaggttgtaattcacagaggacagcaggaaccacgggcagccaggtctccaggctgagtggccgggccccgcgatgggctgctgatctccgccttcgccccacatgcgacctgtccagccgcaggagcctggagccccgcgaggccttcccgaagcacctgcaggcccagcgcagatgagccgcagtctcctgccgcttcctgggcagcagcccggccacagcagcgagggggcggcagcaggccggcccatccggaatccatgtgtcactggcctaggcctccctccgactcgctggctgtttgatctgccaaaatgggaccagtgaaggtcagagggaaaagaaatgcttaatcagaacaggaaaggtttaaaataaaagattcctccccacctcccttcttccacctgcttccaatagccagctccgtgggtgagaataaatgacttactgcttgaccccatggcactgggctacccacctgtctctctgtattggtgccaaccacttcccccttcctctcatgctcatcagaagaaaggcactagatttga

SEQ ID NO: 29583 - DNA, 5000 bp, Homo sapiens
  source 1..5000: mol_type = unassigned DNA
atgcgcgccccgggctgcgggcggctggtgctgccgctgctgctcctggccgcggcagccctggccgaaggcgacgccaaggggctcaaggagggcgagacccccggcaatttcatggaggacgagcaatggctgtcgtccatctcgcagtacagcggcaagatcaagcactggaaccgcttccgagacgggatagaggatgactatatcaagagctgggaggacaatcagcaaggagatgaagccctggataccaccaaggacccctgccagaaggtgaagtgcagccgccacaaggtgtgcattgcccagggctaccagcgggccatgtgcatcagtcgcaagaagctggagcacaggatcaagcagccgaccgtgaaactccatggaaacaaagactccatctgcaagccctgccacatggcccagcttgcctctgtctgcggctcagatggccacacttacagctctgtgtgtaagctggagcaacaggcgtgcctgagcagcaagcagctggcggtgcgatgcgagggcccctgcccctgccccacggagcaggctgccacctccaccgccgatggcaaaccagagacttgcaccggtcaggacctggctgacctgggagatcggctgcgggactggttccagctccttcatgagaactccaagcagaatggctcagccagcagtgtagccggcccggccagcgggctggacaagagcctgggggccagctgcaaggactccattggctggatgttctccaagctggacaccagtgctgacctcttcctggaccagacggagctggccgccatcaacctggacaagtacgaggtctgcatccgtcccttcttcaactcctgtgacacctacaaggatggccgggtctctactgctgagtggtgcttctgcttctggagggagaagcccccctgcctggcagagctggagcgcatccagatccaggaggccgccaagaagaagccaggcatcttcatcccgagctgcgacgaggatggctactaccggaagatgcagtgtgaccagagcagcggtgactgctggtgtgtggaccagctgggcctggagctgactggcacgcgcacgcatgggagccccgactgcgatgacatcgtgggcttctcgggggactttggaagcggtgtcggctgggaggatgaggaggagaaggagacggaggaagcaggcgaggaggccgaggaggaggagggcgaggcaggcgaggctgacgacgggggctacatctggtagacgccctcaggagccggctgccgggggggactcaacagcagagctctgagcagcagcaggcaacttcgagaacggatccagaaatgcagtcagaaggaccctgctccacctggggggactgggagtgtgagtgtgcatggcatgtgtgtggcacagatggctgggacgggtgacagtgtgagtgcatgtgtgcatgcatgtgtgtatgtgtgtgtgtgtgtggcatgcgctgacaaatgtgtccttgatccacactgctcctggcagagtgagtcacccaaaggccccttcggcctccttgtagctgttttctttccttttgttgttggttttaaaatacattcacacacaaatacaaattgacaggtcaaaatccatgaaatgagatcccccagccgtgtcctccagcccagccctgaccccttggtttctaccctggctccccttggtttctaccctggctcaaccgacccctgtctgcccttctccctcttgcttctgaggtcaagctctggcctgcgagcctgtccccattgcaaaggggagggaggggcagggagctgtctaccagctgaggtcctcccaaaactgggccgatgtggtgtgacatccccaccagcctcagatgagacgggccaggacgcccagccacagcaagccctgtccctttgccggatccccaaacactagagaagctctcctaacccaaggcggagaatgaaggtggtggcggcagaggaggagggcagcagctgagaggccagggacagggtgcctcgccaagctgtctgaggtctgtcccaggtggcccaggtggtgcaggtagaacagggtgaggagagggggtcggctcagcaggaggaggctgtggctgcagagcctgggggagcttttaggtgttgagatggggcagctctgaatcctagaccctggaatagcctgtcccttttctctgggtctcgtggtggagccatgatctgggctgctctcttggggacactgggtggtggttacacagttgacctctgcctggctcccccttggtgcaactcctgcctccatcccccttgctggggtcccctcatccacttgagggcgcctgagggccaggagcagcaggcaaggagcctgggtctaggctaagggggtgtgtgcccacctcctccctgacccttaacactcctgtcctgcccagaccaacagagagagctgtccctgagaccccggagagaagcagctgccgaaagctgcagcctttccgcactctgagaccatgatcttcctcctgccaggggagagccacccacaggccatgtccagccccacttccctcagcccccagggcttccttctggcccctctgaggattccctagggctgccccgcagaggggcttccccaagctctgttttgaagcctgcaatgtggaaaagtgagaagtcagagggaacaggacaggtgcagccgggctctgaggccacacctcacacctcgctgttccccaacatcccctgagcagtgtgagctcatctcaccagatgagaagaggccctgtgcatttcttttgtttgtttgttgctgttttcccccacccatccagttctcctcagcaaagcaaattccttaacacctttggtggagaatttcttacccagacttggggctgtgatgcccttcagtgcgtggtgagtgcagcgtgtgtgcgtgtgcctgtgtgtgaacctgggggccatcctggtggcctgggagcgtgaggagaggccccctgtgtgctgggtgagtggtgggtgtggggtcaatgcagtgaggctctctgggtgaggctcccaacctggcagtccccagcctcccagcatctgtgagcgtctgttggactttacagaagagcctcatcctgtctgcccctcactctgccctggaatcaacatcttccgagtccttcttgggggaaatagcagagccccacttaactccataaactgcttcccattccgcagcccagttctgattgttgaggtgtcgcgtcgttccaggtcccccagtcccctctttctcctgtcctctctctgtccttcacctccccactccagccccggctcagttcagggaaatgctgttccacatcagccctctgctctctgaggcagccgcgcctctgactcggagctacttgaaacttctgctcttgctaggattggagtctacctatctcttccatttgtcccagctggagttctggaactttcctcctcggggtgggggtgggggttgttaaggatgctggggggcctggggaaggaaggagttcagaggaagggtgtcccctgtcctcttgatgtcaccctccgctcctgggacacgtgctctctctgtctctgggtcttctggctgtgcacgtttgtgtgtccttgtaaatatgttttaggaagaaagcaaaagggactgaactagcctctggtaggattgcaggggtccagccttgcctgtttccgaagcccccacactgcctttcgccctactgagactggtcccctcaaaaggtagacaaaacagcagctccctgtggagctgaagggcggcctcaaagtggctttttgttagacaaggttaaggtttcctcatgagcaaggttgcagatcggtccttcctcagctccttgatttgtgaccttgaccaaggggcctgccacccagcccctccagtgccctctcctcgatgcctcgctccttcctgcccccactcccctggcttaggcaggtaggggaattagggccatgctggaagaagcttaaccatgtgttcaaagaacggtttcttgcttgcttggtcctggaactccccttggctgccccaggcctccttggcccatgggtgctgggggaggtggatgtcagatctggtaggttgcagcagagaaaataaatgtgccttgagagaccactcagagagggtccaagggtgatggagaaggaagcatggcctgggagcttggaagggaggggtggtgggtggcggcatcttgactgccccctgttgtcccacacgtggggggtggtcaccccccttcactccagcccgcctgccttcagccttccatgagcttcacctgcttccaacttcactttggagggggtggggtccgttggcatcaacacggggaccctctgcttcaccaaagcccgagccctcagcccctggggagaacaaatggctgagctttgatacctggggtcgtcgagaggctgcgggctggcggcagtcccaggggagagacaccacagaaggagacccagacatcccgaggaagttcccagcagagcaaactgctttccagcctgaagcctgcttaaactgtgtgatgtgcaataactgagcttagagttaggaattgtgttcaagtgcttggatttccgtctgtagatttaactgctgaaattgtatctctcagtaattttagatgtcttttaaaaaattgaaaaacaaagtgttagactgtgtgcgtgtgcgttgatgggcactcaagagtcccgtgagtcatccagccctgcctttcccctgcgcccccatcctctcacgtcccgccccgcctccacttggggaccctgcctcgtgtcgtctttatctgcctattactcagcctaaggaaacaagtacactccacacatgcataaaggaaatcaaatgttatttttaagaaaatggaaaataaaaactttataaacacc

SEQ ID NO: 29584 - DNA, 2986 bp, Homo sapiens
  source 1..2986: mol_type = unassigned DNA
gggagcgcgccgggcgcagggagctgagtggacggctcgagacggcggcgcgtgcagcagctccagaaagcagcgagttggcagagcagggctgcatttccagcaggagctgcgagcacagtgctggctcacaacaagatgctcaaggtgtcagccgtactgtgtgtgtgtgcagccgcttggtgcagtcagtctctcgcagctgccgcggcggtggctgcagccggggggcggtcggacggcggtaattttctggatgataaacaatggctcaccacaatctctcagtatgacaaggaagtcggacagtggaacaaattccgagacgaagtagaggatgattatttccgcacttggagtccaggaaaacccttcgatcaggctttagatccagctaaggatccatgcttaaagatgaaatgtagtcgccataaagtatgcattgctcaagattctcagactgcagtctgcattagtcaccggaggcttacacacaggatgaaagaagcaggagtagaccataggcagtggaggggtcccatattatccacctgcaagcagtgcccagtggtctatcccagccctgtttgtggttcagatggtcatacctactcttttcagtgcaaactagaatatcaggcatgtgtcttaggaaaacagatctcagtcaaatgtgaaggacattgcccatgtccttcagataagcccaccagtacaagcagaaatgttaagagagcatgcagtgacctggagttcagggaagtggcaaacagattgcgggactggttcaaggcccttcatgaaagtggaagtcaaaacaagaagacaaaaacattgctgaggcctgagagaagcagattcgataccagcatcttgccaatttgcaaggactcacttggctggatgtttaacagacttgatacaaactatgacctgctattggaccagtcagagctcagaagcatttaccttgataagaatgaacagtgtaccaaggcattcttcaattcttgtgacacatacaaggacagtttaatatctaataatgagtggtgctactgcttccagagacagcaagacccaccttgccagactgagctcagcaatattcagaagcggcaaggggtaaagaagctcctaggacagtatatccccctgtgtgatgaagatggttactacaagccaacacaatgtcatggcagtgttggacagtgctggtgtgttgacagatatggaaatgaagtcatgggatccagaataaatggtgttgcagattgtgctatagattttgagatctccggagattttgctagtggcgattttcatgaatggactgatgatgaggatgatgaagacgatattatgaatgatgaagatgaaattgaagatgatgatgaagatgaaggggatgatgatgatggtggtgatgaccatgatgtatacatttgattgatgacagttgaaatcaataaattctacatttctaatatttacaaaaatgatagcctatttaaaattatcttcttccccaataacaaaatgattctaaacctcacatatattttgtataattatttgaaaaattgcagctaaagttatagaactttatgtttaaataagaatcatttgctttgagtttttatattccttacacaaaaagaaaatacatatgcagtctagtcagacaaaataaagttttgaagtgctactataataagtttttcacgagaacaaactttgtaaatcttccataagcaaaatgacagctagtgcttgggatcgtacatgttaattttctgaaagataattctaagtgaaatttaaaataaataaatttttaatgacctgggtcttaaggatttaggaaaaatatgcatgctttaattgcatttccaaagtagcatcttgctagacctagttgagtcaggataacagagagataccacatggcaagaaaaacaaagtgacaattgtagagtcctcaattgtgtttacattaatagtggtgtttttacctatgaaattattctggatctaataggacattttacaaaatggcaagtatggaaaaccatggattctgaaagttaaaaatttagttgttctccccaatgtgtattttaatttggatggcagtctcatgcagattttttaaaagattctttaataacatgatttgtttgcctttctagatttctttatctttctgaccagcaacttagggagcagaatttaaattaggaagacaaagggaaagattcatttaaaccatatttttacaaagtttgtcatttgccccaaggtcaaattttaaattcttaattttcattttatttcccattttaggtaaaagtttgcatttaatcttagaattatgttatttttgttagtagtgtggaaacttagagaacttattgtatggtgccttgcaaaaatagagatagaaagattttagcatgcataccaatatagtatattacgcaatatataagcacacctaattaacagattaatatcagtaaaggtattgctgctggaatgaagaaaatgggatacgtttgtttctttttttctattgttacataattgccatgtggacttgtttatgattattgtgtagagtagcatttaagatttaactgtagcaaaaattactttaaccgctgtatttaagttagcatgttaattaattgtgtagacattttggcacaccatcacttttaactatatcataccaatggttttgtgcccataataaaaatggaaaaacctgttgaatgttacgtattggtatctttaatttcaacagtgggtaaactggtttcccagtatacaattcattgaaagcaaaattgattaattatttccatttaatttatacacactcaatacaaaatttaatgttgactttacgtaataaagtataatgcattttcttttttactgtttatgtatagtttacaaaataaagaatcttgtaaccaaa

SEQ ID NO: 29585 - DNA, 2936 bp, Homo sapiens
  source 1..2936: mol_type = unassigned DNA
gagacggcggcgcgtgcagcagctccagaaagcagcgagttggcagagcagggctgcatttccagcaggagctgcgagcacagtgctggctcacaacaagatgctcaaggtgtcagccgtactgtgtgtgtgtgcagccgcttggtgcagtcagtctctcgcagctgccgcggcggtggctgcagccggggggcggtcggacggcggtaattttctggatgataaacaatggctcaccacaatctctcagtatgacaaggaagtcggacagtggaacaaattccgagacgatgattatttccgcacttggagtccaggaaaacccttcgatcaggctttagatccagctaaggatccatgcttaaagatgaaatgtagtcgccataaagtatgcattgctcaagattctcagactgcagtctgcattagtcaccggaggcttacacacaggatgaaagaagcaggagtagaccataggcagtggaggggtcccatattatccacctgcaagcagtgcccagtggtctatcccagccctgtttgtggttcagatggtcatacctactcttttcagtgcaaactagaatatcaggcatgtgtcttaggaaaacagatctcagtcaaatgtgaaggacattgcccatgtccttcagataagcccaccagtacaagcagaaatgttaagagagcatgcagtgacctggagttcagggaagtggcaaacagattgcgggactggttcaaggcccttcatgaaagtggaagtcaaaacaagaagacaaaaacattgctgaggcctgagagaagcagattcgataccagcatcttgccaatttgcaaggactcacttggctggatgtttaacagacttgatacaaactatgacctgctattggaccagtcagagctcagaagcatttaccttgataagaatgaacagtgtaccaaggcattcttcaattcttgtgacacatacaaggacagtttaatatctaataatgagtggtgctactgcttccagagacagcaagacccaccttgccagactgagctcagcaatattcagaagcggcaaggggtaaagaagctcctaggacagtatatccccctgtgtgatgaagatggttactacaagccaacacaatgtcatggcagtgttggacagtgctggtgtgttgacagatatggaaatgaagtcatgggatccagaataaatggtgttgcagattgtgctatagattttgagatctccggagattttgctagtggcgattttcatgaatggactgatgatgaggatgatgaagacgatattatgaatgatgaagatgaaattgaagatgatgatgaagatgaaggggatgatgatgatggtggtgatgaccatgatgtatacatttgattgatgacagttgaaatcaataaattctacatttctaatatttacaaaaatgatagcctatttaaaattatcttcttccccaataacaaaatgattctaaacctcacatatattttgtataattatttgaaaaattgcagctaaagttatagaactttatgtttaaataagaatcatttgctttgagtttttatattccttacacaaaaagaaaatacatatgcagtctagtcagacaaaataaagttttgaagtgctactataataagtttttcacgagaacaaactttgtaaatcttccataagcaaaatgacagctagtgcttgggatcgtacatgttaattttctgaaagataattctaagtgaaatttaaaataaataaatttttaatgacctgggtcttaaggatttaggaaaaatatgcatgctttaattgcatttccaaagtagcatcttgctagacctagttgagtcaggataacagagagataccacatggcaagaaaaacaaagtgacaattgtagagtcctcaattgtgtttacattaatagtggtgtttttacctatgaaattattctggatctaataggacattttacaaaatggcaagtatggaaaaccatggattctgaaagttaaaaatttagttgttctccccaatgtgtattttaatttggatggcagtctcatgcagattttttaaaagattctttaataacatgatttgtttgcctttctagatttctttatctttctgaccagcaacttagggagcagaatttaaattaggaagacaaagggaaagattcatttaaaccatatttttacaaagtttgtcatttgccccaaggtcaaattttaaattcttaattttcattttatttcccattttaggtaaaagtttgcatttaatcttagaattatgttatttttgttagtagtgtggaaacttagagaacttattgtatggtgccttgcaaaaatagagatagaaagattttagcatgcataccaatatagtatattacgcaatatataagcacacctaattaacagattaatatcagtaaaggtattgctgctggaatgaagaaaatgggatacgtttgtttctttttttctattgttacataattgccatgtggacttgtttatgattattgtgtagagtagcatttaagatttaactgtagcaaaaattactttaaccgctgtatttaagttagcatgttaattaattgtgtagacattttggcacaccatcacttttaactatatcataccaatggttttgtgcccataataaaaatggaaaaacctgttgaatgttacgtattggtatctttaatttcaacagtgggtaaactggtttcccagtatacaattcattgaaagcaaaattgattaattatttccatttaatttatacacactcaatacaaaatttaatgttgactttacgtaataaagtataatgcattttcttttttactgtttatgtatagtttacaaaataaagaatcttgtaacc

SEQ ID NO: 29586 - DNA, 1749 bp, Homo sapiens
  source 1..1749: mol_type = unassigned DNA
atttccagcaggagctgcgagcacagtgctggctcacaacaagatgctcaaggtgtcagccgtactgtgtgtgtgtgcagccgcttggtgcagtcagtctctcgcagctgccgcggcggtggctgcagccggggggcggtcggacggcggtaattttctggatgataaacaatggctcaccacaatctctcagtatgacaaggaagtcggacagtggaacaaattccgagactaagaagaaaaacgattatttgacaggacagtagtgatgatcacacaagatcacatccacatgtcttctgggctcagtcaggatgattatttccgcacttggagtccaggaaaacccttcgatcaggctttagatccagctaaggatccatgcttaaagatgaaatgtagtcgccataaagtatgcattgctcaagattctcagactgcagtctgcattagtcaccggaggcttacacacaggatgaaagaagcaggagtagaccataggcagtggaggggtcccatattatccacctgcaagcagtgcccagtggtctatcccagccctgtttgtggttcagatggtcatacctactcttttcagtgcaaactagaatatcaggcatgtgtcttaggaaaacagatctcagtcaaatgtgaaggacattgcccatgtccttcagataagcccaccagtacaagcagaaatgttaagagagcatgcagtgacctggagttcagggaagtggcaaacagattgcgggactggttcaaggcccttcatgaaagtggaagtcaaaacaagaagacaaaaacattgctgaggcctgagagaagcagattcgataccagcatcttgccaatttgcaaggactcacttggctggatgtttaacagacttgatacaaactatgacctgctattggaccagtcagagctcagaagcatttaccttgataagaatgaacagtgtaccaaggcattcttcaattcttgtgacacatacaaggacagtttaatatctaataatgagtggtgctactgcttccagagacagcaagacccaccttgccagactgagctcagcaatattcagaagcggcaaggggtaaagaagctcctaggacagtatatccccctgtgtgatgaagatggttactacaagccaacacaatgtcatggcagtgttggacagtgctggtgtgttgacagatatggaaatgaagtcatgggatccagaataaatggtgttgcagattgtgctatagattttgagatctccggagattttgctagtggcgattttcatgaatggactgatgatgaggatgatgaagacgatattatgaatgatgaagatgaaattgaagatgatgatgaagatgaaggggatgatgatgatggtggtgatgaccatgatgtatacatttgattgatgacagttgaaatcaataaattctacatttctaatatttacaaaaatgatagcctatttaaaattatcttcttccccaataacaaaatgattctaaacctcacatatattttgtataattatttgaaaaattgcagctaaagttatagaactttatgtttaaataagaatcatttgctttgagtttttatattccttacacaaaaagaaaatacatatgcagtctagtcagacaaaataaagttttgaagtgctactataataagtttttcacgagaacaaactttgtaaatcttccataagcaaaatgacagctagtg

SEQ ID NO: 29587 - DNA, 2180 bp, Homo sapiens
  source 1..2180: mol_type = unassigned DNA
cgcgccgggcgcagggagctgagtggacggctcgagacggcggcgcgtgcagcagctccagaaagcagcgagttggcagagcagggctgcatttccagcaggagctgcgagcacagtgctggctcacaacaagatgctcaaggtgtcagccgtactgtgtgtgtgtgcagccgcttggtgcagtcagtctctcgcagctgccgcggcggtggctgcagccggggggcggtcggacggcggtaattttctggatgataaacaatggctcaccacaatctctcagtatgacaaggaagtcggacagtggaacaaattccgagacgaagtagaggatgattatttccgcacttggagtccaggaaaacccttcgatcaggctttagatccagctaaggatccatgcttaaagatgaaatgtagtcgccataaagtatgcattgctcaagattctcagactgcagtctgcattagtcaccggaggcttacacacaggatgaaagaagcaggagtagaccataggcagtggaggggtcccatattatccacctgcaagcagtgcccagtggtctatcccagccctgtttgtggttcagatggtcatacctactcttttcagtgcaaactagaatatcaggcatgtgtcttaggaaaacagatctcagtcaaatgtgaaggacattgcccatgtccttcagataagcccaccagtacaagcagaaatgttaagagagcatgcagtgacctggagttcagggaagtggcaaacagattgcgggactggttcaaggcccttcatgaaagtggaagtcaaaacaagaagacaaaaacattgctgaggcctgagagaagcagattcgataccagcatcttgccaatttgcaaggactcacttggctggatgtttaacagacttgatacaaactatgacctgctattggaccagtcagagctcagaagcatttaccttgataagaatgaacagtgtaccaaggcattcttcaattcttgtgacacatacaaggacagtttaatatctaataatgagtggtgctactgcttccagagacagcaagacccaccttgccagactgagctcagcaatattcagaagcggcaaggggtaaagaagctcctaggacagtatatccccctgtgtgatgaagatggttactacaagccaacacaatgtcatggcagtgttggacagtgctggtgtgttgacagatatggaaatgaagtcatgggatccagaataaatggtgttgcagattgtgctatagattttgagatctccggagattttgctagtggcgattttcatgaatggactgatgatgaggatgatgaagacgatattatgaatgatgaagatgaaattgaagatgatgatgaagatgaaggggatgatgatgatggtggtgatgaccatgatgtatacatttgattgatgacagttgaaatcaataaattctacatttctaatatttacaaaaatgatagcctatttaaaattatcttcttccccaataacaaaatgattctaaacctcacatatattttgtataattatttgaaaaattgcagctaaagttatagaactttatgtttaaataagaatcatttgctttgagtttttatattccttacacaaaaagaaaatacatatgcagtctagtcagacaaaataaagttttgaagtgctactataataagtttttcacgagaacaaactttgtaaatcttccataagcaaaatgacagctagtgcttgggatcgtacatgttaattttctgaaagataattctaagtgaaatttaaaataaataaatttttaatgacctgggtcttaaggatttaggaaaaatatgcatgctttaattgcatttccaaagtagcatcttgctagacctagttgagtcaggataacagagagataccacatggcaagaaaaacaaagtgacaattgtagagtcctcaattgtgtttacattaatagtggtgtttttacctatgaaattattctggatctaataggacattttacaaaatggcaagtatggaaaaccatggattctgaaagttaaaaatttagttgttctccccaatgtgtattttaatttggatggcagtctcatgcagattttttaaaagattctttaataacatgatttgtttgcc

SEQ ID NO: 29588 - DNA, 2900 bp, Homo sapiens
  source 1..2900: mol_type = unassigned DNA
tcctctggctccagccaagcgtcctatccggagccaactgtagctgggatccagcgagaggaagatgctcaaggtgtcagccgtactgtgtgtgtgtgcagccgcttggtgcagtcagtctctcgcagctgccgcggcggtggctgcagccggggggcggtcggacggcggtaattttctggatgataaacaatggctcaccacaatctctcagtatgacaaggaagtcggacagtggaacaaattccgagacgatgattatttccgcacttggagtccaggaaaacccttcgatcaggctttagatccagctaaggatccatgcttaaagatgaaatgtagtcgccataaagtatgcattgctcaagattctcagactgcagtctgcattagtcaccggaggcttacacacaggatgaaagaagcaggagtagaccataggcagtggaggggtcccatattatccacctgcaagcagtgcccagtggtctatcccagccctgtttgtggttcagatggtcatacctactcttttcagtgcaaactagaatatcaggcatgtgtcttaggaaaacagatctcagtcaaatgtgaaggacattgcccatgtccttcagataagcccaccagtacaagcagaaatgttaagagagcatgcagtgacctggagttcagggaagtggcaaacagattgcgggactggttcaaggcccttcatgaaagtggaagtcaaaacaagaagacaaaaacattgctgaggcctgagagaagcagattcgataccagcatcttgccaatttgcaaggactcacttggctggatgtttaacagacttgatacaaactatgacctgctattggaccagtcagagctcagaagcatttaccttgataagaatgaacagtgtaccaaggcattcttcaattcttgtgacacatacaaggacagtttaatatctaataatgagtggtgctactgcttccagagacagcaagacccaccttgccagactgagctcagcaatattcagaagcggcaaggggtaaagaagctcctaggacagtatatccccctgtgtgatgaagatggttactacaagccaacacaatgtcatggcagtgttggacagtgctggtgtgttgacagatatggaaatgaagtcatgggatccagaataaatggtgttgcagattgtgctatagattttgagatctccggagattttgctagtggcgattttcatgaatggactgatgatgaggatgatgaagacgatattatgaatgatgaagatgaaattgaagatgatgatgaagatgaaggggatgatgatgatggtggtgatgaccatgatgtatacatttgattgatgacagttgaaatcaataaattctacatttctaatatttacaaaaatgatagcctatttaaaattatcttcttccccaataacaaaatgattctaaacctcacatatattttgtataattatttgaaaaattgcagctaaagttatagaactttatgtttaaataagaatcatttgctttgagtttttatattccttacacaaaaagaaaatacatatgcagtctagtcagacaaaataaagttttgaagtgctactataataagtttttcacgagaacaaactttgtaaatcttccataagcaaaatgacagctagtgcttgggatcgtacatgttaattttctgaaagataattctaagtgaaatttaaaataaataaatttttaatgacctgggtcttaaggatttaggaaaaatatgcatgctttaattgcatttccaaagtagcatcttgctagacctagttgagtcaggataacagagagataccacatggcaagaaaaacaaagtgacaattgtagagtcctcaattgtgtttacattaatagtggtgtttttacctatgaaattattctggatctaataggacattttacaaaatggcaagtatggaaaaccatggattctgaaagttaaaaatttagttgttctccccaatgtgtattttaatttggatggcagtctcatgcagattttttaaaagattctttaataacatgatttgtttgcctttctagatttctttatctttctgaccagcaacttagggagcagaatttaaattaggaagacaaagggaaagattcatttaaaccatatttttacaaagtttgtcatttgccccaaggtcaaattttaaattcttaattttcattttatttcccattttaggtaaaagtttgcatttaatcttagaattatgttatttttgttagtagtgtggaaacttagagaacttattgtatggtgccttgcaaaaatagagatagaaagattttagcatgcataccaatatagtatattacgcaatatataagcacacctaattaacagattaatatcagtaaaggtattgctgctggaatgaagaaaatgggatacgtttgtttctttttttctattgttacataattgccatgtggacttgtttatgattattgtgtagagtagcatttaagatttaactgtagcaaaaattactttaaccgctgtatttaagttagcatgttaattaattgtgtagacattttggcacaccatcacttttaactatatcataccaatggttttgtgcccataataaaaatggaaaaacctgttgaatgttacgtattggtatctttaatttcaacagtgggtaaactggtttcccagtatacaattcattgaaagcaaaattgattaattatttccatttaatttatacacactcaatacaaaatttaatgttgactttacgtaataaagtataatgcattttcttttttactgtttatgtatagtttacaaaataaagaatcttgtaacc

SEQ ID NO: 29589 - DNA, 505 bp, Homo sapiens
  source 1..505: mol_type = unassigned DNA
gtaaagcctgcggggaggggacacgcttgcctctgcttgtctcctcctccctctaccctcgtcgttgctaatgcatgttttccagggtcgctcctggcttcgtaccccttatttgacactgacatgcccccccaccccccgttgtgtctcctctcccagatgctcaaggtgtcagccgtactgtgtgtgtgtgcagccgcttggtgcagtcagtctctcgcagctgccgcggcggtggctgcagccggggggcggtcggacggcggtaattttctggatgataaacaatggctcaccacaatctctcagtatgacaaggaagtcggacagtggaacaaattccgagacgaagtagaggatgattatttccgcacttggagtccaggaaaacccttcgatcaggctttagatccagctaaggatccatgcttaaagatgaaatgtagtcgccataaagtatgcattgctcaagattctcagactgcagtctgcattagtcaccgga

SEQ ID NO: 29590 - DNA, 2947 bp, Homo sapiens
  source 1..2947: mol_type = unassigned DNA
acaaagcagataaggattcctaggctaggagctacctcgtcctctggctccagccaagcgtcctatccggagccaactgtagctgggatccagcgagaggaagatgctcaaggtgtcagccgtactgtgtgtgtgtgcagccgcttggtgcagtcagtctctcgcagctgccgcggcggtggctgcagccggggggcggtcggacggcggtaattttctggatgataaacaatggctcaccacaatctctcagtatgacaaggaagtcggacagtggaacaaattccgagacgaagtagaggatgattatttccgcacttggagtccaggaaaacccttcgatcaggctttagatccagctaaggatccatgcttaaagatgaaatgtagtcgccataaagtatgcattgctcaagattctcagactgcagtctgcattagtcaccggaggcttacacacaggatgaaagaagcaggagtagaccataggcagtggaggggtcccatattatccacctgcaagcagtgcccagtggtctatcccagccctgtttgtggttcagatggtcatacctactcttttcagtgcaaactagaatatcaggcatgtgtcttaggaaaacagatctcagtcaaatgtgaaggacattgcccatgtccttcagataagcccaccagtacaagcagaaatgttaagagagcatgcagtgacctggagttcagggaagtggcaaacagattgcgggactggttcaaggcccttcatgaaagtggaagtcaaaacaagaagacaaaaacattgctgaggcctgagagaagcagattcgataccagcatcttgccaatttgcaaggactcacttggctggatgtttaacagacttgatacaaactatgacctgctattggaccagtcagagctcagaagcatttaccttgataagaatgaacagtgtaccaaggcattcttcaattcttgtgacacatacaaggacagtttaatatctaataatgagtggtgctactgcttccagagacagcaagacccaccttgccagactgagctcagcaatattcagaagcggcaaggggtaaagaagctcctaggacagtatatccccctgtgtgatgaagatggttactacaagccaacacaatgtcatggcagtgttggacagtgctggtgtgttgacagatatggaaatgaagtcatgggatccagaataaatggtgttgcagattgtgctatagattttgagatctccggagattttgctagtggcgattttcatgaatggactgatgatgaggatgatgaagacgatattatgaatgatgaagatgaaattgaagatgatgatgaagatgaaggggatgatgatgatggtggtgatgaccatgatgtatacatttgattgatgacagttgaaatcaataaattctacatttctaatatttacaaaaatgatagcctatttaaaattatcttcttccccaataacaaaatgattctaaacctcacatatattttgtataattatttgaaaaattgcagctaaagttatagaactttatgtttaaataagaatcatttgctttgagtttttatattccttacacaaaaagaaaatacatatgcagtctagtcagacaaaataaagttttgaagtgctactataataagtttttcacgagaacaaactttgtaaatcttccataagcaaaatgacagctagtgcttgggatcgtacatgttaattttctgaaagataattctaagtgaaatttaaaataaataaatttttaatgacctgggtcttaaggatttaggaaaaatatgcatgctttaattgcatttccaaagtagcatcttgctagacctagttgagtcaggataacagagagataccacatggcaagaaaaacaaagtgacaattgtagagtcctcaattgtgtttacattaatagtggtgtttttacctatgaaattattctggatctaataggacattttacaaaatggcaagtatggaaaaccatggattctgaaagttaaaaatttagttgttctccccaatgtgtattttaatttggatggcagtctcatgcagattttttaaaagattctttaataacatgatttgtttgcctttctagatttctttatctttctgaccagcaacttagggagcagaatttaaattaggaagacaaagggaaagattcatttaaaccatatttttacaaagtttgtcatttgccccaaggtcaaattttaaattcttaattttcattttatttcccattttaggtaaaagtttgcatttaatcttagaattatgttatttttgttagtagtgtggaaacttagagaacttattgtatggtgccttgcaaaaatagagatagaaagattttagcatgcataccaatatagtatattacgcaatatataagcacacctaattaacagattaatatcagtaaaggtattgctgctggaatgaagaaaatgggatacgtttgtttctttttttctattgttacataattgccatgtggacttgtttatgattattgtgtagagtagcatttaagatttaactgtagcaaaaattactttaaccgctgtatttaagttagcatgttaattaattgtgtagacattttggcacaccatcacttttaactatatcataccaatggttttgtgcccataataaaaatggaaaaacctgttgaatgttacgtattggtatctttaatttcaacagtgggtaaactggtttcccagtatacaattcattgaaagcaaaattgattaattatttccatttaatttatacacactcaatacaaaatttaatgttgactttacgtaataaagtataatgcattttcttttttactgtttatgtatagtttacaaaataaagaatcttgtaac

SEQ ID NO: 29591 - DNA, 556 bp, Homo sapiens
  source 1..556: mol_type = unassigned DNA
gtgcccgctcgggctgctgcggctggggcttgcttccttatacccacctctcctcctctgggtctgcgtgtgtatgctcaaggtgtcagccgtactgtgtgtgtgtgcagccgcttggtgcagtcagtctctcgcagctgccgcggcggtggctgcagccggggggcggtcggacggcggtaattttctggatgataaacaatggctcaccacaatctctcagtatgacaaggaagtcggacagtggaacaaattccgagacgatgattatttccgcacttggagtccaggaaaacccttcgatcaggctttagatccagctaaggatccatgcttaaagatgaaatgtagtcgccataaagtatgcattgctcaagattctcagactgcagtctgcattagtcaccggaggcttacacacaggatgaaagaagcaggagtagaccataggcagtggaggggtcccatattatccacctgcaagcagtgcccagtggtctatcccagccctgtttgtggttcagatggtcatacctactcttttcagtgcaaacta

SEQ ID NO: 29592 - DNA, 563 bp, Homo sapiens
  source 1..563: mol_type = unassigned DNA
gcatttccagcaggagctgcgagcacagtgctggctcacaacaagatgctcaaggtgtcagccgtactgtgtgtgtgtgcagccgcttggtgcagtcagtctctcgcagctgccgcggcggtggctgcagccggggggcggtcggacggcggtaattttctggatgataaacaatggctcaccacaatctctcagtatgacaaggaagtcggacagtggaacaaattccgagacgatgattatttccgcacttggagtccaggaaaacccttcgatcaggcatgcagtgacctggagttcagggaagtggcaaacagattgcgggactggttcaaggcccttcatgaaagtggaagtcaaaacaagaagacaaaaacattgctgaggcctgagagaagcagattcgataccagcatcttgccaatttgcaaggactcacttggctggatgtttaacagacttgatacaaactatgacctgctattggaccagtcagagctcagaagcatttaccttgataagaatgaacagtgtaccaaggcattcttcaattcttgtgacac

SEQ ID NO: 29593 - DNA, 1963 bp, Homo sapiens
  source 1..1963: mol_type = unassigned DNA
gcatttccagcaggagctgcgagcacagtgctggctcacaacaagatgctcaaggtgtcagccgtactgtgtgtgtgtgcagccgcttggtgcagtcagtctctcgcagctgccgcggcggtggctgcagccggggggcggtcggacggcggtaattttctggatgataaacaatggctcaccacaatctctcagtatgacaaggaagtcggacagtggaacaaattccgagacgatgattatttccgcacttggagtccaggaaaacccttcgatcaggctttagatccagctaaggatccatgcttaaagatgaaatgtagtcgccataaagtatgcattgctcaagattctcagactgcagtctgcattagtcaccggaggcttacacacaggatgaaagaagcaggagtagaccataggcagtggaggggtcccatattatccacctgcaagcagtgcccagtggtctatcccagccctgtttgtggttcagatggtcatacctactcttttcagtgcaaactagaatatcaggcatgtgtcttaggaaaacagatctcagtcaaatgtgaaggacattgcccatgtccttcagataagcccaccagtacaagcagaaatgttaagagaggattcgataccagcatcttgccaatttgcaaggactcacttggctggatgtttaacagacttgatacaaactatgacctgctattggaccagtcagagctcagaagcatttaccttgataagaatgaacagtgtaccaaggcattcttcaattcttgtgacacatacaaggacagtttaatatctaataatgagtggtgctactgcttccagagacagcaagacccaccttgccagactgagctcagcaatattcagaagcggcaaggggtaaagaagctcctaggacagtatatccccctgtgtgatgaagatggttactacaagccaacacaatgtcatggcagtgttggacagtgctggtgtgttgacagatatggaaatgaagtcatgggatccagaataaatggtgttgcagattgtgctatagattttgagatctccggagattttgctagtggcgattttcatgaatggactgatgatgaggatgatgaagacgatattatgaatgatgaagatgaaattgaagatgatgatgaagatgaaggggatgatgatgatggtggtgatgaccatgatgtatacatttgattgatgacagttgaaatcaataaattctacatttctaatatttacaaaaatgatagcctatttaaaattatcttcttccccaataacaaaatgattctaaacctcacatatattttgtataattatttgaaaaattgcagctaaagttatagaactttatgtttaaataagaatcatttgctttgagtttttatattccttacacaaaaagaaaatacatatgcagtctagtcagacaaaataaagttttgaagtgctactataataagtttttcacgagaacaaactttgtaaatcttccataagcaaaatgacagctagtgcttgggatcgtacatgttaattttctgaaagataattctaagtgaaatttaaaataaataaatttttaatgacctgggtcttaaggatttaggaaaaatatgcatgctttaattgcatttccaaagtagcatcttgctagacctagttgagtcaggataacagagagataccacatggcaagaaaaacaaagtgacaattgtagagtcctcaattgtgtttacattaatagtggtgtttttacctatgaaattattctggatctaataggacattttacaaaatggcaagtatggaaaaccatggattctgaaagttaaaaatttagttgttctccccaatgtgtattttaatttggatggcagtctcatgcagattttttaaaagattctttaataacatgatttgtttgcc

SEQ ID NO: 29594 - DNA, 1768 bp, Homo sapiens
  source 1..1768: mol_type = unassigned DNA
gctaatgcatgttttccagggtcgctcctggcttcgtaccccttatttgacactgacatgcccccccaccccccgttgtgtctcctctcccagatgctcaaggtgtcagccgtactgtgtgtgtgtgcagccgcttggtgcagtcagtctctcgcagctgccgcggcggtggctgcagccggggggcggtcggacggcggtaattttctggatgataaacaatggctcaccacaatctctcagtatgacaaggaagtcggacagtggaacaaattccgagacgatgattatttccgcacttggagtccaggaaaacccttcgatcaggctttagatccagctaaggatccatgcttaaagatgaaatgtagtcgccataaagtatgcattgctcaagattctcagactgcagtctgcattagtcaccggaggcttacacacaggatgaaagaagcaggagtagaccataggcagtggaggggtcccatattatccacctgcaagcagtgcccagtggtctatcccagccctgtttgtggttcagatggtcatacctactcttttcagtgcaaactagaatatcaggcatgtgtcttaggaaaacagatctcagtcaaatgtgaaggacattgcccatgtccttcagataagcccaccagtacaagcagaaatgttaagagagcatgcagtgacctggagttcagggaagtggcaaacagattgcgggactggttcaaggcccttcatgaaagtggaagtcaaaacaagaagacaaaaacattgctgaggcctgagagaagcagattcgataccagcatcttgccaatttgcaaggactcacttggctggatgtttaacagacttgatacaaactatgacctgctattggaccagtcagagctcagaagcatttaccttgataagaatgaacagtgtaccaaggcattcttcaattcttgtgacacatacaaggacagtttaatatctaataatgagtggtgctactgcttccagagacagcaagacccaccttgccagactgagctcagcaatattcagaagcggcaaggggtaaagaagctcctaggacagtatatccccctgtgtgatgaagatggttactacaagccaacacaatgtcatggcagtgttggacagtgctggtgtgttgacagatatggaaatgaagtcatgggatccagaataaatggtgttgcagattgtgctatagattttgagatctccggagattttgctagtggcgattttcatgaatggactgatgatgaggatgatgaagacgatattatgaatgatgaagatgaaattgaagatgatgatgaagatgaaggggatgatgatgatggtggtgatgaccatgatgtatacatttgattgatgacagttgaaatcaataaattctacatttctaatatttacaaaaatgatagcctatttaaaattatcttcttccccaataacaaaatgattctaaacctcacatatattttgtataattatttgaaaaattgcagctaaagttatagaactttatgtttaaataagaatcatttgctttgagtttttatattccttacacaaaaagaaaatacatatgcagtctagtcagacaaaataaagttttgaagtgctactataataagtttttcacgagaacaaactttgtaaatcttccataagcaaaatgacagctagtgcttgggatcgtacatgttaattttctgaaagataattctaagtgaaattt

SEQ ID NO: 29595 - DNA, 2908 bp, Homo sapiens
  source 1..2908: mol_type = unassigned DNA
tcctctggctccagccaagcgtcctatccggagccaactgtagctgggatccagcgagaggaagatgctcaaggtgtcagccgtactgtgtgtgtgtgcagccgcttggtgcagtcagtctctcgcagctgccgcggcggtggctgcagccggggggcggtcggacggcggtaattttctggatgataaacaatggctcaccacaatctctcagtatgacaaggaagtcggacagtggaacaaattccgagacgaagtagaggatgattatttccgcacttggagtccaggaaaacccttcgatcaggctttagatccagctaaggatccatgcttaaagatgaaatgtagtcgccataaagtatgcattgctcaagattctcagactgcagtctgcattagtcaccggaggcttacacacaggatgaaagaagcaggagtagaccataggcagtggaggggtcccatattatccacctgcaagcagtgcccagtggtctatcccagccctgtttgtggttcagatggtcatacctactcttttcagtgcaaactagaatatcaggcatgtgtcttaggaaaacagatctcagtcaaatgtgaaggacattgcccatgtccttcagataagcccaccagtacaagcagaaatgttaagagagcatgcagtgacctggagttcagggaagtggcaaacagattgcgggactggttcaaggcccttcatgaaagtggaagtcaaaacaagaagacaaaaacattgctgaggcctgagagaagcagattcgataccagcatcttgccaatttgcaaggactcacttggctggatgtttaacagacttgatacaaactatgacctgctattggaccagtcagagctcagaagcatttaccttgataagaatgaacagtgtaccaaggcattcttcaattcttgtgacacatacaaggacagtttaatatctaataatgagtggtgctactgcttccagagacagcaagacccaccttgccagactgagctcagcaatattcagaagcggcaaggggtaaagaagctcctaggacagtatatccccctgtgtgatgaagatggttactacaagccaacacaatgtcatggcagtgttggacagtgctggtgtgttgacagatatggaaatgaagtcatgggatccagaataaatggtgttgcagattgtgctatagattttgagatctccggagattttgctagtggcgattttcatgaatggactgatgatgaggatgatgaagacgatattatgaatgatgaagatgaaattgaagatgatgatgaagatgaaggggatgatgatgatggtggtgatgaccatgatgtatacatttgattgatgacagttgaaatcaataaattctacatttctaatatttacaaaaatgatagcctatttaaaattatcttcttccccaataacaaaatgattctaaacctcacatatattttgtataattatttgaaaaattgcagctaaagttatagaactttatgtttaaataagaatcatttgctttgagtttttatattccttacacaaaaagaaaatacatatgcagtctagtcagacaaaataaagttttgaagtgctactataataagtttttcacgagaacaaactttgtaaatcttccataagcaaaatgacagctagtgcttgggatcgtacatgttaattttctgaaagataattctaagtgaaatttaaaataaataaatttttaatgacctgggtcttaaggatttaggaaaaatatgcatgctttaattgcatttccaaagtagcatcttgctagacctagttgagtcaggataacagagagataccacatggcaagaaaaacaaagtgacaattgtagagtcctcaattgtgtttacattaatagtggtgtttttacctatgaaattattctggatctaataggacattttacaaaatggcaagtatggaaaaccatggattctgaaagttaaaaatttagttgttctccccaatgtgtattttaatttggatggcagtctcatgcagattttttaaaagattctttaataacatgatttgtttgcctttctagatttctttatctttctgaccagcaacttagggagcagaatttaaattaggaagacaaagggaaagattcatttaaaccatatttttacaaagtttgtcatttgccccaaggtcaaattttaaattcttaattttcattttatttcccattttaggtaaaagtttgcatttaatcttagaattatgttatttttgttagtagtgtggaaacttagagaacttattgtatggtgccttgcaaaaatagagatagaaagattttagcatgcataccaatatagtatattacgcaatatataagcacacctaattaacagattaatatcagtaaaggtattgctgctggaatgaagaaaatgggatacgtttgtttctttttttctattgttacataattgccatgtggacttgtttatgattattgtgtagagtagcatttaagatttaactgtagcaaaaattactttaaccgctgtatttaagttagcatgttaattaattgtgtagacattttggcacaccatcacttttaactatatcataccaatggttttgtgcccataataaaaatggaaaaacctgttgaatgttacgtattggtatctttaatttcaacagtgggtaaactggtttcccagtatacaattcattgaaagcaaaattgattaattatttccatttaatttatacacactcaatacaaaatttaatgttgactttacgtaataaagtataatgcattttcttttttactgtttatgtatagtttacaaaataaagaatcttgtaac

SEQ ID NO: 29596 - DNA, 505 bp, Homo sapiens; identical to SEQ ID NO: 29589
  source 1..505: mol_type = unassigned DNA

SEQ ID NO: 29597 - DNA, 1456 bp, Homo sapiens
  source 1..1456: mol_type = unassigned DNA
ctcgagacggcggcgcgtgcagcagctccagaaagcagcgagttggcagagcagggctgcatttccagcaggagctgcgagcacagtgctggctcacaacaagatgctcaaggtgtcagccgtactgtgtgtgtgtgcagccgcttggtgcagtcagtctctcgcagctgccgcggcggtggctgcagccggggggcggtcggacggcggtaattttctggatgataaacaatggctcaccacaatctctcagtatgacaaggaagtcggacagtggaacaaattccgagacgatgattatttccgcacttggagtccaggaaaacccttcgatcaggctttagatccagctaaggatccatgcttaaagatgaaatgtagtcgccataaagtatgcattgctcaagattctcagactgcagtctgcattagtcaccggaggcttacacacaggatgaaagaagcaggagtagaccataggcagtggaggggtcccatattatccacctgcaagcagtgcccagtggtctatcccagccctgtttgtggttcagatggtcatacctactcttttcagtgcaaactagaatatcaggcatgtgtcttaggaaaacagatctcagtcaaatgtgaaggacattgcccatgtccttcagataagcccaccagtacaagcagaaatgttaagagagcatgcagtgacctggagttcagggaagtggcaaacagattgcgggactggttcaaggcccttcatgaaagtggaagtcaaaacaagaagacaaaaacattgctgaggcctgagagaagcagattcgataccagcatcttgccaatttgcaaggactcacttggctggatgtttaacagacttgatacaaactatgacctgctattggaccagtcagagctcagaagcatttaccttgataagaatgaacagtgtaccaaggcattcttcaattcttgtgacacatacaaggacagtttaatatctaataatgagtggtgctactgcttccagagacagcaaggtaaaagatgagacccttacagacgcaaatagttgacctgcatgtcaaattttacttattttttaagaaaataaaacagtacactatgctcattcattttgtgtatgtttttgtaattcaagtgttgaataaaagagcaaataagaagcatgttgaacaaataactctgccagagatacaacacatgctaaataagatgaaaaatagtaattaatattttgtattaatgccactacattatagtttccattatgagccaccaagaagcacacagaaatattaagaacttagatactgaaagtaatcattaaaattaatttgctatctgctttgcccacaatgtaaaataaatggattttttatcactatacggtggagttttaatgttctattttgtgatcttattaaatgagttgaatgaa

SEQ ID NO: 29598 - DNA, 1457 bp, Homo sapiens
  source 1..1457: mol_type = unassigned DNA
tttccagcaggagctgcgagcacagtgctggctcacaacaagatgctcaaggtgtcagccgtactgtgtgtgtgtgcagccgcttggtgcagtcagtctctcgcagctgccgcggcggtggctgcagccggggggcggtcggacggcggtaattttctggatgataaacaatggctcaccacaatctctcagtatgacaaggaagtcggacagtggaacaaattccgagactgcaaactagaatatcaggcatgtgtcttaggaaaacagatctcagtcaaatgtgaaggacattgcccatgtccttcagataagcccaccagtacaagcagaaatgttaagagagcatgcagtgacctggagttcagggaagtggcaaacagattgcgggactggttcaaggcccttcatgaaagtggaagtcaaaacaagaagacaaaaacattgctgaggcctgagagaagcagattcgataccagcatcttgccaatttgcaaggactcacttggctggatgtttaacagacttgatacaaactatgacctgctattggaccagtcagagctcagaagcatttaccttgataagaatgaacagtgtaccaaggcattcttcaattcttgtgacacatacaaggacagtttaatatctaataatgagtggtgctactgcttccagagacagcaagacccaccttgccagactgagctcagcaatattcagaagcggcaaggggtaaagaagctcctaggacagtatatccccctgtgtgatgaagatggttactacaagccaacacaatgtcatggcagtgttggacagtgctggtgtgttgacagatatggaaatgaagtcatgggatccagaataaatggtgttgcagattgtgctatagattttgagatctccggagattttgctagtggcgattttcatgaatggactgatgatgaggatgatgaagacgatattatgaatgatgaagatgaaattgaagatgatgatgaagatgaaggggatgatgatgatggtggtgatgaccatgatgtatacatttgattgatgacagttgaaatcaataaattctacatttctaatatttacaaaaatgatagcctatttaaaattatcttcttccccaataacaaaatgattctaaacctcacatatattttgtataattatttgaaaaattgcagctaaagttatagaactttatgtttaaataagaatcatttgctttgagtttttatattccttacacaaaaagaaaatacatatgcagtctagtcagacaaaataaagttttgaagtgctactataataagtttttcacgagaacaaactttgtaaatcttccataagcaaaatgacagctagtgcttgggatcgtacatgttaattttctgaaagataattctaagtgaaatttaaaataaataaatttttaatgacct

SEQ ID NO: 29599 - DNA, 1023 bp, Homo sapiens
  source 1..1023: mol_type = unassigned DNA
atgataaacaatggctcaccacaatctctcagtatgacaaggaagtcggacagtggaacaaattccgagacgatgaaagaagcaggagtagaccataggcagtggaggggtcccatattatccacctgcaagcagtgcccagtggtctatcccagccctgtttgtggttcagatggtcatacctactcttttcagtgcaaactagaatatcaggcatgtgtcttaggaaaacagatctcagtcaaatgtgaaggacattgcccatgtccttcagataagcccaccagtacaagcagaaatgttaagagagcatgcagtgacctggagttcagggaagtggcaaacagattgcgggactggttcaaggcccttcatgaaagtggaagtcaaaacaagaagacaaaaacattgctgaggcctgagagaagcagattcgataccagcatcttgccaatttgcaaggactcacttggctggatgtttaacagacttgatacaaactatgacctgctattggaccagtcagagctcagaagcatttaccttgataagaatgaacagtgtaccaaggcattcttcaattcttgtgacacatacaaggacagtttaatatctaataatgagtggtgctactgcttccagagacagcaagacccaccttgccagactgagctcagcaatattcagaagcggcaaggggtaaagaagctcctaggacagtatatccccctgtgtgatgaagatggttactacaagccaacacaatgtcatggcagtgttggacagtgctggtgtgttgacagatatggaaatgaagtcatgggatccagaataaatggtgttgcagattgtgctatagattttgagatctccggagattttgctagtggcgattttcatgaatggactgatgatgaggatgatgaagacgatattatgaatgatgaagatgaaattgaagatgatgatgaagatgaaggggatgatgatgatggtggtgatgaccatgatgtatacatttga

SEQ ID NO: 29600 - DNA, 1398 bp, Homo sapiens
  source 1..1398: mol_type = unassigned DNA
ttttctggatgataaacaatggctcaccacaatctctcagtatgacaaggaagtcggacagtggaacaaattccgagacgatgattatttccgcacttggagtccaggaaaacccttcgatcaggctttagatccagctaaggatccatgcttaaagatgaaatgtagtcgccataaagtatgcattgctcaagattctcagactgcagtctgcattagtcaccggaggcttacacacaggatgaaagaagcaggagtagaccataggcagtggaggggtcccatattatccacctgcaagcagtgcccagtggtctatcccagccctgtttgtggttcagatggtcatacctactcttttcagtgcaaactagaatatcaggcatgtgtcttaggaaaacagatctcagtcaaatgtgaaggacattgcccatgtccttcagataagcccaccagtacaagcagaaatgttaagagaggattcgataccagcatcttgccaatttgcaaggactcacttggctggatgtttaacagacttgatacaaactatgacctgctattggaccagtcagagctcagaagcatttaccttgataagaatgaacagtgtaccaaggcattcttcaattcttgtgacacatacaaggacagtttaatatctaataatgagtggtgctactgcttccagagacagcaagacccaccttgccagactgagctcagcaatattcagaagcggcaaggggtaaagaagctcctaggacagtatatccccctgtgtgatgaagatggttactacaagccaacacaatgtcatggcagtgttggacagtgctggtgtgttgacagatatggaaatgaagtcatgggatccagaataaatggtgttgcagattgtgctatagattttgagatctccggagattttgctagtggcgattttcatgaatggactgatgatgaggatgatgaagacgatattatgaatgatgaagatgaaattgaagatgatgatgaagatgaaggggatgatgatgatggtggtgatgaccatgatgtatacatttgattgatgacagttgaaatcaataaattctacatttctaatatttacaaaaatgatagcctatttaaaattatcttcttccccaataacaaaatgattctaaacctcacatatattttgtataattatttgaaaaattgcagctaaagttatagaactttatgtttaaataagaatcatttgctttgagtttttatattccttacacaaaaagaaaatacatatgcagtctagtcagacaaaataaagttttgaagtgctactataataagtttttcacgagaacaaactttgtaaatcttccataagcaaaatgacagctagtgctt

SEQ ID NO: 29601 - DNA, 1700 bp, Homo sapiens
  source 1..1700: mol_type = unassigned DNA
gtgcccgctcgggctgctgcggctggggcttgcttccttatacccacctctcctcctctgggtctgcgtgtgtatgctcaaggtgtcagccgtactgtgtgtgtgtgcagccgcttggtgcagtcagtctctcgcagctgccgcggcggtggctgcagccggggggcggtcggacggcggtaattttctggatgataaacaatggctcaccacaatctctcagtatgacaaggaagtcggacagtggaacaaattccgagacgatgattatttccgcacttggagtccaggaaaacccttcgatcagggatgaaagaagcaggagtagaccataggcagtggaggggtcccatattatccacctgcaagcagtgcccagtggtctatcccagccctgtttgtggttcagatggtcatacctactcttttcagtgcaaactagaatatcaggcatgtgtcttaggaaaacagatctcagtcaaatgtgaaggacattgcccatgtccttcagataagcccaccagtacaagcagaaatgttaagagagcatgcagtgacctggagttcagggaagtggcaaacagattgcgggactggttcaaggcccttcatgaaagtggaagtcaaaacaagaagacaaaaacattgctgaggcctgagagaagcagattcgataccagcatcttgccaatttgcaaggactcacttggctggatgtttaacagacttgatacaaactatgacctgctattggaccagtcagagctcagaagcatttaccttgataagaatgaacagtgtaccaaggcattcttcaattcttgtgacacatacaaggacagtttaatatctaataatgagtggtgctactgcttccagagacagcaagacccaccttgccagactgagctcagcaatattcagaagcggcaaggggtaaagaagctcctaggacagtatatccccctgtgtgatgaagatggttactacaagccaacacaatgtcatggcagtgttggacagtgctggtgtgttgacagatatggaaatgaagtcatgggatccagaataaatggtgttgcagattgtgctatagattttgagatctccggagattttgctagtggcgattttcatgaatggactgatgatgaggatgatgaagacgatattatgaatgatgaagatgaaattgaagatgatgatgaagatgaaggggatgatgatgatggtggtgatgaccatgatgtatacatttgattgatgacagttgaaatcaataaattctacatttctaatatttacaaaaatgatagcctatttaaaattatcttcttccccaataacaaaatgattctaaacctcacatatattttgtataattatttgaaaaattgcagctaaagttatagaactttatgtttaaataagaatcatttgctttgagtttttatattccttacacaaaaagaaaatacatatgcagtctagtcagacaaaataaagttttgaagtgctactataataagtttttcacgagaacaaactttgtaaatcttccataagcaaaatgacagctagtgcttgggatcgtacatgttaattttctgaaagataattctaagtgaaatttaaaataaataaatttttaatgacctgggtcttaaggatttaggaaaaatatgcatgctttaattgca

SEQ ID NO: 29602 - DNA, 1017 bp, Homo sapiens
  source 1..1017: mol_type = unassigned DNA
atgctcaaggtgtcagccgtactgtgtgtgtgtgcagccgcttggtgcagtcagtctctcgcagctgccgcggcggtggctgcagccggggggcggtcggacggcggtaattttctggatgataaacaatggctcaccacaatctctcagtatgacaaggaagtcggacagtggaacaaattccgagactgcaaactagaatatcaggcatgtgtcttaggaaaacagatctcagtcaaatgtgaaggacattgcccatgtccttcagataagcccaccagtacaagcagaaatgttaagagagcatgcagtgacctggagttcagggaagtggcaaacagattgcgggactggttcaaggcccttcatgaaagtggaagtcaaaacaagaagacaaaaacattgctgaggcctgagagaagcagattcgataccagcatcttgccaatttgcaaggactcacttggctggatgtttaacagacttgatacaaactatgacctgctattggaccagtcagagctcagaagcatttaccttgataagaatgaacagtgtaccaaggcattcttcaattcttgtgacacatacaaggacagtttaatatctaataatgagtggtgctactgcttccagagacagcaagacccaccttgccagactgagctcagcaatattcagaagcggcaaggggtaaagaagctcctaggacagtatatccccctgtgtgatgaagatggttactacaagccaacacaatgtcatggcagtgttggacagtgctggtgtgttgacagatatggaaatgaagtcatgggatccagaataaatggtgttgcagattgtgctatagattttgagatctccggagattttgctagtggcgattttcatgaatggactgatgatgaggatgatgaagacgatattatgaatgatgaagatgaaattgaagatgatgatgaagatgaaggggatgatgatgatggtggtgatgaccatgatgtatacatttga

SEQ ID NO: 29603 - DNA, 15324 bp, Homo sapiens
  source 1..15324: mol_type = unassigned DNA
tatcctgagaacttccatgggtcgctggatcagcaggcaaccattatcagactggagagtcatactttaaggaatacaaatgcaacacacgacaatgtttcctgacatcagatgatgaatggacactgaagggaaaaacaggctttttttccacctggcaggaagagctgaacttggagtacacatttaaaggaagcacagagggaagacttaaacagaagaaagaagcgtactttcatggttttcacaaacaaatatcccaggagaagtgatcatggagaccaaggagaacaggtgggtcccggtgaccgtgctccccggctgcgtgggctgcaggaccgtcgcggcgctggcgtcctggaccgtgcgcgatgtgaaggaacgtatcttcgcggagactggcttcccggtgtcggagcagcggctgtggcgcggcggccgcgagttatctgactggatcaagattggagatctgacttccaaaaattgtcatctttttgtaaaccttcaatcaaaaggcttaaaagggggaggtcgatttggtcagacaacgccaccacttgttgattttctcaaggacattttgagaagatatccagaaggaggacagattcttaaggaattaattcagaatgcagaagatgctggggcgacagaagttaaatttttatatgatgaaactcaatacggaacagagactctttggtcaaaagatatggcgccatatcaggggccagctctctatgtgtacaacaacgcggttttcaccccagaggactggcacggcattcaagaaatagcaagaagcaggaaaaaggatgatcctctgaaggtcggaagatttggaattgggtttaattctgtctatcatataacagatgttccttgtatctttagtggtgaccaaatcgggatgctagatcctcatcaaacactttttggcccacatgaatcaggccaatgttggaatctcaaagatgacagcaaagaaattagtgaactttcagaccagtttgcaccatttgttggcatttttggaagcaccaaggaaacatttataaacggcaattttccaggaacatttttccgtttccctcttcgcctacaaccttcacaacttagtagtaacctctacaataagcagaaggttcttgagttgtttgagtcttttagggcagatgcagacacagtgctgctctttctgaaaagtgtgcaggatgtttccttatatgtccgagaggctgacggaacagagaaactggtgtttagagtgacttcgagtgagagtaaggcactgaaacatgagcggccgaattctataaagattctgggaactgctataagtaactattgtaaaaagactccaagcaataacatcacctgtgtaacatatcacgtaaatattgttttagaagaggagagtactaaggatgcacagaaaacatcttggttggtgtgtaacagtgtgggtgggcgagggatcagtagtaagcttgactctttagctgatgaactgaaatttgtcccaatcattggaatagccatgcctttatcaagcagagatgatgaagcaaaaggagcaacgtctgatttctcaggaaaagcattttgtttccttcctttaccacctggtgaggaaagcagcacaggcctcccagttcacatcagtgggttctttggccttactgataaccgcaggagcataaaatggagagagctggaccagtggagagacccggcagccttatggaatgagtttcttgtcatgaatgttgtccccaaagcttatgctactctgatcttagattcaataaaacgtctggagatggaaaagagctctgatttccccttgtcagttgatgttatctataagctttggccggaggcgagcaaagtcaaggtgcactggcaaccggtgttagagcctctattcagcgagctgttgcagaatgcagtgatttattcaattagctgtgactgggtcaggttggagcaggtgtacttctcagaacttgatgaaaatttagaatacacaaaaactgtgctcaactacctccagagctcagggaagcagattgccaaggtaccagggaatgtggatgctgctgttcagctcacagctgcctctggcacaacacctgtgaggaaggtgacgcccgcgtgggtgcggcaggtgctgcggaagtgtgcacacctgggctgtgctgaagaaaagcttcaccttctagaatttgtgctttctgaccaagcctacagtgagctgcttgggctggagctgctccctttacaaaatggcaattttgtccccttctcctcatctgtatcagaccaagatgtcatttatattacctcagcagaatatccaaggtcccttttcccaagtcttgaaggaagatttattttggataacttgaaacctcaccttgtggctgctttaaaggaagctgcccaaacccgaggaagaccatgtactcagctgcagcttctaaatccagaacgatttgcacgtcttatcaaggaagtaatgaatacattctggcctggcagagaattgattgttcaatggtatccatttgatgaaaacagaaatcacccatctgtttcatggcttaagatggtttggaaaaatctttatatacatttttcagaggatttgactttatttgatgagatgccacttatccccagaactatactagaggaaggtcagacatgtgtggaactcattagactcaggattccatcgttagtcattttagacgatgaatctgaagcacagcttccagaatttttagcagacattgtacaaaaacttggagggtttgtccttaaaaaattagatgcatctatacaacatccgcttattaaaaaatatattcattcaccattaccaagtgctgttttgcagataatggagaagatgccattgcagaaattgtgtaatcaaataacttcgctacttccaacacacaaagatgccctgaggaagttcttggctagtttaaccgatagcagtgagaaagagaaaagaattattcaagaattggcaatattcaagcgcattaaccattcttctgatcagggaatttcctcttatacaaaattgaaaggttgtaaagtcttacaccatactgccaaactcccagcagatctgcgactttctatttcagtaatagacagtagtgatgaagctactattcgtctggcaaacatgttgaaaatagaacagttaaagaccactagctgcttaaagcttgttttaaaagatattgaaaatgcattttattcacatgaagaggtaacacagcttatgttatgggtccttgagaatctatcttctcttaaaaatgagaatccaaatgtgcttgagtggttaacaccattaaaattcatccagatatcacaggaacagatggtatcagctggtgaactctttgaccctgatatagaagtactaaaggatctcttttgtaatgaagaaggaacctatttcccaccctcagtttttacctcaccagatattcttcactccttaagacagattggtttaaaaaacgaagccagtctcaaagaaaaggatgttgtgcaagtggcaaaaaaaattgaagccttacaggtcggtgcttgtcctgatcaagatgttcttctgaagaaagccaaaaccctcttactggttttaaataagaatcacacactgttgcaatcatctgaaggaaagatgacattgaagaaaataaaatgggttccagcctgcaaggaaaggcctccaaattatccaggctctttggtctggaaaggagatctctgtaatctctgtgcaccaccagatatgtgtgatgtaggccatgcaattctcattggctcctcacttcctcttgttgaaagtatccatgtaaacctggaaaaagcattagggatcttcacaaaacctagccttagtgctgtcttaaaacactttaaaattgttgttgattggtattcttcaaaaacctttagtgatgaagactactatcaattccagcatattttgcttgagatttacggattcatgcatgatcatctaaatgaagggaaagattcttttagagccttaaaatttccatgggtttggactggcaaaaagttttgtccacttgcccaggctgtgattaaaccaatccatgatcttgaccttcagccttatttgcataatgtacctaaaaccatggcaaaattccaccaactatttaaggtctgtggttcaatagaggagttgacatcagatcatatttccatggttattcagaagatatatctcaaaagtgaccaagatctcagtgaacaagaaagcaaacaaaatcttcatcttatgttgaatattatcagatggctgtatagcaatcagattccagcaagccccaacacaccagttcctatacatcatagcaaaaatccttctaaacttatcatgaagccaattcacgaatgctgttattgtgacattaaagttgatgaccttaatgacttacttgaagattctgtggaaccaatcattttggtgcatgaggacatacccatgaaaactgcagaatggctaaaagttccatgccttagtacaagactgataaatcctgaaaacatgggatttgagcagtcaggacaaagagagccacttactgtaagaattaaaaatattctggaagaatacccttcagtgtcagatatttttaaagaactacttcaaaacgctgatgatgcaaatgcaacagaatgcagtttcttgattgatatgagaagaaatatggacataagagagaatctcctagacccagggatggcagcttgtcatggacctgctttgtggtcattcaacaattctcaattctcagattcagattttgtgaacataactaggttaggagaatctttaaaaaggggagaagttgacaaagttggaaaatttggtcttggatttaattctgtgtaccatatcactgacattcccatcattatgagtcgggaattcatgataatgttcgatccaaacataaatcatatcagtaaacacattaaagacaaatccaatcctgggatcaaaattaattggagtaaacaacagaaaagacttagaaaatttcctaatcagttcaaaccatttatagatgtatttggctgtcagttacctttgactgtagaagcaccttacagctataatggaacccttttccgactgtcctttagaactcaacaggaagcaaaagtgagtgaagttagtagtacgtgctacaatacagcagatatttattctcttgtggatgaatttagtctctgtggacacaggcttatcattttcactcagagtgtaaagtcaatgtatttgaagtacttgaaaattgaggaaaccaaccccagtttagcacaagatacagtaataattaaaaaaaaatcctgctcttccaaagcattgaacacacctgtcttaagtgttttaaaagaggctgctaagctcatgaagacttgcagcagcagtaataaaaagcttcccagtgatgaaccaaagtcatcttgcattcttcagatcacagtggaagaatttcaccatgtgttcagaaggattgctgatttacagtcgccactttttagaggtccagatgatgacccagctgctctctttgaaatggctaagtctggccaatcaaaaaagccatcagatgagttgtcacagaaaacagtagagtgtaccacgtggcttctgtgtacttgcatggacacaggagaggctctgaagttttccctgagtgagagtggaagaagactaggactggttccatgtggggcagtaggagttcagctgtcagaaatccaggaccagaagtggacagtgaaaccacacattggagaggtgttttgctatttacctttacgaataaaaacaggcttgccagttcatatcaatgggtgctttgctgttacatcaaataggaaagaaatctggaaaacagatacaaaaggacgatggaataccacgttcatgagacatgttattgtgaaagcttacttacaggtactgagtgtcttacgggacctggccactagtggggagctaatggattatacttactatgcagtatggcccgatcctgatttagttcatgatgatttttctgtaatttgccaaggattttatgaagatatagctcatggaaaagggaaagaactgaccaaagtcttctctgatggatctacttgggtttccatgaagaacgtaagatttctagatgactctatacttaaaagaagagatgttggttcagcagccttcaagatatttttgaaatacctcaagaagactgggtccaaaaacctttgtgctgttgaacttccttcttcggtaaaattaggatttgaagaagctggctgcaaacagatactacttgaaaacacattttcagagaaacagtttttttctgaagtgttttttccaaatattcaagaaattgaagcagaacttagagatcctttaatgatctttgttctaaatgaaaaagttgatgagttctcgggagttcttcgtgttactccatgtattccttgttccttggaggggcatcctttggttttgccatcaagattgatccaccccgaaggacgagttgcaaagttatttgatattaaagatgggagattcccttatggttctactcaggattatctcaatcctattattttgattaaactagttcagttaggtatggcaaaagatgatattttatgggatgatatgctagaacgtgcagtgtcagtagctgaaattaataaaagtgatcatgttgctgcatgcctaagaagtagtatcttattgagtcttatcgatgagaaactaaaaataagggatcctagagcaaaggattttgctgcaaaatatcaaacaatccgcttccttccatttctgacaaaaccagcaggtttttctttggactggaaaggcaacagttttaagcctgaaaccatgtttgcagcaactgacctttatacagctgaacatcaagatatagtttgtcttttgcaaccaattctaaatgaaaattcccattcttttagaggttgtggttcagtgtcattggctgttaaagagtttttgggattactcaagaagccaacagttgatctggttataaaccaattgaaagaagtagcaaaatcagttgatgatggaattacactgtaccaggagaatatcaccaatgcttgctacaaataccttcatgaagccttgatgcaaaatgaaatcactaagatgtcaattattgataagttaaaaccctttagcttcattctagttgagaatgcatatgttgactcagaaaaggtttcttttcatttaaattttgaggcggcaccatacctttatcagttgcctaataagtataaaaataatttccgcgaactttttgaaaccgtgggtgtgaggcagtcatgcactgttgaagattttgctcttgttttggaatctattgatcaagaaagaggaacaaagcaaataacagaagagaattttcagctttgccgacgaataatcagtgaaggaatatggagtctcattagagaaaagaaacaagaattttgtgagaaaaattatggcaagatattattgccagatactaatcttatgcttctccctgctaaatcgttatgctacaatgattgcccttggataaaagtaaaggataccactgtaaaatattgtcatgctgacatacccagggaagtagcagtaaaactaggagcagtcccaaagcgacacaaagccttagaaagatatgcatccaatgtctgttttacaacacttggcacagaatttgggcagaaagaaaaattgaccagcagaattaagagcatccttaatgcatatccttctgaaaaggaaatgttgaaagagcttcttcaaaatgctgatgatgcaaaggcgacagaaatctgttttgtgtttgatcctagacagcatccagttgatagaatatttgatgataagtgggccccattgcaagggccagcactttgtgtgtacaacaaccagccatttacagaagatgatgttagaggaattcagaatcttggaaaaggcacgaaagagggaaatccttataaaactggacagtatggaataggattcaattctgtgtatcatatcacagactgcccatcttttatttctggcaatgacatcctgtgtatttttgatcctcatgccagatatgcaccaggggccacatccattagtcccggacgcatgtttagagatttggatgcagattttaggacacagttctcagatgttctggatctttatctgggaacccattttaaactggataattgcacaatgttcagatttcctcttcgtaatgcagaaatggcaaaagtttcggaaatttcgtctgttccagcatcagacagaatggtccagaatcttttggacaaactgcgctcagatggggcagaacttctaatgtttcttaatcacatggaaaaaatttctatttgtgaaatagataagagtactggagctctaaatgtgctgtattcagtaaagggcaaaatcacagatggagacagattgaaaaggaaacaatttcatgcatctgtaattgatagtgttactaaaaagaggcagctcaaagacataccagttcaacaaataacctatactatggatactgaggactctgaaggaaatcttactacgtggctaatttgtaatagatcaggcttttcaagtatggagaaagtatctaaaagtgtcatatcagctcacaagaaccaagatattactcttttcccacgtggtggagtagctgcctgcattactcacaactataaaaaaccccatagggccttctgttttttgcctctttctttggagactgggctgccatttcatgtgaatggccactttgcactggattcagccagaaggaacctgtggcgtgatgataatggagttggtgttcgaagtgactggaataacagtttaatgacagcattaatagctcctgcatatgttgaattgctaatacagttaaaaaaacggtatttccctggttctgatccaacattatcagtgttacagaacacccctattcatgttgtaaaggacactttaaagaagtttttatcgtttttcccagttaaccgtcttgatctacagccagatttatattgtctagtgaaagcactttacaattgcattcacgaagacatgaaacgtcttttacctgttgtgcgggctccaaatattgatggctctgacttgcactctgcagttataattacttggatcaatatgtctacttctaataaaactagaccattttttgacaatttactacaggatgaattacaacaccttaaaaatgcagattataatatcaccacacgcaaaacagtagcagagaatgtctataggctgaaacatctccttttagaaattggtttcaacttggtttataactgtgatgaaactgctaatctttaccactgtcttatagatgcagatattcctgttagttatgtgacccctgctgatatcagatcttttttaatgacattttcctctcctgacactaattgccatattgggaagctgccttgtcgtctgcagcagactaatctaaaactttttcatagtttaaaacttttagttgattattgttttaaagatgcagaagaaaatgagattgaagttgagggattgccccttctcatcacactggacagtgttttgcaaacttttgatgcaaaacgacccaagtttctaacaacatatcatgaattgattccatcccgcaaagacttgtttatgaatacattatatttgaaatatagtaatattttattgaactgtaaagttgcaaaagtgtttgacatttccagctttgctgatttgttatcctctgtgttgcctcgagaatataagaccaaaagttgcacaaagtggaaagacaattttgcaagtgagtcttggcttaagaatgcatggcattttattagtgaatctgtaagtgtgaaagaagatcaggaagaaacaaaaccaacatttgacattgttgttgatactctaaaagactgggcattgcttccaggaacaaagtttactgtttcagccaaccagcttgtggttcctgaaggagatgttctgcttcctctcagccttatgcacattgcagtttttccaaatgcccagagtgataaagtttttcatgctctaatgaaagctggctgtattcagcttgctttgaacaaaatctgttccaaagacagtgcatttgttcctttgttgtcatgtcacacagcaaatatagagagccccacaagcatcttgaaggctctacattatatggtccaaacttcaacatttagagcagaaaaattagtagaaaatgattttgaggcacttttgatgtatttcaactgcaatttgaatcatttgatgtcccaagatgatataaaaattctaaagtcacttccgtgctataaatccatcagtggccgctatgtaagcattggaaaatttggaacatgctacgtacttacaaaaagtatcccttcagctgaagtggagaaatggacacagtcatcatcatctgcatttcttgaagaaaaaatacacttaaaagaactatatgaggtgattggttgtgtacctgtagatgatcttgaggtatatttgaaacacctcttaccaaaaattgaaaatctctcttatgatgcaaaattagagcacttgatctaccttaagaatagattatcaagtgctgaggaattatcagagattaaggaacaactttttgaaaaactggaaagtttattgataatccatgatgctaacagtagactaaagcaagcaaagcatttctatgatagaactgtgagagtttttgaagttatgcttcctgaaaaattgtttattcctaatgatttctttaagaaattggaacaacttataaaacccaaaaatcatgttacatttatgacatcctgggtggaattcttaagaaatattggactaaaatacatactttctcagcagcagttgttacagtttgctaaggaaatcagtgtgagggctaatacagaaaactggtccaaagaaacattgcaaaatacagttgatatccttctgcatcatatattccaagaacgaatggatttgttatctggaaattttctgaaagaactatctttaataccattcttatgtcctgagcgggcccccgcggaattcattagatttcatcctcaatatcaagaggtaaatggaacacttcctcttataaagttcaatggagcacaggtaaatccaaaattcaagcaatgtgatgtactccagctgttatggacatcctgccctattcttccagagaaagctacacccttaagcattaaagaacaagaaggtagtgaccttggtccacaagaacagcttgaacaagttttaaatatgcttaatgttaacctggatcctcctcttgataaggtaatcaataactgcagaaacatatgcaacataacgacgttggatgaagaaatggtaaaaactagagcaaaagtcttaaggagcatatatgaattcctcagtgcagaaaaaagggaatttcgttttcagttgcgaggggttgcttttgtgatggtagaagatggttggaaacttctgaagcctgaggaggtagtcataaacctagaatatgaatctgattttaaaccttatttgtacaagctacctttagaacttggcacatttcaccagttgttcaaacacttaggtactgaagatattatttcaactaagcaatatgttgaagtgttgagccgcatatttaaaaattctgagggcaaacaattagatcctaatgaaatgcgtacagttaagagagtagtttctggtctgttcaggagtctacagaatgattcagtcaaggtgaggagtgatctcgagaatgtacgagaccttgcgctttacctcccaagccaggatggtagattggtaaagtcaagcatcttagtgtttgacgatgcgccacattataaaagtagaatccaggggaatattggtgtgcaaatgttagttgatctcagccagtgctacttagggaaagaccatggatttcacactaagttgataatgctctttcctcaaaaacttagacctcgattattgagcagtatacttgaagaacaattagatgaagagactcccaaagtttgtcagtttggagcgttgtgttctcttcaaggaagattgcagttactcttgtcttctgaacagttcattacaggactgattagaattatgaagcatgaaaatgataatgcttttctggccaatgaagaaaaagccataagactttgcaaagccctaagagaaggattgaaagtatcctgctttgaaaagcttcaaacaacattaagagttaaaggttttaatcctattccccacagcagaagtgaaacttttgcttttttgaagcgatttggtaatgcagtcatcttgctctacattcaacattcagacagtaaagacattaatttcctgttagcattggcaatgactcttaaatcagcaactgacaatttgatttctgacacttcatatttaattgctatgctaggatgcaatgatatttacaggattggtgagaaacttgacagtttaggagtgaaatatgactcttcggagccatcaaaactggaacttccaatgcctggcacaccaattcctgctgaaattcattacactctgcttatggacccaatgaatgttttttacccgggagaatatgttgggtaccttgttgatgctgaaggtggtgatatctatggatcataccagccaacatacacatatgcaattattgtacaagaagttgaaagagaagatgctgacaattctagttttctaggaaagatatatcagatagatattggttatagtgaatataaaatagttagctctcttgatctgtataagttttcaagacctgaggaaagctctcaaagcagggacagtgctccttctacaccaaccagccccactgagttcctcacccctggcctgagaagcattcctcctcttttctctggtagagagagccacaagacttcttccaaacatcagtcccccaaaaagcttaaggttaattctttaccagaaatcttaaaagaagtgacatctgtggtggagcaagcatggaagcttccagaatcggaacgaaaaaagattattaggcggttgtatttgaaatggcatcctgacaaaaatccagagaaccatgacattgccaatgaagtttttaaacatttgcagaatgaaatcaacagattagaaaaacaggcttttctagatcaaaatgcagacagggcctccagacgaacattttcaacctcagcatcccgatttcagtcagacaaatactcatttcagagattctatacttcatggaatcaagaagcaacgagccataaatctgaaagacagcaacagaacaaagaaaaatgccccccttcagccggacagacttactctcaaaggttctttgttcctcccactttcaagtcggttggcaatccagtggaagcacgcagatggctaagacaagccagagcaaacttctcagctgccaggaatgaccttcataaaaatgccaatgagtgggtgtgctttaaatgttacctttctaccaagttagctttgattgcagctgactatgctgtgaggggaaagtctgataaagatgtaaaaccaactgcacttgctcagaaaatagaggaatatagtcagcaacttgaaggactgacaaatgatgttcacacattggaagcttatggtgtagacagtttaaaaacaagataccctgatttgcttccctttcctcagatcccaaatgacaggttcacttctgaggttgctatgagggtgatggaatgtactgcctgtatcataataaaacttgaaaattttatgcaacaaaaagtgtgaagatatttaacgaaaaaaaaggtagatcttgaatgtgttgtagcacgaataaattgctgtacttcattaagcttcattgccaattagctaggaattgttaagcacattgcagattgttcttggagaattctggagttgttatgaacatgaataccaacggaaaaccttaactgaatctaaaagaaaactattttgaagatggtggtgagctgcaaaatagctggatggatttgaatgattgggatgatacatcattgaactgcactttatataaccaaagcttagcagtttgttagataagagtctatgtatgtctctggttaggatgaagttaattttatgtttttaacatggtatttttgaaggagctaatgaaacactggacatataattggtttaaacataaggggaattaagtctttgtagtctgtcatttttttaagtggatcctcttggatgcgttattttctcatcagctggctctgatcatgaatttgttgtaattttatgttgtactcagtgcatttaagaaatggtagagtattttaatcctattacttgactaagagtgtgaaggtagtactttttagagtgcactgagtgcactttacatctttatttaaatttttttttaacatcttatgtttacaggcttcctgtttgatgaagatagcaacggaaaactcaaaatggtggcagttcttattaccagttgttagtattgtttctggaaactgcttgccaagacaacatttattaactgttagaacacttgctttatgtttgtgtgtacatattttccacaaatgttataatttatatagtgtggttgaacaggatgcaatcttttgttgtctaaaggtgctgcagttaaaaaaaaaacaaccttttctttcaatatggcatgtagtggagtttttttaactttaaaaacatcaaaaattgttaaaatcattgtgttatctagtagtttataattatcggcttatatttccccatgaatgatcagaactgacatttaattcatgtttgtctcgccatgcttctttactttaacatatttcttttgcagaatgtaaaaggtaatgataattagtttatataagtgtactggctgtaaatgatgctaaatatactttatgcaattaagggcttacagaacatgttgaaactttttttacttttattgggaataaggaatgtttgcacctccacattttattgcttctggatgtgaaatcatgtaattatttctgctgttatataaagtgccatacttttaataaaggaaaatgtacatatgaaatcat

SEQ ID NO: 29604 - DNA, 15639 bp, Homo sapiens
  source 1..15639: mol_type = unassigned DNA
agtgcggctgcgggacagtcacgctgggaactgctgatggcactggaggaaaacaaaggccgagagaccctgatgcccacagcccccagatcacagaagtgaggccaagatgcccatgtcaccagagccagaagaaaggctcctaccaaagaatattttacatctgctgagatgagggtgagaaacaaaatccaagaatttctgcgacgttttccccaagaaccttcaaaaagaaatacagaaaattctcagatgaaaataaattgattttgctctgggggaaagccaaaaacctttagcgaatccacactgttttatcctgagaacttccatgggtcgctggatcagcaggcaaccattatcagactggagagtcatactttaaggaatacaaatgcaacacacgacaatgtttcctgacatcagatgatgaatggacactgaagggaaaaacaggctttttttccacctggcaggaagagctgaacttggagtacacatttaaaggaagcacagagggaagacttaaacagaagaaagaagcgtactttcatggttttcacaaacaaatatcccaggagaagtgatcatggagaccaaggagaacaggtgggtcccggtgaccgtgctccccggctgcgtgggctgcaggaccgtcgcggcgctggcgtcctggaccgtgcgcgatgtgaaggaacgtatcttcgcggagactggcttcccggtgtcggagcagcggctgtggcgcggcggccgcgagttatctgactggatcaagattggagatctgacttccaaaaattgtcatctttttgtaaaccttcaatcaaaaggcttaaaagggggaggtcgatttggtcagacaacgccaccacttgttgattttctcaaggacattttgagaagatatccagaaggaggacagattcttaaggaattaattcagaatgcagaagatgctggggcgacagaagttaaatttttatatgatgaaactcaatacggaacagagactctttggtcaaaagatatggcgccatatcaggggccagctctctatgtgtacaacaacgcggttttcaccccagaggactggcacggcattcaagaaatagcaagaagcaggaaaaaggatgatcctctgaaggtcggaagatttggaattgggtttaattctgtctatcatataacagatgttccttgtatctttagtggtgaccaaatcgggatgctagatcctcatcaaacactttttggcccacatgaatcaggccaatgttggaatctcaaagatgacagcaaagaaattagtgaactttcagaccagtttgcaccatttgttggcatttttggaagcaccaaggaaacatttataaacggcaattttccaggaacatttttccgtttccctcttcgcctacaaccttcacaacttagtagtaacctctacaataagcagaaggttcttgagttgtttgagtcttttagggcagatgcagacacagtgctgctctttctgaaaagtgtgcaggatgtttccttatatgtccgagaggctgacggaacagagaaactggtgtttagagtgacttcgagtgagagtaaggcactgaaacatgagcggccgaattctataaagattctgggaactgctataagtaactattgtaaaaagactccaagcaataacatcacctgtgtaacatatcacgtaaatattgttttagaagaggagagtactaaggatgcacagaaaacatcttggttggtgtgtaacagtgtgggtgggcgagggatcagtagtaagcttgactctttagctgatgaactgaaatttgtcccaatcattggaatagccatgcctttatcaagcagagatgatgaagcaaaaggagcaacgtctgatttctcaggaaaagcattttgtttccttcctttaccacctggtgaggaaagcagcacaggcctcccagttcacatcagtgggttctttggccttactgataaccgcaggagcataaaatggagagagctggaccagtggagagacccggcagccttatggaatgagtttcttgtcatgaatgttgtccccaaagcttatgctactctgatcttagattcaataaaacgtctggagatggaaaagagctctgatttccccttgtcagttgatgttatctataagctttggccggaggcgagcaaagtcaaggtgcactggcaaccggtgttagagcctctattcagcgagctgttgcagaatgcagtgatttattcaattagctgtgactgggtcaggttggagcaggtgtacttctcagaacttgatgaaaatttagaatacacaaaaactgtgctcaactacctccagagctcagggaagcagattgccaaggtaccagggaatgtggatgctgctgttcagctcacagctgcctctggcacaacacctgtgaggaaggtgacgcccgcgtgggtgcggcaggtgctgcggaagtgtgcacacctgggctgtgctgaagaaaagcttcaccttctagaatttgtgctttctgaccaagcctacagtgagctgcttgggctggagctgctccctttacaaaatggcaattttgtccccttctcctcatctgtatcagaccaagatgtcatttatattacctcagcagaatatccaaggtcccttttcccaagtcttgaaggaagatttattttggataacttgaaacctcaccttgtggctgctttaaaggaagctgcccaaacccgaggaagaccatgtactcagctgcagcttctaaatccagaacgatttgcacgtcttatcaaggaagtaatgaatacattctggcctggcagagaattgattgttcaatggtatccatttgatgaaaacagaaatcacccatctgtttcatggcttaagatggtttggaaaaatctttatatacatttttcagaggatttgactttatttgatgagatgccacttatccccagaactatactagaggaaggtcagacatgtgtggaactcattagactcaggattccatcgttagtcattttagacgatgaatctgaagcacagcttccagaatttttagcagacattgtacaaaaacttggagggtttgtccttaaaaaattagatgcatctatacaacatccgcttattaaaaaatatattcattcaccattaccaagtgctgttttgcagataatggagaagatgccattgcagaaattgtgtaatcaaataacttcgctacttccaacacacaaagatgccctgaggaagttcttggctagtttaaccgatagcagtgagaaagagaaaagaattattcaagaattggcaatattcaagcgcattaaccattcttctgatcagggaatttcctcttatacaaaattgaaaggttgtaaagtcttacaccatactgccaaactcccagcagatctgcgactttctatttcagtaatagacagtagtgatgaagctactattcgtctggcaaacatgttgaaaatagaacagttaaagaccactagctgcttaaagcttgttttaaaagatattgaaaatgcattttattcacatgaagaggtaacacagcttatgttatgggtccttgagaatctatcttctcttaaaaatgagaatccaaatgtgcttgagtggttaacaccattaaaattcatccagatatcacaggaacagatggtatcagctggtgaactctttgaccctgatatagaagtactaaaggatctcttttgtaatgaagaaggaacctatttcccaccctcagtttttacctcaccagatattcttcactccttaagacagattggtttaaaaaacgaagccagtctcaaagaaaaggatgttgtgcaagtggcaaaaaaaattgaagccttacaggtcggtgcttgtcctgatcaagatgttcttctgaagaaagccaaaaccctcttactggttttaaataagaatcacacactgttgcaatcatctgaaggaaagatgacattgaagaaaataaaatgggttccagcctgcaaggaaaggcctccaaattatccaggctctttggtctggaaaggagatctctgtaatctctgtgcaccaccagatatgtgtgatgtaggccatgcaattctcattggctcctcacttcctcttgttgaaagtatccatgtaaacctggaaaaagcattagggatcttcacaaaacctagccttagtgctgtcttaaaacactttaaaattgttgttgattggtattcttcaaaaacctttagtgatgaagactactatcaattccagcatattttgcttgagatttacggattcatgcatgatcatctaaatgaagggaaagattcttttagagccttaaaatttccatgggtttggactggcaaaaagttttgtccacttgcccaggctgtgattaaaccaatccatgatcttgaccttcagccttatttgcataatgtacctaaaaccatggcaaaattccaccaactatttaaggtctgtggttcaatagaggagttgacatcagatcatatttccatggttattcagaagatatatctcaaaagtgaccaagatctcagtgaacaagaaagcaaacaaaatcttcatcttatgttgaatattatcagatggctgtatagcaatcagattccagcaagccccaacacaccagttcctatacatcatagcaaaaatccttctaaacttatcatgaagccaattcacgaatgctgttattgtgacattaaagttgatgaccttaatgacttacttgaagattctgtggaaccaatcattttggtgcatgaggacatacccatgaaaactgcagaatggctaaaagttccatgccttagtacaagactgataaatcctgaaaacatgggatttgagcagtcaggacaaagagagccacttactgtaagaattaaaaatattctggaagaatacccttcagtgtcagatatttttaaagaactacttcaaaacgctgatgatgcaaatgcaacagaatgcagtttcttgattgatatgagaagaaatatggacataagagagaatctcctagacccagggatggcagcttgtcatggacctgctttgtggtcattcaacaattctcaattctcagattcagattttgtgaacataactaggttaggagaatctttaaaaaggggagaagttgacaaagttggaaaatttggtcttggatttaattctgtgtaccatatcactgacattcccatcattatgagtcgggaattcatgataatgttcgatccaaacataaatcatatcagtaaacacattaaagacaaatccaatcctgggatcaaaattaattggagtaaacaacagaaaagacttagaaaatttcctaatcagttcaaaccatttatagatgtatttggctgtcagttacctttgactgtagaagcaccttacagctataatggaacccttttccgactgtcctttagaactcaacaggaagcaaaagtgagtgaagttagtagtacgtgctacaatacagcagatatttattctcttgtggatgaatttagtctctgtggacacaggcttatcattttcactcagagtgtaaagtcaatgtatttgaagtacttgaaaattgaggaaaccaaccccagtttagcacaagatacagtaataattaaaaaaaaatcctgctcttccaaagcattgaacacacctgtcttaagtgttttaaaagaggctgctaagctcatgaagacttgcagcagcagtaataaaaagcttcccagtgatgaaccaaagtcatcttgcattcttcagatcacagtggaagaatttcaccatgtgttcagaaggattgctgatttacagtcgccactttttagaggtccagatgatgacccagctgctctctttgaaatggctaagtctggccaatcaaaaaagccatcagatgagttgtcacagaaaacagtagagtgtaccacgtggcttctgtgtacttgcatggacacaggagaggctctgaagttttccctgagtgagagtggaagaagactaggactggttccatgtggggcagtaggagttcagctgtcagaaatccaggaccagaagtggacagtgaaaccacacattggagaggtgttttgctatttacctttacgaataaaaacaggcttgccagttcatatcaatgggtgctttgctgttacatcaaataggaaagaaatctggaaaacagatacaaaaggacgatggaataccacgttcatgagacatgttattgtgaaagcttacttacaggtactgagtgtcttacgggacctggccactagtggggagctaatggattatacttactatgcagtatggcccgatcctgatttagttcatgatgatttttctgtaatttgccaaggattttatgaagatatagctcatggaaaagggaaagaactgaccaaagtcttctctgatggatctacttgggtttccatgaagaacgtaagatttctagatgactctatacttaaaagaagagatgttggttcagcagccttcaagatatttttgaaatacctcaagaagactgggtccaaaaacctttgtgctgttgaacttccttcttcggtaaaattaggatttgaagaagctggctgcaaacagatactacttgaaaacacattttcagagaaacagtttttttctgaagtgttttttccaaatattcaagaaattgaagcagaacttagagatcctttaatgatctttgttctaaatgaaaaagttgatgagttctcgggagttcttcgtgttactccatgtattccttgttccttggaggggcatcctttggttttgccatcaagattgatccaccccgaaggacgagttgcaaagttatttgatattaaagatgggagattcccttatggttctactcaggattatctcaatcctattattttgattaaactagttcagttaggtatggcaaaagatgatattttatgggatgatatgctagaacgtgcagtgtcagtagctgaaattaataaaagtgatcatgttgctgcatgcctaagaagtagtatcttattgagtcttatcgatgagaaactaaaaataagggatcctagagcaaaggattttgctgcaaaatatcaaacaatccgcttccttccatttctgacaaaaccagcaggtttttctttggactggaaaggcaacagttttaagcctgaaaccatgtttgcagcaactgacctttatacagctgaacatcaagatatagtttgtcttttgcaaccaattctaaatgaaaattcccattcttttagaggttgtggttcagtgtcattggctgttaaagagtttttgggattactcaagaagccaacagttgatctggttataaaccaattgaaagaagtagcaaaatcagttgatgatggaattacactgtaccaggagaatatcaccaatgcttgctacaaataccttcatgaagccttgatgcaaaatgaaatcactaagatgtcaattattgataagttaaaaccctttagcttcattctagttgagaatgcatatgttgactcagaaaaggtttcttttcatttaaattttgaggcggcaccatacctttatcagttgcctaataagtataaaaataatttccgcgaactttttgaaaccgtgggtgtgaggcagtcatgcactgttgaagattttgctcttgttttggaatctattgatcaagaaagaggaacaaagcaaataacagaagagaattttcagctttgccgacgaataatcagtgaaggaatatggagtctcattagagaaaagaaacaagaattttgtgagaaaaattatggcaagatattattgccagatactaatcttatgcttctccctgctaaatcgttatgctacaatgattgcccttggataaaagtaaaggataccactgtaaaatattgtcatgctgacatacccagggaagtagcagtaaaactaggagcagtcccaaagcgacacaaagccttagaaagatatgcatccaatgtctgttttacaacacttggcacagaatttgggcagaaagaaaaattgaccagcagaattaagagcatccttaatgcatatccttctgaaaaggaaatgttgaaagagcttcttcaaaatgctgatgatgcaaaggcgacagaaatctgttttgtgtttgatcctagacagcatccagttgatagaatatttgatgataagtgggccccattgcaagggccagcactttgtgtgtacaacaaccagccatttacagaagatgatgttagaggaattcagaatcttggaaaaggcacgaaagagggaaatccttataaaactggacagtatggaataggattcaattctgtgtatcatatcacagactgcccatcttttatttctggcaatgacatcctgtgtatttttgatcctcatgccagatatgcaccaggggccacatccattagtcccggacgcatgtttagagatttggatgcagattttaggacacagttctcagatgttctggatctttatctgggaacccattttaaactggataattgcacaatgttcagatttcctcttcgtaatgcagaaatggcaaaagtttcggaaatttcgtctgttccagcatcagacagaatggtccagaatcttttggacaaactgcgctcagatggggcagaacttctaatgtttcttaatcacatggaaaaaatttctatttgtgaaatagataagagtactggagctctaaatgtgctgtattcagtaaagggcaaaatcacagatggagacagattgaaaaggaaacaatttcatgcatctgtaattgatagtgttactaaaaagaggcagctcaaagacataccagttcaacaaataacctatactatggatactgaggactctgaaggaaatcttactacgtggctaatttgtaatagatcaggcttttcaagtatggagaaagtatctaaaagtgtcatatcagctcacaagaaccaagatattactcttttcccacgtggtggagtagctgcctgcattactcacaactataaaaaaccccatagggccttctgttttttgcctctttctttggagactgggctgccatttcatgtgaatggccactttgcactggattcagccagaaggaacctgtggcgtgatgataatggagttggtgttcgaagtgactggaataacagtttaatgacagcattaatagctcctgcatatgttgaattgctaatacagttaaaaaaacggtatttccctggttctgatccaacattatcagtgttacagaacacccctattcatgttgtaaaggacactttaaagaagtttttatcgtttttcccagttaaccgtcttgatctacagccagatttatattgtctagtgaaagcactttacaattgcattcacgaagacatgaaacgtcttttacctgttgtgcgggctccaaatattgatggctctgacttgcactctgcagttataattacttggatcaatatgtctacttctaataaaactagaccattttttgacaatttactacaggatgaattacaacaccttaaaaatgcagattataatatcaccacacgcaaaacagtagcagagaatgtctataggctgaaacatctccttttagaaattggtttcaacttggtttataactgtgatgaaactgctaatctttaccactgtcttatagatgcagatattcctgttagttatgtgacccctgctgatatcagatcttttttaatgacattttcctctcctgacactaattgccatattgggaagctgccttgtcgtctgcagcagactaatctaaaactttttcatagtttaaaacttttagttgattattgttttaaagatgcagaagaaaatgagattgaagttgagggattgccccttctcatcacactggacagtgttttgcaaacttttgatgcaaaacgacccaagtttctaacaacatatcatgaattgattccatcccgcaaagacttgtttatgaatacattatatttgaaatatagtaatattttattgaactgtaaagttgcaaaagtgtttgacatttccagctttgctgatttgttatcctctgtgttgcctcgagaatataagaccaaaagttgcacaaagtggaaagacaattttgcaagtgagtcttggcttaagaatgcatggcattttattagtgaatctgtaagtgtgaaagaagatcaggaagaaacaaaaccaacatttgacattgttgttgatactctaaaagactgggcattgcttccaggaacaaagtttactgtttcagccaaccagcttgtggttcctgaaggagatgttctgcttcctctcagccttatgcacattgcagtttttccaaatgcccagagtgataaagtttttcatgctctaatgaaagctggctgtattcagcttgctttgaacaaaatctgttccaaagacagtgcatttgttcctttgttgtcatgtcacacagcaaatatagagagccccacaagcatcttgaaggctctacattatatggtccaaacttcaacatttagagcagaaaaattagtagaaaatgattttgaggcacttttgatgtatttcaactgcaatttgaatcatttgatgtcccaagatgatataaaaattctaaagtcacttccgtgctataaatccatcagtggccgctatgtaagcattggaaaatttggaacatgctacgtacttacaaaaagtatcccttcagctgaagtggagaaatggacacagtcatcatcatctgcatttcttgaagaaaaaatacacttaaaagaactatatgaggtgattggttgtgtacctgtagatgatcttgaggtatatttgaaacacctcttaccaaaaattgaaaatctctcttatgatgcaaaattagagcacttgatctaccttaagaatagattatcaagtgctgaggaattatcagagattaaggaacaactttttgaaaaactggaaagtttattgataatccatgatgctaacagtagactaaagcaagcaaagcatttctatgatagaactgtgagagtttttgaagttatgcttcctgaaaaattgtttattcctaatgatttctttaagaaattggaacaacttataaaacccaaaaatcatgttacatttatgacatcctgggtggaattcttaagaaatattggactaaaatacatactttctcagcagcagttgttacagtttgctaaggaaatcagtgtgagggctaatacagaaaactggtccaaagaaacattgcaaaatacagttgatatccttctgcatcatatattccaagaacgaatggatttgttatctggaaattttctgaaagaactatctttaataccattcttatgtcctgagcgggcccccgcggaattcattagatttcatcctcaatatcaagaggtaaatggaacacttcctcttataaagttcaatggagcacaggtaaatccaaaattcaagcaatgtgatgtactccagctgttatggacatcctgccctattcttccagagaaagctacacccttaagcattaaagaacaagaaggtagtgaccttggtccacaagaacagcttgaacaagttttaaatatgcttaatgttaacctggatcctcctcttgataaggtaatcaataactgcagaaacatatgcaacataacgacgttggatgaagaaatggtaaaaactagagcaaaagtcttaaggagcatatatgaattcctcagtgcagaaaaaagggaatttcgttttcagttgcgaggggttgcttttgtgatggtagaagatggttggaaacttctgaagcctgaggaggtagtcataaacctagaatatgaatctgattttaaaccttatttgtacaagctacctttagaacttggcacatttcaccagttgttcaaacacttaggtactgaagatattatttcaactaagcaatatgttgaagtgttgagccgcatatttaaaaattctgagggcaaacaattagatcctaatgaaatgcgtacagttaagagagtagtttctggtctgttcaggagtctacagaatgattcagtcaaggtgaggagtgatctcgagaatgtacgagaccttgcgctttacctcccaagccaggatggtagattggtaaagtcaagcatcttagtgtttgacgatgcgccacattataaaagtagaatccaggggaatattggtgtgcaaatgttagttgatctcagccagtgctacttagggaaagaccatggatttcacactaagttgataatgctctttcctcaaaaacttagacctcgattattgagcagtatacttgaagaacaattagatgaagagactcccaaagtttgtcagtttggagcgttgtgttctcttcaaggaagattgcagttactcttgtcttctgaacagttcattacaggactgattagaattatgaagcatgaaaatgataatgcttttctggccaatgaagaaaaagccataagactttgcaaagccctaagagaaggattgaaagtatcctgctttgaaaagcttcaaacaacattaagagttaaaggttttaatcctattccccacagcagaagtgaaacttttgcttttttgaagcgatttggtaatgcagtcatcttgctctacattcaacattcagacagtaaagacattaatttcctgttagcattggcaatgactcttaaatcagcaactgacaatttgatttctgacacttcatatttaattgctatgctaggatgcaatgatatttacaggattggtgagaaacttgacagtttaggagtgaaatatgactcttcggagccatcaaaactggaacttccaatgcctggcacaccaattcctgctgaaattcattacactctgcttatggacccaatgaatgttttttacccgggagaatatgttgggtaccttgttgatgctgaaggtggtgatatctatggatcataccagccaacatacacatatgcaattattgtacaagaagttgaaagagaagatgctgacaattctagttttctaggaaagatatatcagatagatattggttatagtgaatataaaatagttagctctcttgatctgtataagttttcaagacctgaggaaagctctcaaagcagggacagtgctccttctacaccaaccagccccactgagttcctcacccctggcctgagaagcattcctcctcttttctctggtagagagagccacaagacttcttccaaacatcagtcccccaaaaagcttaaggttaattctttaccagaaatcttaaaagaagtgacatctgtggtggagcaagcatggaagcttccagaatcggaacgaaaaaagattattaggcggttgtatttgaaatggcatcctgacaaaaatccagagaaccatgacattgccaatgaagtttttaaacatttgcagaatgaaatcaacagattagaaaaacaggcttttctagatcaaaatgcagacagggcctccagacgaacattttcaacctcagcatcccgatttcagtcagacaaatactcatttcagagattctatacttcatggaatcaagaagcaacgagccataaatctgaaagacagcaacagaacaaagaaaaatgccccccttcagccggacagacttactctcaaaggttctttgttcctcccactttcaagtcggttggcaatccagtggaagcacgcagatggctaagacaagccagagcaaacttctcagctgccaggaatgaccttcataaaaatgccaatgagtgggtgtgctttaaatgttacctttctaccaagttagctttgattgcagctgactatgctgtgaggggaaagtctgataaagatgtaaaaccaactgcacttgctcagaaaatagaggaatatagtcagcaacttgaaggactgacaaatgatgttcacacattggaagcttatggtgtagacagtttaaaaacaagataccctgatttgcttccctttcctcagatcccaaatgacaggttcacttctgaggttgctatgagggtgatggaatgtactgcctgtatcataataaaacttgaaaattttatgcaacaaaaagtgtgaagatatttaacgaaaaaaaaggtagatcttgaatgtgttgtagcacgaataaattgctgtacttcattaagcttcattgccaattagctaggaattgttaagcacattgcagattgttcttggagaattctggagttgttatgaacatgaataccaacggaaaaccttaactgaatctaaaagaaaactattttgaagatggtggtgagctgcaaaatagctggatggatttgaatgattgggatgatacatcattgaactgcactttatataaccaaagcttagcagtttgttagataagagtctatgtatgtctctggttaggatgaagttaattttatgtttttaacatggtatttttgaaggagctaatgaaacactggacatataattggtttaaacataaggggaattaagtctttgtagtctgtcatttttttaagtggatcctcttggatgcgttattttctcatcagctggctctgatcatgaatttgttgtaattttatgttgtactcagtgcatttaagaaatggtagagtattttaatcctattacttgactaagagtgtgaaggtagtactttttagagtgcactgagtgcactttacatctttatttaaatttttttttaacatcttatgtttacaggcttcctgtttgatgaagatagcaacggaaaactcaaaatggtggcagttcttattaccagttgttagtattgtttctggaaactgcttgccaagacaacatttattaactgttagaacacttgctttatgtttgtgtgtacatattttccacaaatgttataatttatatagtgtggttgaacaggatgcaatcttttgttgtctaaaggtgctgcagttaaaaaaaaaacaaccttttctttcaatatggcatgtagtggagtttttttaactttaaaaacatcaaaaattgttaaaatcattgtgttatctagtagtttataattatcggcttatatttccccatgaatgatcagaactgacatttaattcatgtttgtctcgccatgcttctttactttaacatatttcttttgcagaatgtaaaaggtaatgataattagtttatataagtgtactggctgtaaatgatgctaaatatactttatgcaattaagggcttacagaacatgttgaaactttttttacttttattgggaataaggaatgtttgcacctccacattttattgcttctggatgtgaaatcatgtaattatttctgctgttatataaagtgccatacttttaataaaggaaaatgtacatatgaaatcat

SEQ ID NO: 29605 - DNA, 15134 bp, Homo sapiens
  source 1..15134: mol_type = unassigned DNA
ctgctcctcggccgccgcggcttcctctagcgtttcctcctcggcgcgggctgctgcgtacgggactgcgccatgcggatcccgccctcccggcccgcgcggggcctgtggacgcggtagggccggccgtgatcgggcgccggcgtcaggggcgggcgctaggggcgcctgccgcgccgcgatgtgggagaggtgggtcccggtgaccgtgctccccggctgcgtgggctgcaggaccgtcgcggcgctggcgtcctggaccgtgcgcgatgtgaaggaacgtatcttcgcggagactggcttcccggtgtcggagcagcggctgtggcgcggcggccgcgaggtcgatttggtcagacaacgccaccacttgttgattttctcaaggacattttgagaagatatccagaaggaggacagattcttaaggaattaattcagaatgcagaagatgctggggcgacagaagttaaatttttatatgatgaaactcaatacggaacagagactctttggtcaaaagatatggcgccatatcaggggccagctctctatgtgtacaacaacgcggttttcaccccagaggactggcacggcattcaagaaatagcaagaagcaggaaaaaggatgatcctctgaaggtcggaagatttggaattgggtttaattctgtctatcatataacagatgttccttgtatctttagtggtgaccaaatcgggatgctagatcctcatcaaacactttttggcccacatgaatcaggccaatgttggaatctcaaagatgacagcaaagaaattagtgaactttcagaccagtttgcaccatttgttggcatttttggaagcaccaaggaaacatttataaacggcaattttccaggaacatttttccgtttccctcttcgcctacaaccttcacaacttagtagtaacctctacaataagcagaaggttcttgagttgtttgagtcttttagggcagatgcagacacagtgctgctctttctgaaaagtgtgcaggatgtttccttatatgtccgagaggctgacggaacagagaaactggtgtttagagtgacttcgagtgagagtaaggcactgaaacatgagcggccgaattctataaagattctgggaactgctataagtaactattgtaaaaagactccaagcaataacatcacctgtgtaacatatcacgtaaatattgttttagaagaggagagtactaaggatgcacagaaaacatcttggttggtgtgtaacagtgtgggtgggcgagggatcagtagtaagcttgactctttagctgatgaactgaaatttgtcccaatcattggaatagccatgcctttatcaagcagagatgatgaagcaaaaggagcaacgtctgatttctcaggaaaagcattttgtttccttcctttaccacctggtgaggaaagcagcacaggcctcccagttcacatcagtgggttctttggccttactgataaccgcaggagcataaaatggagagagctggaccagtggagagacccggcagccttatggaatgagtttcttgtcatgaatgttgtccccaaagcttatgctactctgatcttagattcaataaaacgtctggagatggaaaagagctctgatttccccttgtcagttgatgttatctataagctttggccggaggcgagcaaagtcaaggtgcactggcaaccggtgttagagcctctattcagcgagctgttgcagaatgcagtgatttattcaattagctgtgactgggtcaggttggagcaggtgtacttctcagaacttgatgaaaatttagaatacacaaaaactgtgctcaactacctccagagctcagggaagcagattgccaaggtaccagggaatgtggatgctgctgttcagctcacagctgcctctggcacaacacctgtgaggaaggtgacgcccgcgtgggtgcggcaggtgctgcggaagtgtgcacacctgggctgtgctgaagaaaagcttcaccttctagaatttgtgctttctgaccaagcctacagtgagctgcttgggctggagctgctccctttacaaaatggcaattttgtccccttctcctcatctgtatcagaccaagatgtcatttatattacctcagcagaatatccaaggtcccttttcccaagtcttgaaggaagatttattttggataacttgaaacctcaccttgtggctgctttaaaggaagctgcccaaacccgaggaagaccatgtactcagctgcagcttctaaatccagaacgatttgcacgtcttatcaaggaagtaatgaatacattctggcctggcagagaattgattgttcaatggtatccatttgatgaaaacagaaatcacccatctgtttcatggcttaagatggtttggaaaaatctttatatacatttttcagaggatttgactttatttgatgagatgccacttatccccagaactatactagaggaaggtcagacatgtgtggaactcattagactcaggattccatcgttagtcattttagacgatgaatctgaagcacagcttccagaatttttagcagacattgtacaaaaacttggagggtttgtccttaaaaaattagatgcatctatacaacatccgcttattaaaaaatatattcattcaccattaccaagtgctgttttgcagataatggagaagatgccattgcagaaattgtgtaatcaaataacttcgctacttccaacacacaaagatgccctgaggaagttcttggctagtttaaccgatagcagtgagaaagagaaaagaattattcaagaattggcaatattcaagcgcattaaccattcttctgatcagggaatttcctcttatacaaaattgaaaggttgtaaagtcttacaccatactgccaaactcccagcagatctgcgactttctatttcagtaatagacagtagtgatgaagctactattcgtctggcaaacatgttgaaaatagaacagttaaagaccactagctgcttaaagcttgttttaaaagatattgaaaatgcattttattcacatgaagaggtaacacagcttatgttatgggtccttgagaatctatcttctcttaaaaatgagaatccaaatgtgcttgagtggttaacaccattaaaattcatccagatatcacaggaacagatggtatcagctggtgaactctttgaccctgatatagaagtactaaaggatctcttttgtaatgaagaaggaacctatttcccaccctcagtttttacctcaccagatattcttcactccttaagacagattggtttaaaaaacgaagccagtctcaaagaaaaggatgttgtgcaagtggcaaaaaaaattgaagccttacaggtcggtgcttgtcctgatcaagatgttcttctgaagaaagccaaaaccctcttactggttttaaataagaatcacacactgttgcaatcatctgaaggaaagatgacattgaagaaaataaaatgggttccagcctgcaaggaaaggcctccaaattatccaggctctttggtctggaaaggagatctctgtaatctctgtgcaccaccagatatgtgtgatgtaggccatgcaattctcattggctcctcacttcctcttgttgaaagtatccatgtaaacctggaaaaagcattagggatcttcacaaaacctagccttagtgctgtcttaaaacactttaaaattgttgttgattggtattcttcaaaaacctttagtgatgaagactactatcaattccagcatattttgcttgagatttacggattcatgcatgatcatctaaatgaagggaaagattcttttagagccttaaaatttccatgggtttggactggcaaaaagttttgtccacttgcccaggctgtgattaaaccaatccatgatcttgaccttcagccttatttgcataatgtacctaaaaccatggcaaaattccaccaactatttaaggtctgtggttcaatagaggagttgacatcagatcatatttccatggttattcagaagatatatctcaaaagtgaccaagatctcagtgaacaagaaagcaaacaaaatcttcatcttatgttgaatattatcagatggctgtatagcaatcagattccagcaagccccaacacaccagttcctatacatcatagcaaaaatccttctaaacttatcatgaagccaattcacgaatgctgttattgtgacattaaagttgatgaccttaatgacttacttgaagattctgtggaaccaatcattttggtgcatgaggacatacccatgaaaactgcagaatggctaaaagttccatgccttagtacaagactgataaatcctgaaaacatgggatttgagcagtcaggacaaagagagccacttactgtaagaattaaaaatattctggaagaatacccttcagtgtcagatatttttaaagaactacttcaaaacgctgatgatgcaaatgcaacagaatgcagtttcttgattgatatgagaagaaatatggacataagagagaatctcctagacccagggatggcagcttgtcatggacctgctttgtggtcattcaacaattctcaattctcagattcagattttgtgaacataactaggttaggagaatctttaaaaaggggagaagttgacaaagttggaaaatttggtcttggatttaattctgtgtaccatatcactgacattcccatcattatgagtcgggaattcatgataatgttcgatccaaacataaatcatatcagtaaacacattaaagacaaatccaatcctgggatcaaaattaattggagtaaacaacagaaaagacttagaaaatttcctaatcagttcaaaccatttatagatgtatttggctgtcagttacctttgactgtagaagcaccttacagctataatggaacccttttccgactgtcctttagaactcaacaggaagcaaaagtgagtgaagttagtagtacgtgctacaatacagcagatatttattctcttgtggatgaatttagtctctgtggacacaggcttatcattttcactcagagtgtaaagtcaatgtatttgaagtacttgaaaattgaggaaaccaaccccagtttagcacaagatacagtaataattaaaaaaaaatcctgctcttccaaagcattgaacacacctgtcttaagtgttttaaaagaggctgctaagctcatgaagacttgcagcagcagtaataaaaagcttcccagtgatgaaccaaagtcatcttgcattcttcagatcacagtggaagaatttcaccatgtgttcagaaggattgctgatttacagtcgccactttttagaggtccagatgatgacccagctgctctctttgaaatggctaagtctggccaatcaaaaaagccatcagatgagttgtcacagaaaacagtagagtgtaccacgtggcttctgtgtacttgcatggacacaggagaggctctgaagttttccctgagtgagagtggaagaagactaggactggttccatgtggggcagtaggagttcagctgtcagaaatccaggaccagaagtggacagtgaaaccacacattggagaggtgttttgctatttacctttacgaataaaaacaggcttgccagttcatatcaatgggtgctttgctgttacatcaaataggaaagaaatctggaaaacagatacaaaaggacgatggaataccacgttcatgagacatgttattgtgaaagcttacttacaggtactgagtgtcttacgggacctggccactagtggggagctaatggattatacttactatgcagtatggcccgatcctgatttagttcatgatgatttttctgtaatttgccaaggattttatgaagatatagctcatggaaaagggaaagaactgaccaaagtcttctctgatggatctacttgggtttccatgaagaacgtaagatttctagatgactctatacttaaaagaagagatgttggttcagcagccttcaagatatttttgaaatacctcaagaagactgggtccaaaaacctttgtgctgttgaacttccttcttcggtaaaattaggatttgaagaagctggctgcaaacagatactacttgaaaacacattttcagagaaacagtttttttctgaagtgttttttccaaatattcaagaaattgaagcagaacttagagatcctttaatgatctttgttctaaatgaaaaagttgatgagttctcgggagttcttcgtgttactccatgtattccttgttccttggaggggcatcctttggttttgccatcaagattgatccaccccgaaggacgagttgcaaagttatttgatattaaagatgggagattcccttatggttctactcaggattatctcaatcctattattttgattaaactagttcagttaggtatggcaaaagatgatattttatgggatgatatgctagaacgtgcagtgtcagtagctgaaattaataaaagtgatcatgttgctgcatgcctaagaagtagtatcttattgagtcttatcgatgagaaactaaaaataagggatcctagagcaaaggattttgctgcaaaatatcaaacaatccgcttccttccatttctgacaaaaccagcaggtttttctttggactggaaaggcaacagttttaagcctgaaaccatgtttgcagcaactgacctttatacagctgaacatcaagatatagtttgtcttttgcaaccaattctaaatgaaaattcccattcttttagaggttgtggttcagtgtcattggctgttaaagagtttttgggattactcaagaagccaacagttgatctggttataaaccaattgaaagaagtagcaaaatcagttgatgatggaattacactgtaccaggagaatatcaccaatgcttgctacaaataccttcatgaagccttgatgcaaaatgaaatcactaagatgtcaattattgataagttaaaaccctttagcttcattctagttgagaatgcatatgttgactcagaaaaggtttcttttcatttaaattttgaggcggcaccatacctttatcagttgcctaataagtataaaaataatttccgcgaactttttgaaaccgtgggtgtgaggcagtcatgcactgttgaagattttgctcttgttttggaatctattgatcaagaaagaggaacaaagcaaataacagaagagaattttcagctttgccgacgaataatcagtgaaggaatatggagtctcattagagaaaagaaacaagaattttgtgagaaaaattatggcaagatattattgccagatactaatcttatgcttctccctgctaaatcgttatgctacaatgattgcccttggataaaagtaaaggataccactgtaaaatattgtcatgctgacatacccagggaagtagcagtaaaactaggagcagtcccaaagcgacacaaagccttagaaagatatgcatccaatgtctgttttacaacacttggcacagaatttgggcagaaagaaaaattgaccagcagaattaagagcatccttaatgcatatccttctgaaaaggaaatgttgaaagagcttcttcaaaatgctgatgatgcaaaggcgacagaaatctgttttgtgtttgatcctagacagcatccagttgatagaatatttgatgataagtgggccccattgcaagggccagcactttgtgtgtacaacaaccagccatttacagaagatgatgttagaggaattcagaatcttggaaaaggcacgaaagagggaaatccttataaaactggacagtatggaataggattcaattctgtgtatcatatcacagactgcccatcttttatttctggcaatgacatcctgtgtatttttgatcctcatgccagatatgcaccaggggccacatccattagtcccggacgcatgtttagagatttggatgcagattttaggacacagttctcagatgttctggatctttatctgggaacccattttaaactggataattgcacaatgttcagatttcctcttcgtaatgcagaaatggcaaaagtttcggaaatttcgtctgttccagcatcagacagaatggtccagaatcttttggacaaactgcgctcagatggggcagaacttctaatgtttcttaatcacatggaaaaaatttctatttgtgaaatagataagagtactggagctctaaatgtgctgtattcagtaaagggcaaaatcacagatggagacagattgaaaaggaaacaatttcatgcatctgtaattgatagtgttactaaaaagaggcagctcaaagacataccagttcaacaaataacctatactatggatactgaggactctgaaggaaatcttactacgtggctaatttgtaatagatcaggcttttcaagtatggagaaagtatctaaaagtgtcatatcagctcacaagaaccaagatattactcttttcccacgtggtggagtagctgcctgcattactcacaactataaaaaaccccatagggccttctgttttttgcctctttctttggagactgggctgccatttcatgtgaatggccactttgcactggattcagccagaaggaacctgtggcgtgatgataatggagttggtgttcgaagtgactggaataacagtttaatgacagcattaatagctcctgcatatgttgaattgctaatacagttaaaaaaacggtatttccctggttctgatccaacattatcagtgttacagaacacccctattcatgttgtaaaggacactttaaagaagtttttatcgtttttcccagttaaccgtcttgatctacagccagatttatattgtctagtgaaagcactttacaattgcattcacgaagacatgaaacgtcttttacctgttgtgcgggctccaaatattgatggctctgacttgcactctgcagttataattacttggatcaatatgtctacttctaataaaactagaccattttttgacaatttactacaggatgaattacaacaccttaaaaatgcagattataatatcaccacacgcaaaacagtagcagagaatgtctataggctgaaacatctccttttagaaattggtttcaacttggtttataactgtgatgaaactgctaatctttaccactgtcttatagatgcagatattcctgttagttatgtgacccctgctgatatcagatcttttttaatgacattttcctctcctgacactaattgccatattgggaagctgccttgtcgtctgcagcagactaatctaaaactttttcatagtttaaaacttttagttgattattgttttaaagatgcagaagaaaatgagattgaagttgagggattgccccttctcatcacactggacagtgttttgcaaacttttgatgcaaaacgacccaagtttctaacaacatatcatgaattgattccatcccgcaaagacttgtttatgaatacattatatttgaaatatagtaatattttattgaactgtaaagttgcaaaagtgtttgacatttccagctttgctgatttgttatcctctgtgttgcctcgagaatataagaccaaaagttgcacaaagtggaaagacaattttgcaagtgagtcttggcttaagaatgcatggcattttattagtgaatctgtaagtgtgaaagaagatcaggaagaaacaaaaccaacatttgacattgttgttgatactctaaaagactgggcattgcttccaggaacaaagtttactgtttcagccaaccagcttgtggttcctgaaggagatgttctgcttcctctcagccttatgcacattgcagtttttccaaatgcccagagtgataaagtttttcatgctctaatgaaagctggctgtattcagcttgctttgaacaaaatctgttccaaagacagtgcatttgttcctttgttgtcatgtcacacagcaaatatagagagccccacaagcatcttgaaggctctacattatatggtccaaacttcaacatttagagcagaaaaattagtagaaaatgattttgaggcacttttgatgtatttcaactgcaatttgaatcatttgatgtcccaagatgatataaaaattctaaagtcacttccgtgctataaatccatcagtggccgctatgtaagcattggaaaatttggaacatgctacgtacttacaaaaagtatcccttcagctgaagtggagaaatggacacagtcatcatcatctgcatttcttgaagaaaaaatacacttaaaagaactatatgaggtgattggttgtgtacctgtagatgatcttgaggtatatttgaaacacctcttaccaaaaattgaaaatctctcttatgatgcaaaattagagcacttgatctaccttaagaatagattatcaagtgctgaggaattatcagagattaaggaacaactttttgaaaaactggaaagtttattgataatccatgatgctaacagtagactaaagcaagcaaagcatttctatgatagaactgtgagagtttttgaagttatgcttcctgaaaaattgtttattcctaatgatttctttaagaaattggaacaacttataaaacccaaaaatcatgttacatttatgacatcctgggtggaattcttaagaaatattggactaaaatacatactttctcagcagcagttgttacagtttgctaaggaaatcagtgtgagggctaatacagaaaactggtccaaagaaacattgcaaaatacagttgatatccttctgcatcatatattccaagaacgaatggatttgttatctggaaattttctgaaagaactatctttaataccattcttatgtcctgagcgggcccccgcggaattcattagatttcatcctcaatatcaagaggtaaatggaacacttcctcttataaagttcaatggagcacaggtaaatccaaaattcaagcaatgtgatgtactccagctgttatggacatcctgccctattcttccagagaaagctacacccttaagcattaaagaacaagaaggtagtgaccttggtccacaagaacagcttgaacaagttttaaatatgcttaatgttaacctggatcctcctcttgataaggtaatcaataactgcagaaacatatgcaacataacgacgttggatgaagaaatggtaaaaactagagcaaaagtcttaaggagcatatatgaattcctcagtgcagaaaaaagggaatttcgttttcagttgcgaggggttgcttttgtgatggtagaagatggttggaaacttctgaagcctgaggaggtagtcataaacctagaatatgaatctgattttaaaccttatttgtacaagctacctttagaacttggcacatttcaccagttgttcaaacacttaggtactgaagatattatttcaactaagcaatatgttgaagtgttgagccgcatatttaaaaattctgagggcaaacaattagatcctaatgaaatgcgtacagttaagagagtagtttctggtctgttcaggagtctacagaatgattcagtcaaggtgaggagtgatctcgagaatgtacgagaccttgcgctttacctcccaagccaggatggtagattggtaaagtcaagcatcttagtgtttgacgatgcgccacattataaaagtagaatccaggggaatattggtgtgcaaatgttagttgatctcagccagtgctacttagggaaagaccatggatttcacactaagttgataatgctctttcctcaaaaacttagacctcgattattgagcagtatacttgaagaacaattagatgaagagactcccaaagtttgtcagtttggagcgttgtgttctcttcaaggaagattgcagttactcttgtcttctgaacagttcattacaggactgattagaattatgaagcatgaaaatgataatgcttttctggccaatgaagaaaaagccataagactttgcaaagccctaagagaaggattgaaagtatcctgctttgaaaagcttcaaacaacattaagagttaaaggttttaatcctattccccacagcagaagtgaaacttttgcttttttgaagcgatttggtaatgcagtcatcttgctctacattcaacattcagacagtaaagacattaatttcctgttagcattggcaatgactcttaaatcagcaactgacaatttgatttctgacacttcatatttaattgctatgctaggatgcaatgatatttacaggattggtgagaaacttgacagtttaggagtgaaatatgactcttcggagccatcaaaactggaacttccaatgcctggcacaccaattcctgctgaaattcattacactctgcttatggacccaatgaatgttttttacccgggagaatatgttgggtaccttgttgatgctgaaggtggtgatatctatggatcataccagccaacatacacatatgcaattattgtacaagaagttgaaagagaagatgctgacaattctagttttctaggaaagatatatcagatagatattggttatagtgaatataaaatagttagctctcttgatctgtataagttttcaagacctgaggaaagctctcaaagcagggacagtgctccttctacaccaaccagccccactgagttcctcacccctggcctgagaagcattcctcctcttttctctggtagagagagccacaagacttcttccaaacatcagtcccccaaaaagcttaaggttaattctttaccagaaatcttaaaagaagtgacatctgtggtggagcaagcatggaagcttccagaatcggaacgaaaaaagattattaggcggttgtatttgaaatggcatcctgacaaaaatccagagaaccatgacattgccaatgaagtttttaaacatttgcagaatgaaatcaacagattagaaaaacaggcttttctagatcaaaatgcagacagggcctccagacgaacattttcaacctcagcatcccgatttcagtcagacaaatactcatttcagagattctatacttcatggaatcaagaagcaacgagccataaatctgaaagacagcaacagaacaaagaaaaatgccccccttcagccggacagacttactctcaaaggttctttgttcctcccactttcaagtcggttggcaatccagtggaagcacgcagatggctaagacaagccagagcaaacttctcagctgccaggaatgaccttcataaaaatgccaatgagtgggtgtgctttaaatgttacctttctaccaagttagctttgattgcagctgactatgctgtgaggggaaagtctgataaagatgtaaaaccaactgcacttgctcagaaaatagaggaatatagtcagcaacttgaaggactgacaaatgatgttcacacattggaagcttatggtgtagacagtttaaaaacaagataccctgatttgcttccctttcctcagatcccaaatgacaggttcacttctgaggttgctatgagggtgatggaatgtactgcctgtatcataataaaacttgaaaattttatgcaacaaaaagtgtgaagatatttaacgaaaaaaaaggtagatcttgaatgtgttgtagcacgaataaattgctgtacttcattaagcttcattgccaattagctaggaattgttaagcacattgcagattgttcttggagaattctggagttgttatgaacatgaataccaacggaaaaccttaactgaatctaaaagaaaactattttgaagatggtggtgagctgcaaaatagctggatggatttgaatgattgggatgatacatcattgaactgcactttatataaccaaagcttagcagtttgttagataagagtctatgtatgtctctggttaggatgaagttaattttatgtttttaacatggtatttttgaaggagctaatgaaacactggacatataattggtttaaacataaggggaattaagtctttgtagtctgtcatttttttaagtggatcctcttggatgcgttattttctcatcagctggctctgatcatgaatttgttgtaattttatgttgtactcagtgcatttaagaaatggtagagtattttaatcctattacttgactaagagtgtgaaggtagtactttttagagtgcactgagtgcactttacatctttatttaaatttttttttaacatcttatgtttacaggcttcctgtttgatgaagatagcaacggaaaactcaaaatggtggcagttcttattaccagttgttagtattgtttctggaaactgcttgccaagacaacatttattaactgttagaacacttgctttatgtttgtgtgtacatattttccacaaatgttataatttatatagtgtggttgaacaggatgcaatcttttgttgtctaaaggtgctgcagttaaaaaaaaaacaaccttttctttcaatatggcatgtagtggagtttttttaactttaaaaacatcaaaaattgttaaaatcattgtgttatctagtagtttataattatcggcttatatttccccatgaatgatcagaactgacatttaattcatgtttgtctcgccatgcttctttactttaacatatttcttttgcagaatgtaaaaggtaatgataattagtttatataagtgtactggctgtaaatgatgctaaatatactttatgcaattaagggcttacagaacatgttgaaactttttttacttttattgggaataaggaatgtttgcacctccacattttattgcttctggatgtgaaatcatgtaattatttctgctgttatataaagtgccatacttttaataaaggaaaatgtacatatgaaatcat

SEQ ID NO: 29606 - DNA, 7774 bp, Homo sapiens
  source 1..7774: mol_type = unassigned DNA
gtaaccgccgggccaagatggctgcagaggaaggggtcgcgagtgctgcttccgccggcggtagctggggcaccgcggccatggggcgggttctaccgatgctgttggtgccagtccccgccgaggcgatggggcagctcggctcccgggcgcagctgcgcacacagccggaggctctggggagcctgacggctgcgggcagcctccaagtgctttctttgacgcctggcagccggggcgggggtcgctgctgcctggagggccccttctggcactttctatgggaggattctcgtaacagcagcacaccaactgaaaagcccaaactgctcgctcttggtgaaaattatgaactgcttatctatgaatttaatttgaaagatggaagatgtgatgcaaccattttgtatagctgtagtagggaggcattgcaaaagctcattgacgatcaagatatcagtatttccttattgtctttgagaatcctgtcatttcacaataacacatcattactgttcatcaacaaatgtgtcatcctacatattatatttcctgaaagagatgctgcaattagagtactcaactgtttcacacttcccttgcctgcacaggcagtggacatgattattgacacgcagctctgcagaggaattctttttgttttgagtagtttaggctggatctacatttttgatgttgtggatggtacatatgtagctcatgtggatttagcacttcacaaagaagacatgtgtaatgagcagcaacaggagccagccaagatttcttcatttacttcactgaaagtttctcaagacctcgatgttgcagtgattgtcagctcctccaactccgcagttgctcttaacttaaatttgtatttcaggcaacacccaggacacctactgtgtgaaagaatactagaagatcttcctattcaaggacctaagggcgtagatgaagatgatcctgttaactctgcctacaacatgaaactggccaagttttccttccaaattgataggtcttggaaagcccagctatcatcattgaatgaaacaataaagaactccaaactggaggtttcctgttgtgctccatggttccaggatattttgcatttggagtcacctgaatctggtaaccacagtacaagtgtgcagagctgggccttcattccacaggacataatgcatgggcaatataatgttctacagaaagatcatgccaagaccagtgatccaggaagatcatggaaaataatgcacatcagtgaacaagaggaacccatagagcttaaatgtgtgtctgtgacaggattcactgcactgtttacttgggaagtggaaaggatgggctataccattaccctctgggatttggagacccagggcatgcagtgtttttcccttggcacaaagtgtattcctgtagacagtagtggagaccagcagctgtgctttgttttgacagagaatggactctctctgattttgtttggtttgactcaagaagagtttttaaacagactcatgatccatggaagtgccagcactgtggacactctttgtcatctcaatggctggggaaggtgctcaattcccatacatgcactagaggccgggatagaaaatcgtcagctggacacagtaaatttctttttgaagagcaaggaaaatctttttaatccatcctcaaaatcttctgtatctgatcagtttgatcacttgtcatcccatttatatttaagaaatgtggaagagctgataccagcattggatttactttgctcggcaattagagaaagttattctgaaccccaaagcaaacacttttcagaacaattgcttaatcttacactgtctttccttaacaaccaaataaaggagcttttcattcacactgaagaactagatgaacatctgcaaaaaggagtgaacattttgactagctacattaatgaacttcgaaccttcatgataaagtttccttggaagctaacagatgctatagatgaatatgatgtacatgaaaatgtccccaaagtaaaggagagcaatatatggaagaaactcagctttgaggaagttattgccagcgccattttaaacaacaaaataccagaggcacagactttcttcaggattgatagtcattctgctcaaaaacttgaggagcttattggcataggcctaaatttggtctttgacaatttaaaaaagaacaatataaaggaagcctctgaacttttgaagaatatggggtttgatgtaaaaggccaattgctcaagatctgcttctatacaactaataaaaatatacgtgactttttggttgaaattttaaaagaaaaaaattatttttctgaaaaagagaaaagaactatagacttcgtgcatcaagttgagaagctttatttgggacatttccaagaaaatatgcaaatccagtcatttcccaggtactggataaaggaacaagattttttcaagcacaagtctgttttggactcattcctgaaatatgattgtaaagatgaatttaacaaacaggaccatagaattgtgttaaattgggctctgtggtgggatcaactaacacaagaatccatccttctccccaggataagtccagaagaatacaaatcatattcccctgaagccctctggagatacctcacagctcgccatgattggttaaacattatcttatggattggagaatttcaaacccagcatagttatgcttcacttcagcagaacaaatggccccttctgactgttgatgttattaaccagaatacttcctgtaacaactacatgaggaatgaaattttagataagctggccaggaatggggtttttttggcatctgaactggaagactttgaatgcttcctcctaagactgagccgtattggaggtgtaatacaggataccctccctgttcaaaactacaagaccaaagaaggttgggatttccattctcaattcattctctattgtttggagcacagtctgcagcatcttctttatgtctaccttgactgttacaaacttagtcctgaaaattgtccctttttggaaaaaaaagagttacatgaagcacacccttggtttgaatttttagttcagtgtcgacaagttgccagtaacttaacagatcccaaactgatcttccaggctagccttgcaaatgctcagattttgattcccaccaatcaggccagtgtaagcagtatgctattggaaggacataccctcctggcccttgctactacaatgtattctcctgggggtgtcagtcaggttgttcagaatgaagaaaatgaaaactgtttgaagaaagtggatccccagctattgaagatggcattaactccttaccccaagctaaaaactgctctcttcccacagtgcactcctcctagtgtcctgccatctgatattacaatctaccaccttattcagtcattatcaccctttgatcctagcagattgtttggctggcagtctgctaacacactagctataggagatgcatggagtcatctcccacatttctctagccctgacctggttaataaatatgctatagtggaacgtctgaattttgcttattatttacataatgggcggccatcatttgcatttggtacttttctggtccaggaattaatcaagagcaagactcccaagcagctgatccagcaagtaggcaatgaagcctatgttatagggctctcctccttccacataccttcaataggagctgcatgtgtttgtttcttagaattgcttggccttgacagcctcaagctcagagttgatatgaaagtggccaatataattttgagctacaagtgcagaaatgaagatgctcagtacagctttatcagagagtctgtagccgaaaaactatctaaactagctgatggtgaaaagacaaccacagaagaattgcttgttctcttagaagaaggtacatggaacagcattcagcaacaggaaataaagaggttatccagtgaatctagcagccaatgggcattagtggtgcagttctgcaggctacacaatatgaaactaagcatatcttaccttagagaatgtgccaaagcaaatgattggctgcagttcattattcacagccaactccacaactaccacccagcagaggtgaaatcccttatccagtacttcagcccagtcattcaagaccacttaaggctggcttttgagaacttgccctcagtgcccacctccaaaatggacagcgatcaagtctgcaataagtgcccccaggaacttcaaggaagcaaacaagagatgaccgatttatttgaaattctgctccaatgctcagaggagccagactcctggcactggcttctggttgaagcagtgaaacaacaggcccctatcctcagtgttctggcctcatgtctccagggtgccagtgccatttcttgtctctgtgtttggatcatcacttctgtggaggacaatgttgcaactgaagcaatgggacacattcaggactcaacagaggaccatacctggaaccttgaggatctttcagtcatctggagaacattattaacaagacaaaagagcaaaactctcatcagaggtttccagcttttctttaaggattccccgttactactggtgatggagatgtatgaactgtgtatgttcttcaggaattataaagaagctgaagctaaacttctggagtttcagaagagccttgaaacgcttaacacagcagccacaaaggtccaccctgtcatccctgccatgtggctggaggatcaggtgtgtttccttttgaagcttatgctacagcagtgtaagacccagtatgagctggggaagcttttacagctctttgttgaaagagagcatctcttctctgatggtccagatgtgaaaaagctttgcatcctttgccagattttgaaggatacatccatagccattaatcatacaattattaccagctacagcattgagaatcttcagcatgaatgtagatctattttggaaagactgcagacagatggacaattcgctttggccaggagggtagcagaattagctgagttacctgtggacaacttggttattaaagagataacacaggaaatgcagaccctaaaacacattgaacagtggtcactaaaacaagcaagaattgacttctggaaaaaatgccatgagaattttaagaaaaattcaatttcaagcaaagcagcttcttcctttttctcaacccaggcccatgtggcatgtgagcacccaactggatggagcagcatggaggagcgccatctgctgctcaccttggcagggcactggcttgcccaggaggacgtggtgcccttggataagctggaggagctggagaagcagatctggctgtgccgcatcacccagcacactcttggaagaaatcaggaggaaacagagcccagattttctcgacagatctcaactagtggtgaactttcctttgatagtttagccagtgagttttccttctccaagttggctgctctgaacacatcaaaatacttagaacttaacagccttccatccaaagagacatgcgagaatagattggattggaaagagcaggagtcactaaactttttgattgggcgcctactggatgatggctgtgtgcatgaagcaagtagagtatgccggtattttcatttttataatccagatgtcgccttggtattgcactgcagagcactggcctcaggggaagctagtatggaggatctgcacccagagatccatgctctcctacaaagtgctgagctgcttgaggaagaagcacccgacattcccctaaggagagtccacagcacttcaagtctggatagtcagaagtttgtgacagtgccctccagtaatgaagtggtaactaacctggaagtgctgacaagcaaatgcctccatgggaagaactactgtcgacaggtcctctgtctgtatgatcttgccaaggagttgggctgttcctacacagatgttgctgctcaggatggtgaagccatgctccggaaaatcttggcctctcagcagcctgaccgatgcaaacgagcccaggccttcatcagcacacagggccttaagccagatactgtggctgaactcgtggcagaagaggtgacacgggagctgcttacttcatcacagggaacaggacataagcagatgttcaacccaacagaggaaagccagacatttcttcagctgaccactctgtgtcaagaccgcacattggtaggcatgaagttgttggataagatttcctccgttccccatggggaactgtcttgcaccacagagctcctgatcctggcccatcattgcttcaccctgacgtgccacatggagggcatcatccgagtcctacaggccgcccacatgctcacagataaccacctggcccccagtgaggagtatgggctggtggtacggctcctcactggcattggaaggtacaacgagatgacatacatatttgatttgctgcataaaaagcactactttgaagtgctaatgaggaagaagttggatccgagtggtaccctgaaaacagccctgctggactacatcaaacgctgccgtcctggagacagtgaaaagcacaatatgattgccctgtgcttcagcatgtgccgggagattggcgagaaccacgaggcagctgcccgcatccaactgaaattgattgagtctcagccctgggaggacagcctcaaggatgggcaccagctgaaacaactgctgctgaaggccctgactctgatgttggatgcagcagagagttatgccaaggactcctgtgtgcgacaggcccagcactgtcagcggctcaccaagttgataactctgcagattcactttctgaacactggccagaacacaatgctcatcaacttgggccgccacaagctgatggactgtattctggccctacctcggttctaccaggcttctattgtggctgaggcctacgattttgttccagattgggctgaaattttataccagcaagtgattcttaaaggagactttaattacttggaagaatttaagcagcaaaggttattaaagtccagtatatttgaagagatttccaaaaaatataaacaacatcagcctactgacatggtcatggaaaacctgaagaaattactcacatattgtgaagatgtttacctgtattacaagttggcatacgaacacaagttttatgaaattgtaaatgtgcttctgaaggaccctcagacaggttgctgtctaaaggacatgctagcaggttagatgatttcataggtgtctgttttcttgtactgttagcagattctgacagatgtgatgagaagaagaatgcattggagatctttgctaaagttgaacaatcccggtactgtaccatatcagtcctttgtgggtagtaggtagcaagtaagaaacttttcaggaggaaattcctatttaaaatagattgattttagatgattgttcatccacaccattttatatagatactagtattaagatcaaaagcttcctcttcctcaggacagcttctactttagatgatccaataatgattaaagaatacctgtacctgcagattccagtttcaaagaaatttaattattatttacacagttaaggaacaggtgatacattttcatttgttagaaactgatctttctgtaataaaatagattttcaattca

SEQ ID NO: 29607 - DNA, 7288 bp, Homo sapiens
  source 1..7288: mol_type = unassigned DNA
agtgaccggaagtaaccgccgggccaagatggctgcagaggaaggggtcgcgagtgctgcttccgccggcggtagctggggcaccgcggccatggggcgggttctaccgatgctgttggtgccagtccccgccgaggcgatggggcagctcggctcccgggcgcagctgcgcacacagccggaggctctggggagcctgacggctgcgggcagcctccaagtgctttctttgacgcctggcagccggggcgggggtcgctgctgcctggagggccccttctggcactttctatgggaggattctcgtaacagcagcacaccaactgaaaagcccaaactgctcgctcttggtgaaaattatgaactgcttatctatgaatttaatttgaaagatggaagatgtgatgcaaccattttgtatagctgtagtagggaggcattgcaaaagctcattgacgatcaagatatcagtatttccttattgtctttgagaatcctgtcatttcacaataacacatcattactgttcatcaacaaatgtgtcatcctacatattatatttcctgaaagagatgctgcaattagagtactcaactgtttcacacttcccttgcctgcacaggcagtggacatgattattgacacgcagctctgcagaggaattctttttgttttgagtagtttaggctggatctacatttttgatgttgtggatggtacatatgtagctcatgtggatttagcacttcacaaagaagacatgtgtaatgagcagcaacaggagccagccaagatttcttcatttacttcactgaaagtttctcaagacctcgatgttgcagtgattgtcagctcctccaactccgcagttgctcttaacttaaatttgtatttcaggcaacacccaggacacctactgtgtgaaagaatactagaagatcttcctattcaaggacctaagggcgtagatgaagatgatcctgttaactctgcctacaacatgaaactggccaagttttccttccaaattgataggtcttggaaagcccagctatcatcattgaatgaaacaataaagaactccaaactggaggtttcctgttgtgctccatggttccaggatattttgcatttggagtcacctgaatctggtaaccacagtacaagtgtgcagagctgggccttcattccacaggacataatgcatgggcaatataatgttctacagaaagatcatgccaagaccagtgatccaggaagatcatggaaaataatgcacatcagtgaacaagaggaacccatagagcttaaatgtgtgtctgtgacaggattcactgcactgtttacttgggaagtggaaaggatgggctataccattaccctctgggatttggagacccagggcatgcagtgtttttcccttggcacaaagtgtattcctgtagacagtagtggagaccagcagctgtgctttgttttgacagagaatggactctctctgattttgtttggtttgactcaagaagagtttttaaacagactcatgatccatggaagtgccagcactgtggacactctttgtcatctcaatggctggggaaggtgctcaattcccatacatgcactagaggccgggatagaaaatcgtcagctggacacagtaaatttctttttgaagagcaaggaaaatctttttaatccatcctcaaaatcttctgtatctgatcagtttgatcacttgtcatcccatttatatttaagaaatgtggaagagctgataccagcattggatttactttgctcggcaattagagaaagttattctgaaccccaaagcaaacacttttcagaacaattgcttaatcttacactgtctttccttaacaaccaaataaaggagcttttcattcacactgaagaactagatgaacatctgcaaaaaggagtgaacattttgactagctacattaatgaacttcgaaccttcatgataaagtttccttggaagctaacagatgctatagatgaatatgatgtacatgaaaatgtccccaaagtaaaggagagcaatatatggaagaaactcagctttgaggaagttattgccagcgccattttaaacaacaaaataccagaggcacagactttcttcaggattgatagtcattctgctcaaaaacttgaggagcttattggcataggcctaaatttggtctttgacaatttaaaaaagaacaatataaaggaagcctctgaacttttgaagaatatggggtttgatgtaaaaggccaattgctcaagatctgcttctatacaactaataaaaatatacgtgactttttggttgaaattttaaaagaaaaaaattatttttctgaaaaagagaaaagaactatagacttcgtgcatcaagttgagaagctttatttgggacatttccaagaaaatatgcaaatccagtcatttcccaggtactggataaaggaacaagattttttcaagcacaagtctgttttggactcattcctgaaatatgattgtaaagatgaatttaacaaacaggaccatagaattgtgttaaattgggctctgtggtgggatcaactaacacaagaatccatccttctccccaggataagtccagaagaatacaaatcatattcccctgaagccctctggagatacctcacagctcgccatgattggttaaacattatcttatggattggagaatttcaaacccagcatagttatgcttcacttcagcagaacaaatggccccttctgactgttgatgttattaaccagaatacttcctgtaacaactacatgaggaatgaaattttagataagctggccaggaatggggtttttttggcatctgaactggaagactttgaatgcttcctcctaagactgagccgtattggaggtgtaatacaggataccctccctgttcaaaactacaagaccaaagaaggttgggatttccattctcaattcattctctattgtttggagcacagtctgcagcatcttctttatgtctaccttgactgttacaaacttagtcctgaaaattgtccctttttggaaaaaaaagagttacatgaagcacacccttggtttgaatttttagttcagtgtcgacaagttgccagtaacttaacagatcccaaactgatcttccaggctagccttgcaaatgctcagattttgattcccaccaatcaggccagtgtaagcagtatgctattggaaggacataccctcctggcccttgctactacaatgtattctcctgggggtgtcagtcaggttgttcagaatgaagaaaatgaaaactgtttgaagaaagtggatccccagctattgaagatggcattaactccttaccccaagctaaaaactgctctcttcccacagtgcactcctcctagtgtcctgccatctgatattacaatctaccaccttattcagtcattatcaccctttgatcctagcagattgtttggctggcagtctgctaacacactagctataggagatgcatggagtcatctcccacatttctctagccctgacctggttaataaatatgctatagtggaacgtctgaattttgcttattatttacataatgggcggccatcatttgcatttggtacttttctggtccaggaattaatcaagagcaagactcccaagcagctgatccagcaagtaggcaatgaagcctatgttatagggctctcctccttccacataccttcaataggagctgcatgtgtttgtttcttagaattgcttggccttgacagcctcaagctcagagttgatatgaaagtggccaatataattttgagctacaagtgcagaaatgaagatgctcagtacagctttatcagagagtctgtagccgaaaaactatctaaactagctgatggtgaaaagacaaccacagaagaattgcttgttctcttagaagaaggtacatggaacagcattcagcaacaggaaataaagaggttatccagtgaatctagcagccaatgggcattagtggtgcagttctgcaggctacacaatatgaaactaagcatatcttaccttagagaatgtgccaaagcaaatgattggctgcagttcattattcacagccaactccacaactaccacccagcagaggtgaaatcccttatccagtacttcagcccagtcattcaagaccacttaaggctggcttttgagaacttgccctcagtgcccacctccaaaatggacagcgatcaagtctgcaataagtgcccccaggaacttcaaggaagcaaacaagagatgaccgatttatttgaaattctgctccaatgctcagaggagccagactcctggcactggcttctggttgaagcagtgaaacaacaggcccctatcctcagtgttctggcctcatgtctccagggtgccagtgccatttcttgtctctgtgtttggatcatcacttctgtggaggacaatgttgcaactgaagcaatgggacacattcaggactcaacagaggaccatacctggaaccttgaggatctttcagtcatctggagaacattattaacaagacaaaagagcaaaactctcatcagaggtttccagcttttctttaaggattccccgttactactggtgatggagatgtatgaactgtgtatgttcttcaggaattataaagaagctgaagctaaacttctggagtttcagaagagccttgaaacgcttaacacagcagccacaaaggtccaccctgtcatccctgccatgtggctggaggatcaggtgtgtttccttttgaagcttatgctacagcagtgtaagacccagtatgagctggggaagcttttacagctctttgttgaaagagagcatctcttctctgatggtccagatgtgaaaaagctttgcatcctttgccagattttgaaggatacatccatagccattaatcatacaattattaccagctacagcattgagaatcttcagcatgaatgtagatctattttggaaagactgcagacagatggacaattcgctttggccaggagggtagcagaattagctgagttacctgtggacaacttggttattaaagagataacacaggaaatgcagaccctaaaacacattgaacagtggtcactaaaacaagcaagaattgacttctggaaaaaatgccatgagaattttaagaaaaattcaatttcaagcaaagcagcttcttcctttttctcaacccaggcccatgtggcatgtgagcacccaactggatggagcagcatggaggagcgccatctgctgctcaccttggcagggcactggcttgcccaggaggacgtggtgcccttggataagctggaggagctggagaagcagatctggctgtgccgcatcacccagcacactcttggaagaaatcaggaggaaacagagcccagattttctcgacagatctcaactagtggtgaactttcctttgatagtttagccagtgagttttccttctccaagttggctgctctgaacacatcaaaatacttagaacttaacagccttccatccaaagagacatgcgagaatagattggattggaaagagcaggagtcactaaactttttgattgggcgcctactggatgatggctgtgtgcatgaagcaagtagagtatgccggtattttcatttttataatccagatgtcgccttggtattgcactgcagagcactggcctcaggggaagctagtatggaggatctgcacccagagatccatgctctcctacaaagtgctgagctgcttgaggaagaagcacccgacattcccctaaggagagtccacagcagacataagcagatgttcaacccaacagaggaaagccagacatttcttcagctgaccactctgtgtcaagaccgcacattggtaggcatgaagttgttggataagatttcctccgttccccatggggaactgtcttgcaccacagagctcctgatcctggcccatcattgcttcaccctgacgtgccacatggagggcatcatccgagtcctacaggccgcccacatgctcacagataaccacctggcccccagtgaggagtatgggctggtggtacggctcctcactggcattggaaggtacaacgagatgacatacatatttgatttgctgcataaaaagcactactttgaagtgctaatgaggaagaagttggatccgagtggtaccctgaaaacagccctgctggactacatcaaacgctgccgtcctggagacagtgaaaagcacaatatgattgccctgtgcttcagcatgtgccgggagattggcgagaaccacgaggcagctgcccgcatccaactgaaattgattgagtctcagccctgggaggacagcctcaaggatgggcaccagctgaaacaactgctgctgaaggccctgactctgatgttggatgcagcagagagttatgccaaggactcctgtgtgcgacaggcccagcactgtcagcggctcaccaagttgataactctgcagattcactttctgaacactggccagaacacaatgctcatcaacttgggccgccacaagctgatggactgtattctggccctacctcggttctaccaggcttctattgtggctgaggcctacgattttgttccagattgggctgaaattttataccagcaagtgattcttaaaggagactttaattacttggaagaatttaagcagcaaaggttattaaagtccagtatatttgaagagatttccaaaaaatataaacaacatcagcctactgacatggtcatggaaaacctgaagaaattactcacatattgtgaagatgtttacctgtattacaagttggcatacgaacacaagttttatgaaattgtaaatgtgcttctgaaggaccctcagacaggttgctgtctaaaggacatgctagcaggttagatgatttcataggtgtctgttttcttgtactgttagcagattctgacagatgtgatgagaagaagaatgcattggagatctttgctaaagttgaacaatcccggtactgtaccatatcagtcctttgtgggtagtaggtagcaagtaagaaacttttcaggaggaaattcctatttaaaatagattgattttagatgattgttcatccacaccattttatatagatactagtattaagatcaaaagcttcctcttcctcaggacagc

SEQ ID NO: 29608 - DNA, 6426 bp, Homo sapiens
  source 1..6426: mol_type = unassigned DNA
gaaagtgaccggaagtaaccgccgggccaagatggctgcagaggaaggggtcgcgagtgctgcttccgccggcggtagctggggcaccgcggccatggggcgggttctaccgatgctgttggtgccagtccccgccgaggcgatggggcagctcggctcccgggcgcagctgcgcacacagccggaggctctggggagcctgacggctgcgggcagcctccaagtgctttctttgacgcctggcagccggggcgggggtcgctgctgcctggagggccccttctggcactttctatgggaggattctcgtaacagcagcacaccaactgaaaagcccaaactgctcgctcttggtgaaaattatgaactgcttatctatgaatttaatttgaaagatggaagatgtgatgcaaccattttgtatagctgtagtagggaggcattgcaaaagctcattgacgatcaagatatcagtatttccttattgtctttgagaatcctgtcatttcacaataacacatcattactgttcatcaacaaatgtgtcatcctacatattatatttcctgaaagagatgctgcaattagagtactcaactgtttcacacttcccttgcctgcacaggcagtggacatgattattgacacgcagctctgcagaggaattctttttgttttgagtagtttaggctggatctacatttttgatgttgtggatggtacatatgtagctcatgtggatttagcacttcacaaagaagacatgtgtaatgagcagcaacaggagccagccaagatttcttcatttacttcactgaaagtttctcaagacctcgatgttgcagtgattgtcagctcctccaactccgcagttgctcttaacttaaatttgtatttcaggcaacacccaggacacctactgtgtgaaagaatactagaagatcttcctattcaaggacctaagggcgtagatgaagatgatcctgttaactctgcctacaacatgaaactggccaagttttccttccaaattgataggtcttggaaagcccagctatcatcattgaatgaaacaataaagaactccaaactggaggtttcctgttgtgctccatggttccaggatattttgcatttggagtcacctgaatctggtaaccacagtacaagtgtgcagagctgggccttcattccacaggacataatgcatgggcaatataatgttctacagaaagatcatgccaagaccagtgatccaggaagatcatggaaaataatgcacatcagtgaacaagaggaacccatagagcttaaatgtgtgtctgtgacaggattcactgcactgtttacttgggaagtggaaaggatgggctataccattaccctctgggatttggagacccagggcatgcagtgtttttcccttggcacaaagtgtattcctgtagacagtagtggagaccagcagctgtgctttgttttgacagagaatggactctctctgattttgtttggtttgactcaagaagagtttttaaacagactcatgatccatggaagtgccagcactgtggacactctttgtcatctcaatggctggggaaggtgctcaattcccatacatgcactagaggccgggatagaaaatcgtcagctggacacagtaaatttctttttgaagagcaaggaaaatctttttaatccatcctcaaaatcttctgtatctgatcagtttgatcacttgtcatcccatttatatttaagaaatgtggaagagctgataccagcattggatttactttgctcggcaattagagaaagttattctgaaccccaaagcaaacacttttcagaacaattgcttaatcttacactgtctttccttaacaaccaaataaaggagcttttcattcacactgaagaactagatgaacatctgcaaaaaggagtgaacattttgactagctacattaatgaacttcgaaccttcatgataaagtttccttggaagctaacagatgctatagatgaatatgatgtacatgaaaatgtccccaaagtaaaggagagcaatatatggaagaaactcagctttgaggaagttattgccagcgccattttaaacaacaaaataccagaggcacagactttcttcaggattgatagtcattctgctcaaaaacttgaggagcttattggcataggcctaaatttggtctttgacaatttaaaaaagaacaatataaaggaagcctctgaacttttgaagaatatggggtttgatgtaaaaggccaattgctcaagatctgcttctatacaactaataaaaatatacgtgactttttggttgaaattttaaaagaaaaaaattatttttctgaaaaagagaaaagaactatagacttcgtgcatcaagttgagaagctttatttgggacatttccaagaaaatatgcaaatccagtcatttcccaggtactggataaaggaacaagattttttcaagcacaagtctgttttggactcattcctgaaatatgattgtaaagatgaatttaacaaacaggaccatagaattgtgttaaattgggctctgtggtgggatcaactaacacaagaatccatccttctccccaggataagtccagaagaatacaaatcatattcccctgaagccctctggagatacctcacagctcgccatgattggttaaacattatcttatggattggagaatttcaaacccagcatagttatgcttcacttcagcagaacaaatggccccttctgactgttgatgttattaaccagaatacttcctgtaacaactacatgaggaatgaaattttagataagctggccaggaatggggtttttttggcatctgaactggaagactttgaatgcttcctcctaagactgagccgtattggaggtgtaatacaggataccctccctgttcaaaactacaagaccaaagaaggttgggatttccattctcaattcattctctattgtttggagcacagtctgcagcatcttctttatgtctaccttgactgttacaaacttagtcctgaaaattgtccctttttggaaaaaaaagagttacatgaagcacacccttggtttgaatttttagttcagtgtcgacaagttgccagtaacttaacagatcccaaactgatcttccaggctagccttgcaaatgctcagattttgattcccaccaatcaggccagtgtaagcagtatgctattggaaggacataccctcctggcccttgctactacaatgtattctcctgggggtgtcagtcaggttgttcagaatgaagaaaatgaaaactgtttgaagaaagtggatccccagctattgaagatggcattaactccttaccccaagctaaaaactgctctcttcccacagtgcactcctcctagtgtcctgccatctgatattacaatctaccaccttattcagtcattatcaccctttgatcctagcagattgtttggctggcagtctgctaacacactagctataggagatgcatggagtcatctcccacatttctctagccctgacctggttaataaatatgctatagtggaacgtctgaattttgcttattatttacataatgggcggccatcatttgcatttggtacttttctggtccaggaattaatcaagagcaagactcccaagcagctgatccagcaagtaggcaatgaagcctatgttatagggctctcctccttccacataccttcaataggagctgcatgtgtttgtttcttagaattgcttggccttgacagcctcaagctcagagttgatatgaaagtggccaatataattttgagctacaagtgcagaaatgaagatgctcagtacagctttatcagagagtctgtagccgaaaaactatctaaactagctgatggtgaaaagacaaccacagaagaattgcttgttctcttagaagaaggtacatggaacagcattcagcaacaggaaataaagaggttatccagtgaatctagcagccaatgggcattagtggtgcagttctgcaggctacacaatatgaaactaagcatatcttaccttagagaatgtgccaaagcaaatgattggctgcagttcattattcacagccaactccacaactaccacccagcagaggtgaaatcccttatccagtacttcagcccagtcattcaagaccacttaaggctggcttttgagaacttgccctcagtgcccacctccaaaatggacagcgatcaagtctgcaataagtgcccccaggaacttcaaggaagcaaacaagagatgaccgatttatttgaaattctgctccaatgctcagaggagccagactcctggcactggcttctggttgaagcagtgaaacaacaggcccctatcctcagtgttctggcctcatgtctccagggtgccagtgccatttcttgtctctgtgtttggatcatcacttctgtggaggacaatgttgcaactgaagcaatgggacacattcaggactcaacagaggaccatacctggaaccttgaggatctttcagtcatctggagaacattattaacaagacaaaagagcaaaactctcatcagaggtttccagcttttctttaaggattccccgttactactggtgatggagatgtatgaactgtgtatgttcttcaggaattataaagaagctgaagctaaacttctggagtttcagaagagccttgaaacgcttaacacagcagccacaaaggtccaccctgtcatccctgccatgtggctggaggatcaggtgtgtttccttttgaagcttatgctacagcagtgtaagacccagtatgagctggggaagcttttacagctctttgttgaaagagagcatctcttctctgatggtccagatgtgaaaaagctttgcatcctttgccagattttgaaggatacatccatagccattaatcatacaattattaccagctacagcattgagaatcttcagcatgaatgtagatctattttggaaagactgcagacagatggacaattcgctttggccaggagggtagcagaattagctgagttacctgtggacaacttggttattaaagagataacacaggaaatgcagaccctaaaacacattgaacagtggtcactaaaacaagcaagaattgacttctggaaaaaatgccatgagaattttaagaaaaattcaatttcaagcaaagcagcttcttcctttttctcaacccaggcccatgtggcatgtgagcacccaactggatggagcagcatggaggagcgccatctgctgctcaccttggcagggcactggcttgcccaggaggacgtggtgcccttggataagctggaggagctggagaagcagatctggctgtgccgcatcacccagcacactcttggaagaaatcaggaggaaacagagcccagattttctcgacagatctcaactagtggtgaactttcctttgatagtttagccagtgagttttccttctccaagttggctgctctgaacacatcaaaatacttagaacttaacagccttccatccaaagagacatgcgagaatagattggattggaaagagcaggagtcactaaactttttgattgggcgcctactggatgatggctgtgtgcatgaagcaagtagagtatgccggtattttcatttttataatccagatgtcgccttggtattgcactgcagagcactggcctcaggggaagctagtatggaggatctgcacccagagatccatgctctcctacaaagtgctgagctgcttgaggaagaagcacccgacattcccctaaggagagtccacagcacttcaagtctggatagtcagaagtttgtgacagtgccctccagtaatgaagtggtaactaacctggaagtgctgacaagcaaatgcctccatgggaagaactactgtcgacaggtcctctgtctgtatgatcttgccaaggagttgggctgttcctacacagatgttgctgctcaggatggtgaagccatgctccggaaaatcttggcctctcagcagcctgaccgatgcaaacgagcccaggccttcatcagcacacagggccttaagccagatactgtggctgaactcgtggcagaagaggtgacacgggagctgcttacttcatcacagggaacaggtgccctaccccccggggattcccaacctctctgacagcattctctagttcccagtgttaaggatttggatgttgtgcttatatacatcctgtatgtggttctctcaagtttctggattgcagtaatgtattttgtttaaataaaacaaaatacatgctttattttttacaaaatacatgtacaaaatac

SEQ ID NO: 29609 - DNA, 4820 bp, Homo sapiens
  source 1..4820: mol_type = unassigned DNA
accagtaccagcccccaccttccgtctgtgcatgttttcttcagtcctggaaggaaatcataagtgatttgccccaaaaggattgctgttgaaaatggagcaagagccacaaaatggagaacctgctgaaattaagatcatcagagaagcatataagaaggcctttttatttgttaacaaaggtctgaatacagatgaattaggtcagaaggaagaagcaaagaactactataagcaaggaataggacacctgctcagagggatcagcatttcatcaaaagagtctgaacacacaggtcctgggtgggaatctgctagacagatgcaacagaaaatgaaagaaactctacagaatgtacgcaccaggctggaaattctagagaagggtcttgccacttctctgcagaatgatcttcaggaggtgcccaagttatatccagaatttccacctaaagacatgtgtgaaaaattaccagagcctcagtcttttagttcagctcctcagcatgctgaagtaaatggaaacacctcaactccaagtgcaggggcagttgctgcacctgcttctctgtctttaccatcacaaagttgtccagcagaagctcctcctgcttatactcctcaagctgctgaaggtcactacactgtatcctatggaacagattctggggagttttcatcagttggagaggagttttataggaatcattctcagccaccgcctcttgagaccttagggctggatgcagatgaattgattttgataccaaatggagtacagattttttttgtaaatcctgcaggggaggttagtgcaccttcgtatcctgggtaccttcgaattgtgaggtttttggataattctctcgatacggttctaaaccgtcctcccgggtttcttcaggtttgtgactggttatatcctctagttcctgatagatctccggttctgaaatgtactgcgggagcctacatgtttcctgatacaatgctacaagcagcaggatgctttgtgggggtcgtcctgtcctctgagttaccagaggatgatagagagctctttgaggatctgttaaggcaaatgtctgaccttcggctccaggccaactggaacagagcagaagaagaaaatgaattccaaatccctggaagaactagaccctcctctgaccaactaaaagaagcctctggcactgatgtgaaacagttggaccaaggcaataaggatgtacgtcataaaggaaaacgtggaaaaagggctaaagatacttcaagtgaagaagttaacctgagtcacattgtaccatgtgagccagttccagaagaaaagccaaaagaattacctgaatggagtgaaaaagtggctcacaacattttgtcaggtgcttcctgggtgagttggggtttagtcaaaggtgctgagattactggtaaggcaatccagaaaggtgcttctaaactccgagagcggattcaaccagaagaaaaacccgtggaagttagtccagctgtcaccaagggactttatatagcgaagcaagctacaggaggagcagcaaaagtcagtcagttcctggttgatggagtttgcactgtagcaaattgcgttggaaaagaactagctccacatgtcaagaagcatggaagcaaacttgttccagaatctcttaaaaaagacaaagatgggaaatctcctctggatggtgctatggttgtagcagcaagtagtgttcaaggattttcaactgtctggcaaggattggaatgtgcagctaaatgcatcgttaacaatgtttcagcagaaactgtacaaactgtcagatacaaatacggatataatgcaggagaagctacccaccatgcggtggattctgcggtcaatgttggcgtaactgcctacaatattaacaacattggtatcaaagcaatggtgaagaaaactgcaacacaaacaggacacactctccttgaggactatcagatagttgataattctcagagggaaaatcaagaaggagcagcaaatgtcaacgtgagaggggagaaggatgagcagacgaaggaagtaaaggaggcaaagaagaaagataaatgatgaagtgctgggaatcacttataccaaagccttatgaaatggatgaaattttgttaaataggcaaatgtggaattcctcacagattaaccagtattttttaaatgtattcattcctacaaattaactttcataaattttatggcatgtcttctatttaaaaggaaaagaataagtattcttgcatctggccttagaaatgtgaagttatattctcaagtttatttttttccaagtgtagctaaaatatttttgcaggtaaaataaagctgatagtacatgtgttgttcaaaccttgttaaacctaatattgaactatttttatatctgctgtctttcagaaggcaaataggaaactatatatttgcttaaaaattggcatttagtaaccttaattctttttatagaaggaatgacttaaagtattgtcccctctttttgcactaattgtggatttttttagatgcttctcaaaattttcagtgtgtaagctaaacaaaaactaaaactaagaattctcaaaaaaacttgttcaaaacagggaaagactgatgaaaagtaaaatggactacttttgtaacttacctgtttgttaggaaatggaatggtctctttgatttaaaataaataaaaatagattattacgtcttttgtattgagactgtattgttatgagcctaggaaatttgggaacatgattgtattgtattaaaattcgaagtgattattatcagcttaattggattaaaaaagtacttcaagaaattattttatcatatctgcttctgtttttccaaaaggttaaaacttgtaaaaaaaatatatataaacaattgagtttactaatggtaaacatttttattctgggattcggtcattggaatttatattaaaagacaagttattaaaaaggaaaggttctattcataatcagggtaaagaatatgaaaaccttagacgtaatccatggtggataggcattatggtttccactttggcagaaggcagactattcacagccctatttacttacataggctaaaaaactatgtaactaaatacctaatggtatttaatttttgtttattgaatttaagagattggtattagttttcatagctgtagtccattctaataatttctgatcttctagtggctacttaattagacattatttgaagctgtctgaagaatgcactttatgaattaaaaaactgaattgcctgacctcgttatcacatgagcttatattttgggaacacatagaactgatggaggcttttcctaaggccaaggataatgtactagttgttaaaatggaaataaaagtgaagtggtaaatagcttacagacagtctatgctttgtttaagaaatggaatggcacttcatatattctcatttgtgggagctaaaaattacaataatcaaacttaaggagatagagagtagaatgatggttaccagaggctgggaggcattgaagggatggggagggaagtgaggttgattaatgggtacgaaaatatagttagaacgaatttgttgtagtatttgatagcccaacagggtgactacagtcaacaataactttatacatttaaaaataaaagagtgtaattgggacgtttgtaacacaaatgaatgcttgaagcagtagatacaccctgatgtaattattataaatcgcatacctgtatcaaaatatctcatgtatcccataaatatatacacctaccatgtacccataaaaatttaaaaagaaatggaatggcaaataatggaacataaactttaaacagttagctttgaccagaggtcagcaaatatcctccatgggctaaatccagatgtccacctgttttcataaataacgttttattggagcatagctgtacccatttgtttacatattggctatggctgctgtctagttcaacgtgagagttgaatagttgcatcagagagtatatggtccacaagcctaacttattcactctctggccctttgcagaaaaagtgtgctgccttagtctatagaaaatggacttttcccaccattcactgactcattaggagataggcatcttctaaagattttttttatattgtgtaatgattgatatatagataaaattatatattacttgtaaggtatgatgaataacaacacttaaaaactcatcacacctaaagacatggaaagctgccaattacctatatgtatgttcttcctattttcttacctctttccccatgtcattttttattgttccttgccattttttaatcacacatgtatgttctccaaacatactgtttcattttttgaagctttctacatatagtgtctgaatgtgaagtcttactcaacttgcttttttgagtttatgtttaaaattcattcttgcgcttatatgcatggatggtttacttgctctatagtattctgtgtgagtataccacaatttaagtgttcattttcctatcagttgacatttgtttttagtttttgttggtagaaacagtacactcaaaacatccttgactgtcccctggtacacatatgcaagagactttatgcgtaagagtggagttgttggcttgtcaagttttgcaaaataatgccaggtattttccaaaatgatgatattctcttgagtattacttccctttgcaatgtttttattgttaatgtagcatatataaaaaagtatctcataatttt

SEQ ID NO: 29610 - DNA, 4996 bp, Homo sapiens
  source 1..4996: mol_type = unassigned DNA
acgtgacctaggctgcggcggcggcgtgctgcgggctctgtggcgggagcgaggccgacgggcggggccgcgcggccgcgtgacgcgaagcgttcgagagcgcgcgtcgtggaacgtcttggttgccacggcaagcgcgcgcgcgaggccttgggaacctcgggaccggcccccggcgagcgcagcggcgcccagtagtcatcttagtgggatttggggaagcaacagggctgtgtggggtaacctgccacctttaagtggaaatcagaaatggagcaagagccacaaaatggagaacctgctgaaattaagatcatcagagaagcatataagaaggcctttttatttgttaacaaaggtctgaatacagatgaattaggtcagaaggaagaagcaaagaactactataagcaaggaataggacacctgctcagagggatcagcatttcatcaaaagagtctgaacacacaggtcctgggtgggaatctgctagacagatgcaacagaaaatgaaagaaactctacagaatgtacgcaccaggctggaaattctagagaagggtcttgccacttctctgcagaatgatcttcaggaggtgcccaagttatatccagaatttccacctaaagacatgtgtgaaaaattaccagagcctcagtcttttagttcagctcctcagcatgctgaagtaaatggaaacacctcaactccaagtgcaggggcagttgctgcacctgcttctctgtctttaccatcacaaagttgtccagcagaagctcctcctgcttatactcctcaagctgctgaaggtcactacactgtatcctatggaacagattctggggagttttcatcagttggagaggagttttataggaatcattctcagccaccgcctcttgagaccttagggctggatgcagatgaattgattttgataccaaatggagtacagattttttttgtaaatcctgcaggggaggttagtgcaccttcgtatcctgggtaccttcgaattgtgaggtttttggataattctctcgatacggttctaaaccgtcctcccgggtttcttcaggtttgtgactggttatatcctctagttcctgatagatctccggttctgaaatgtactgcgggagcctacatgtttcctgatacaatgctacaagcagcaggatgctttgtgggggtcgtcctgtcctctgagttaccagaggatgatagagagctctttgaggatctgttaaggcaaatgtctgaccttcggctccaggccaactggaacagagcagaagaagaaaatgaattccaaatccctggaagaactagaccctcctctgaccaactaaaagaagcctctggcactgatgtgaaacagttggaccaaggcaataaggatgtacgtcataaaggaaaacgtggaaaaagggctaaagatacttcaagtgaagaagttaacctgagtcacattgtaccatgtgagccagttccagaagaaaagccaaaagaattacctgaatggagtgaaaaagtggctcacaacattttgtcaggtgcttcctgggtgagttggggtttagtcaaaggtgctgagattactggtaaggcaatccagaaaggtgcttctaaactccgagagcggattcaaccagaagaaaaacccgtggaagttagtccagctgtcaccaagggactttatatagcgaagcaagctacaggaggagcagcaaaagtcagtcagttcctggttgatggagtttgcactgtagcaaattgcgttggaaaagaactagctccacatgtcaagaagcatggaagcaaacttgttccagaatctcttaaaaaagacaaagatgggaaatctcctctggatggtgctatggttgtagcagcaagtagtgttcaaggattttcaactgtctggcaaggattggaatgtgcagctaaatgcatcgttaacaatgtttcagcagaaactgtacaaactgtcagatacaaatacggatataatgcaggagaagctacccaccatgcggtggattctgcggtcaatgttggcgtaactgcctacaatattaacaacattggtatcaaagcaatggtgaagaaaactgcaacacaaacaggacacactctccttgaggactatcagatagttgataattctcagagggaaaatcaagaaggagcagcaaatgtcaacgtgagaggggagaaggatgagcagacgaaggaagtaaaggaggcaaagaagaaagataaatgatgaagtgctgggaatcacttataccaaagccttatgaaatggatgaaattttgttaaataggcaaatgtggaattcctcacagattaaccagtattttttaaatgtattcattcctacaaattaactttcataaattttatggcatgtcttctatttaaaaggaaaagaataagtattcttgcatctggccttagaaatgtgaagttatattctcaagtttatttttttccaagtgtagctaaaatatttttgcaggtaaaataaagctgatagtacatgtgttgttcaaaccttgttaaacctaatattgaactatttttatatctgctgtctttcagaaggcaaataggaaactatatatttgcttaaaaattggcatttagtaaccttaattctttttatagaaggaatgacttaaagtattgtcccctctttttgcactaattgtggatttttttagatgcttctcaaaattttcagtgtgtaagctaaacaaaaactaaaactaagaattctcaaaaaaacttgttcaaaacagggaaagactgatgaaaagtaaaatggactacttttgtaacttacctgtttgttaggaaatggaatggtctctttgatttaaaataaataaaaatagattattacgtcttttgtattgagactgtattgttatgagcctaggaaatttgggaacatgattgtattgtattaaaattcgaagtgattattatcagcttaattggattaaaaaagtacttcaagaaattattttatcatatctgcttctgtttttccaaaaggttaaaacttgtaaaaaaaatatatataaacaattgagtttactaatggtaaacatttttattctgggattcggtcattggaatttatattaaaagacaagttattaaaaaggaaaggttctattcataatcagggtaaagaatatgaaaaccttagacgtaatccatggtggataggcattatggtttccactttggcagaaggcagactattcacagccctatttacttacataggctaaaaaactatgtaactaaatacctaatggtatttaatttttgtttattgaatttaagagattggtattagttttcatagctgtagtccattctaataatttctgatcttctagtggctacttaattagacattatttgaagctgtctgaagaatgcactttatgaattaaaaaactgaattgcctgacctcgttatcacatgagcttatattttgggaacacatagaactgatggaggcttttcctaaggccaaggataatgtactagttgttaaaatggaaataaaagtgaagtggtaaatagcttacagacagtctatgctttgtttaagaaatggaatggcacttcatatattctcatttgtgggagctaaaaattacaataatcaaacttaaggagatagagagtagaatgatggttaccagaggctgggaggcattgaagggatggggagggaagtgaggttgattaatgggtacgaaaatatagttagaacgaatttgttgtagtatttgatagcccaacagggtgactacagtcaacaataactttatacatttaaaaataaaagagtgtaattgggacgtttgtaacacaaatgaatgcttgaagcagtagatacaccctgatgtaattattataaatcgcatacctgtatcaaaatatctcatgtatcccataaatatatacacctaccatgtacccataaaaatttaaaaagaaatggaatggcaaataatggaacataaactttaaacagttagctttgaccagaggtcagcaaatatcctccatgggctaaatccagatgtccacctgttttcataaataacgttttattggagcatagctgtacccatttgtttacatattggctatggctgctgtctagttcaacgtgagagttgaatagttgcatcagagagtatatggtccacaagcctaacttattcactctctggccctttgcagaaaaagtgtgctgccttagtctatagaaaatggacttttcccaccattcactgactcattaggagataggcatcttctaaagattttttttatattgtgtaatgattgatatatagataaaattatatattacttgtaaggtatgatgaataacaacacttaaaaactcatcacacctaaagacatggaaagctgccaattacctatatgtatgttcttcctattttcttacctctttccccatgtcattttttattgttccttgccattttttaatcacacatgtatgttctccaaacatactgtttcattttttgaagctttctacatatagtgtctgaatgtgaagtcttactcaacttgcttttttgagtttatgtttaaaattcattcttgcgcttatatgcatggatggtttacttgctctatagtattctgtgtgagtataccacaatttaagtgttcattttcctatcagttgacatttgtttttagtttttgttggtagaaacagtacactcaaaacatccttgactgtcccctggtacacatatgcaagagactttatgcgtaagagtggagttgttggcttgtcaagttttgcaaaataatgccaggtattttccaaaatgatgatattctcttgagtattacttccctttgcaatgtttttattgttaatgtagcatatataaaaaagtatctcataatttt

SEQ ID NO: 29611 - DNA, 4789 bp, Homo sapiens
  source 1..4789: mol_type = unassigned DNA
gcggccgcgcagggagctctcgaggcaacgccggggcgcccgaggtctggaaggcgcagaaatggagcaagagccacaaaatggagaacctgctgaaattaagatcatcagagaagcatataagaaggcctttttatttgttaacaaaggtctgaatacagatgaattaggtcagaaggaagaagcaaagaactactataagcaaggaataggacacctgctcagagggatcagcatttcatcaaaagagtctgaacacacaggtcctgggtgggaatctgctagacagatgcaacagaaaatgaaagaaactctacagaatgtacgcaccaggctggaaattctagagaagggtcttgccacttctctgcagaatgatcttcaggaggtgcccaagttatatccagaatttccacctaaagacatgtgtgaaaaattaccagagcctcagtcttttagttcagctcctcagcatgctgaagtaaatggaaacacctcaactccaagtgcaggggcagttgctgcacctgcttctctgtctttaccatcacaaagttgtccagcagaagctcctcctgcttatactcctcaagctgctgaaggtcactacactgtatcctatggaacagattctggggagttttcatcagttggagaggagttttataggaatcattctcagccaccgcctcttgagaccttagggctggatgcagatgaattgattttgataccaaatggagtacagattttttttgtaaatcctgcaggggaggttagtgcaccttcgtatcctgggtaccttcgaattgtgaggtttttggataattctctcgatacggttctaaaccgtcctcccgggtttcttcaggtttgtgactggttatatcctctagttcctgatagatctccggttctgaaatgtactgcgggagcctacatgtttcctgatacaatgctacaagcagcaggatgctttgtgggggtcgtcctgtcctctgagttaccagaggatgatagagagctctttgaggatctgttaaggcaaatgtctgaccttcggctccaggccaactggaacagagcagaagaagaaaatgaattccaaatccctggaagaactagaccctcctctgaccaactaaaagaagcctctggcactgatgtgaaacagttggaccaaggcaataaggatgtacgtcataaaggaaaacgtggaaaaagggctaaagatacttcaagtgaagaagttaacctgagtcacattgtaccatgtgagccagttccagaagaaaagccaaaagaattacctgaatggagtgaaaaagtggctcacaacattttgtcaggtgcttcctgggtgagttggggtttagtcaaaggtgctgagattactggtaaggcaatccagaaaggtgcttctaaactccgagagcggattcaaccagaagaaaaacccgtggaagttagtccagctgtcaccaagggactttatatagcgaagcaagctacaggaggagcagcaaaagtcagtcagttcctggttgatggagtttgcactgtagcaaattgcgttggaaaagaactagctccacatgtcaagaagcatggaagcaaacttgttccagaatctcttaaaaaagacaaagatgggaaatctcctctggatggtgctatggttgtagcagcaagtagtgttcaaggattttcaactgtctggcaaggattggaatgtgcagctaaatgcatcgttaacaatgtttcagcagaaactgtacaaactgtcagatacaaatacggatataatgcaggagaagctacccaccatgcggtggattctgcggtcaatgttggcgtaactgcctacaatattaacaacattggtatcaaagcaatggtgaagaaaactgcaacacaaacaggacacactctccttgaggactatcagatagttgataattctcagagggaaaatcaagaaggagcagcaaatgtcaacgtgagaggggagaaggatgagcagacgaaggaagtaaaggaggcaaagaagaaagataaatgatgaagtgctgggaatcacttataccaaagccttatgaaatggatgaaattttgttaaataggcaaatgtggaattcctcacagattaaccagtattttttaaatgtattcattcctacaaattaactttcataaattttatggcatgtcttctatttaaaaggaaaagaataagtattcttgcatctggccttagaaatgtgaagttatattctcaagtttatttttttccaagtgtagctaaaatatttttgcaggtaaaataaagctgatagtacatgtgttgttcaaaccttgttaaacctaatattgaactatttttatatctgctgtctttcagaaggcaaataggaaactatatatttgcttaaaaattggcatttagtaaccttaattctttttatagaaggaatgacttaaagtattgtcccctctttttgcactaattgtggatttttttagatgcttctcaaaattttcagtgtgtaagctaaacaaaaactaaaactaagaattctcaaaaaaacttgttcaaaacagggaaagactgatgaaaagtaaaatggactacttttgtaacttacctgtttgttaggaaatggaatggtctctttgatttaaaataaataaaaatagattattacgtcttttgtattgagactgtattgttatgagcctaggaaatttgggaacatgattgtattgtattaaaattcgaagtgattattatcagcttaattggattaaaaaagtacttcaagaaattattttatcatatctgcttctgtttttccaaaaggttaaaacttgtaaaaaaaatatatataaacaattgagtttactaatggtaaacatttttattctgggattcggtcattggaatttatattaaaagacaagttattaaaaaggaaaggttctattcataatcagggtaaagaatatgaaaaccttagacgtaatccatggtggataggcattatggtttccactttggcagaaggcagactattcacagccctatttacttacataggctaaaaaactatgtaactaaatacctaatggtatttaatttttgtttattgaatttaagagattggtattagttttcatagctgtagtccattctaataatttctgatcttctagtggctacttaattagacattatttgaagctgtctgaagaatgcactttatgaattaaaaaactgaattgcctgacctcgttatcacatgagcttatattttgggaacacatagaactgatggaggcttttcctaaggccaaggataatgtactagttgttaaaatggaaataaaagtgaagtggtaaatagcttacagacagtctatgctttgtttaagaaatggaatggcacttcatatattctcatttgtgggagctaaaaattacaataatcaaacttaaggagatagagagtagaatgatggttaccagaggctgggaggcattgaagggatggggagggaagtgaggttgattaatgggtacgaaaatatagttagaacgaatttgttgtagtatttgatagcccaacagggtgactacagtcaacaataactttatacatttaaaaataaaagagtgtaattgggacgtttgtaacacaaatgaatgcttgaagcagtagatacaccctgatgtaattattataaatcgcatacctgtatcaaaatatctcatgtatcccataaatatatacacctaccatgtacccataaaaatttaaaaagaaatggaatggcaaataatggaacataaactttaaacagttagctttgaccagaggtcagcaaatatcctccatgggctaaatccagatgtccacctgttttcataaataacgttttattggagcatagctgtacccatttgtttacatattggctatggctgctgtctagttcaacgtgagagttgaatagttgcatcagagagtatatggtccacaagcctaacttattcactctctggccctttgcagaaaaagtgtgctgccttagtctatagaaaatggacttttcccaccattcactgactcattaggagataggcatcttctaaagattttttttatattgtgtaatgattgatatatagataaaattatatattacttgtaaggtatgatgaataacaacacttaaaaactcatcacacctaaagacatggaaagctgccaattacctatatgtatgttcttcctattttcttacctctttccccatgtcattttttattgttccttgccattttttaatcacacatgtatgttctccaaacatactgtttcattttttgaagctttctacatatagtgtctgaatgtgaagtcttactcaacttgcttttttgagtttatgtttaaaattcattcttgcgcttatatgcatggatggtttacttgctctatagtattctgtgtgagtataccacaatttaagtgttcattttcctatcagttgacatttgtttttagtttttgttggtagaaacagtacactcaaaacatccttgactgtcccctggtacacatatgcaagagactttatgcgtaagagtggagttgttggcttgtcaagttttgcaaaataatgccaggtattttccaaaatgatgatattctcttgagtattacttccctttgcaatgtttttattgttaatgtagcatatataaaaaagtatctcataattttaa

SEQ ID NO: 29612 - DNA, 4944 bp, Homo sapiens
  source 1..4944: mol_type = unassigned DNA
cggaggcctcggtttcgctggagagaaagagattgcgcaggcgccgagcagccgacgtggccgcaggggaccgtgcctgggggggtctgcgcggggccgctgactcgcgaggttctctgtcgcctgccgccctcgctccttttctccccttctagagtgttacggtgactcttgggtccgaaggggacggacgtcctcccacgtaccatttagaagaaatggagcaagagccacaaaatggagaacctgctgaaattaagatcatcagagaagcatataagaaggcctttttatttgttaacaaaggtctgaatacagatgaattaggtcagaaggaagaagcaaagaactactataagcaaggaataggacacctgctcagagggatcagcatttcatcaaaagagtctgaacacacaggtcctgggtgggaatctgctagacagatgcaacagaaaatgaaagaaactctacagaatgtacgcaccaggctggaaattctagagaagggtcttgccacttctctgcagaatgatcttcaggaggtgcccaagttatatccagaatttccacctaaagacatgtgtgaaaaattaccagagcctcagtcttttagttcagctcctcagcatgctgaagtaaatggaaacacctcaactccaagtgcaggggcagttgctgcacctgcttctctgtctttaccatcacaaagttgtccagcagaagctcctcctgcttatactcctcaagctgctgaaggtcactacactgtatcctatggaacagattctggggagttttcatcagttggagaggagttttataggaatcattctcagccaccgcctcttgagaccttagggctggatgcagatgaattgattttgataccaaatggagtacagattttttttgtaaatcctgcaggggaggttagtgcaccttcgtatcctgggtaccttcgaattgtgaggtttttggataattctctcgatacggttctaaaccgtcctcccgggtttcttcaggtttgtgactggttatatcctctagttcctgatagatctccggttctgaaatgtactgcgggagcctacatgtttcctgatacaatgctacaagcagcaggatgctttgtgggggtcgtcctgtcctctgagttaccagaggatgatagagagctctttgaggatctgttaaggcaaatgtctgaccttcggctccaggccaactggaacagagcagaagaagaaaatgaattccaaatccctggaagaactagaccctcctctgaccaactaaaagaagcctctggcactgatgtgaaacagttggaccaaggcaataaggatgtacgtcataaaggaaaacgtggaaaaagggctaaagatacttcaagtgaagaagttaacctgagtcacattgtaccatgtgagccagttccagaagaaaagccaaaagaattacctgaatggagtgaaaaagtggctcacaacattttgtcaggtgcttcctgggtgagttggggtttagtcaaaggtgctgagattactggtaaggcaatccagaaaggtgcttctaaactccgagagcggattcaaccagaagaaaaacccgtggaagttagtccagctgtcaccaagggactttatatagcgaagcaagctacaggaggagcagcaaaagtcagtcagttcctggttgatggagtttgcactgtagcaaattgcgttggaaaagaactagctccacatgtcaagaagcatggaagcaaacttgttccagaatctcttaaaaaagacaaagatgggaaatctcctctggatggtgctatggttgtagcagcaagtagtgttcaaggattttcaactgtctggcaaggattggaatgtgcagctaaatgcatcgttaacaatgtttcagcagaaactgtacaaactgtcagatacaaatacggatataatgcaggagaagctacccaccatgcggtggattctgcggtcaatgttggcgtaactgcctacaatattaacaacattggtatcaaagcaatggtgaagaaaactgcaacacaaacaggacacactctccttgaggactatcagatagttgataattctcagagggaaaatcaagaaggagcagcaaatgtcaacgtgagaggggagaaggatgagcagacgaaggaagtaaaggaggcaaagaagaaagataaatgatgaagtgctgggaatcacttataccaaagccttatgaaatggatgaaattttgttaaataggcaaatgtggaattcctcacagattaaccagtattttttaaatgtattcattcctacaaattaactttcataaattttatggcatgtcttctatttaaaaggaaaagaataagtattcttgcatctggccttagaaatgtgaagttatattctcaagtttatttttttccaagtgtagctaaaatatttttgcaggtaaaataaagctgatagtacatgtgttgttcaaaccttgttaaacctaatattgaactatttttatatctgctgtctttcagaaggcaaataggaaactatatatttgcttaaaaattggcatttagtaaccttaattctttttatagaaggaatgacttaaagtattgtcccctctttttgcactaattgtggatttttttagatgcttctcaaaattttcagtgtgtaagctaaacaaaaactaaaactaagaattctcaaaaaaacttgttcaaaacagggaaagactgatgaaaagtaaaatggactacttttgtaacttacctgtttgttaggaaatggaatggtctctttgatttaaaataaataaaaatagattattacgtcttttgtattgagactgtattgttatgagcctaggaaatttgggaacatgattgtattgtattaaaattcgaagtgattattatcagcttaattggattaaaaaagtacttcaagaaattattttatcatatctgcttctgtttttccaaaaggttaaaacttgtaaaaaaaatatatataaacaattgagtttactaatggtaaacatttttattctgggattcggtcattggaatttatattaaaagacaagttattaaaaaggaaaggttctattcataatcagggtaaagaatatgaaaaccttagacgtaatccatggtggataggcattatggtttccactttggcagaaggcagactattcacagccctatttacttacataggctaaaaaactatgtaactaaatacctaatggtatttaatttttgtttattgaatttaagagattggtattagttttcatagctgtagtccattctaataatttctgatcttctagtggctacttaattagacattatttgaagctgtctgaagaatgcactttatgaattaaaaaactgaattgcctgacctcgttatcacatgagcttatattttgggaacacatagaactgatggaggcttttcctaaggccaaggataatgtactagttgttaaaatggaaataaaagtgaagtggtaaatagcttacagacagtctatgctttgtttaagaaatggaatggcacttcatatattctcatttgtgggagctaaaaattacaataatcaaacttaaggagatagagagtagaatgatggttaccagaggctgggaggcattgaagggatggggagggaagtgaggttgattaatgggtacgaaaatatagttagaacgaatttgttgtagtatttgatagcccaacagggtgactacagtcaacaataactttatacatttaaaaataaaagagtgtaattgggacgtttgtaacacaaatgaatgcttgaagcagtagatacaccctgatgtaattattataaatcgcatacctgtatcaaaatatctcatgtatcccataaatatatacacctaccatgtacccataaaaatttaaaaagaaatggaatggcaaataatggaacataaactttaaacagttagctttgaccagaggtcagcaaatatcctccatgggctaaatccagatgtccacctgttttcataaataacgttttattggagcatagctgtacccatttgtttacatattggctatggctgctgtctagttcaacgtgagagttgaatagttgcatcagagagtatatggtccacaagcctaacttattcactctctggccctttgcagaaaaagtgtgctgccttagtctatagaaaatggacttttcccaccattcactgactcattaggagataggcatcttctaaagattttttttatattgtgtaatgattgatatatagataaaattatatattacttgtaaggtatgatgaataacaacacttaaaaactcatcacacctaaagacatggaaagctgccaattacctatatgtatgttcttcctattttcttacctctttccccatgtcattttttattgttccttgccattttttaatcacacatgtatgttctccaaacatactgtttcattttttgaagctttctacatatagtgtctgaatgtgaagtcttactcaacttgcttttttgagtttatgtttaaaattcattcttgcgcttatatgcatggatggtttacttgctctatagtattctgtgtgagtataccacaatttaagtgttcattttcctatcagttgacatttgtttttagtttttgttggtagaaacagtacactcaaaacatccttgactgtcccctggtacacatatgcaagagactttatgcgtaagagtggagttgttggcttgtcaagttttgcaaaataatgccaggtattttccaaaatgatgatattctcttgagtattacttccctttgcaatgtttttattgttaatgtagcatatataaaaaagtatctcataatttt

SEQ ID NO: 29613 - DNA, 1533 bp, Homo sapiens
  source 1..1533: mol_type = unassigned DNA
agtctcgcgccagctgagcggcggtcgggcggggggagcgcggcggcccaagctcgctcggccacgcgccccgccccctcagaggccggcctcccgcacgcaccgcgcagcctgctgtgcccgtgggtcccgagtgctccgccgcccgccccgacccgggcccagccgcctccacggcccgcgctcgtactggagcgaagagcggcctcctgaaggaggggaagggacgtgggggcggccacggcaggattaacctccatttcagctaatcatgggagagattaaagtctctcctgattataactggtttagaggtacagttccccttaaaaagattattgtggatgatgatgacagtaagatatggtcgctctatgacgcgggcccccgaagtatcaggtgtcctctcatattcctgccccctgtcagtggaactgcagatgtctttttccggcagattttggctctgactggatggggttaccgggttatcgctgttcatctttttggcgcttctttgggaggctttttggcccagaaatttgctgaatacactcacaaatctcctagagtccattccctaatcctctgcaattccttcagtgacacctctatcttcaaccaaacttggactgcaaacagcttttggctgatgcctgcatttatgctcaaaaaaatagttcttggaaatttttcatctggcccggtggaccctatgatggctgatgccattgatttcatggtagacaggctagaaagtttgggtcagagtgaactggcttcaagacttaccttgaattgtcaaaattcttatgtggaacctcataaaattcgggacatacctgtaactattatggatgtgtttgatcagagtgcgctttcaactgaagctaaagaagaaatgtacaagctgtatcctaatgcccgaagagctcatctgaaaacaggaggcaatttcccatacctgtgcagaagtgcagaggtcaatctttatgtacagatacatttgctgcaattccatggaaccaaatacgcggccattgacccatcaatggtcagtgccgaggagcttgaggtgcagaaaggcagccttggcatcagccaggaggagcagtagtgtgtctctcgctgtcaatgatgagttgacccggtgtgttcttgtatagtcagtggcatcagcacccgtcagccggccttttccttcaggttcgtcaggctcaccggttctcactgtgtctgggaagtaggactgatggtcatcttcatgacaggcggcatctccactaagcctgtgtaactgttccctctttggttttcttagcttttgaatttgaagaagtacttttgaagactcccattttaagaaccgtgcagattttgctaccaaaagtcttcaccactgtgttcttaagtgaatgttaatttctgaggtttgggactttgtggtggtttttttcttcttttcttttccattcttctttctttctttttatgttgtttgctgtaaatgctgcacatccagattgcatatca

SEQ ID NO: 29614 - DNA, 1822 bp, Homo sapiens
  source 1..1822: mol_type = unassigned DNA
cgccctctgagaacccggaagcgggagtctcgcgccagctgagcggcggtcgggcggggggagcgcggcggcccaagctcgctcggccacgcgccccgccccctcagaggccggcctcccgcacgcaccgcgcagcctgctgtgcccgtgggtcccgagtgctccgccgcccgccccgacccgggcccagccgcctccacggcccgcgctcgtactggagcgaagagcggcctcctgaaggaggggaagggacgtgggggcggccacggcaggattaacctccatttcagctaatcatgggagagattaaagtctctcctgattataactggtttagaggtacagttccccttaaaaagattattgtggatgatgatgacagtaagatatggtcgctctatgacgcgggcccccgaagtatcaggtgtcctctcatattcctgccccctgtcagtggaactgcagatgtctttttccggcagattttggctctgactggatggggttaccgggttatcgctttgcagtatccagtttattgggaccatctcgagttctgtgatggattcagaaaacttttagaccatttacaattggataaagttcatctttttggcgcttctttgggaggctttttggcccagaaatttgctgaatacactcacaaatctcctagagtccattccctaatcctctgcaattccttcagtgacacctctatcttcaaccaaacttggactgcaaacagcttttggctgatgcctgcatttatgctcaaaaaaatagttcttggaaatttttcatctggcccggtggaccctatgatggctgatgccattgatttcatggtagacaggctagaaagtttgggtcagagtgaactggcttcaagacttaccttgaattgtcaaaattcttatgtggaacctcataaaattcgggacatacctgtaactattatggatgtgtttgatcagagtgcgctttcaactgaagctaaagaagaaatgtacaagctgtatcctaatgcccgaagagctcatctgaaaacaggaggcaatttcccatacctgtgcagaagtgcagaggtcaatctttatgtacagatacatttgctgcaattccatggaaccaaatacgcggccattgacccatcaatggtcagtgccgaggagcttgaggtgcagaaaggcagccttggcatcagccaggaggagcagtagtgtgtctctcgctgtcaatgatgagttgacccggtgtgttcttgtatagtcagtggcatcagcacccgtcagccggccttttccttcaggttcgtcaggctcaccggttctcactgtgtctgggaagtaggactgatggtcatcttcatgacaggcggcatctccactaagcctgtgtaactgttccctctttggttttcttagcttttgaatttgaagaagtacttttgaagactcccattttaagaaccgtgcagattttgctaccaaaagtcttcaccactgtgttcttaagtgaatgttaatttctgaggtttgggactttgtggtggtttttttcttcttttcttttccattcttctttctttctttttatgttgtttgctgtaaatgctgcacatccagattgcatatcaggacattggttattttatgctttcttggatataaccatgatcagagtgccatggccactaccccactgtttgctctcctgcaaatcaactgcttttaatttacacttaaacaaattgttttgagtgttagctactgcctttctagatattagtcatttggaataaaaattcaatttcactgag

SEQ ID NO: 29615 - DNA, 1613 bp, Homo sapiens
  source 1..1613: mol_type = unassigned DNA
gggtggtcggtgtgcttgtgaccctgcctttgtgtggctgtcaccggtgggactggcggggagctgtgtgattaacctccatttcagctaatcatgggagagattaaagtctctcctgattataactggtttagaggtacagttccccttaaaaagattattgtggatgatgatgacagtaagatatggtcgctctatgacgcgggcccccgaagtatcaggtgtcctctcatattcctgccccctgtcagtggaactgcagatgtctttttccggcagattttggctctgactggatggggttaccgggttatcgctttgcagtatccagtttattgggaccatctcgagttctgtgatggattcagaaaacttttagaccatttacaattggataaagttcatctttttggcgcttctttgggaggctttttggcccagaaatttgctgaatacactcacaaatctcctagagtccattccctaatcctctgcaattccttcagtgacacctctatcttcaaccaaacttggactgcaaacagcttttggctgatgcctgcatttatgctcaaaaaaatagttcttggaaatttttcatctggcccggtggaccctatgatggctgatgccattgatttcatggtagacaggctagaaagtttgggtcagagtgaactggcttcaagacttaccttgaattgtcaaaattcttatgtggaacctcataaaattcgggacatacctgtaactattatggatgtgtttgatcagagtgcgctttcaactgaagctaaagaagaaatgtacaagctgtatcctaatgcccgaagagctcatctgaaaacaggaggcaatttcccatacctgtgcagaagtgcagaggtcaatctttatgtacagatacatttgctgcaattccatggaaccaaatacgcggccattgacccatcaatggtcagtgccgaggagcttgaggtgcagaaaggcagccttggcatcagccaggaggagcagtagtgtgtctctcgctgtcaatgatgagttgacccggtgtgttcttgtatagtcagtggcatcagcacccgtcagccggccttttccttcaggttcgtcaggctcaccggttctcactgtgtctgggaagtaggactgatggtcatcttcatgacaggcggcatctccactaagcctgtgtaactgttccctctttggttttcttagcttttgaatttgaagaagtacttttgaagactcccattttaagaaccgtgcagattttgctaccaaaagtcttcaccactgtgttcttaagtgaatgttaatttctgaggtttgggactttgtggtggtttttttcttcttttcttttccattcttctttctttctttttatgttgtttgctgtaaatgctgcacatccagattgcatatcaggacattggttattttatgctttcttggatataaccatgatcagagtgccatggccactaccccactgtttgctctcctgcaaatcaactgcttttaatttacacttaaacaaattgttttgagtgttagctactgcctttctagatattagtcatttggaataaaaattcaatttc

SEQ ID NO: 29616 - DNA, 3076 bp, Homo sapiens
  source 1..3076: mol_type = unassigned DNA
ggctttcaggccaacatggccgtgctgctgctgctgctccgtgccctccgccggggtccaggcccgggtcctcggccgctgtggggcccaggcccggcctggagtccagggttccccgccaggcccgggagggggcggccgtacatggccagcaggcctccgggggacctcgccgaggctggaggccgagctctgcagagcttacaattgagactgctaacccctacctttgaagggatcaacggattgttgttgaaacaacatttagttcagaatccagtcagactctggcaacttttaggtggtactttctattttaacacctcaaggttgaagcagaagaataaggagaaggataagtcgaaggggaaggcgcctgaagaggacgaagaggagaggagacgccgtgagcgggacgaccagatgtaccgagagcggctgcgcaccttgctggtcatcgcggttgtcatgagcctcctgaatgctctcagcaccagcggaggcagcatttcctggaacgactttgtccacgagatgctggccaagggcgaggtgcagcgcgtccaggtggtgcctgagagcgacgtggtggaagtctacctgcaccctggagccgtggtgtttgggcggcctcggctagccttgatgtaccgaatgcaggttgcaaatattgacaagtttgaagagaagcttcgagcagctgaagatgagctgaatatcgaggccaaggacaggatcccagtttcctacaagcgaacaggattctttggaaatgccctgtactctgtggggatgacggcagtgggcctggccatcctgtggtatgttttccgtctggccgggatgactggaagggaaggtggattcagtgcttttaatcagcttaaaatggctcgtttcaccattgtggatgggaagatggggaaaggagtcagcttcaaagacgtggcaggaatgcacgaagccaaactggaagtccgcgagtttgtggattatctgaagagcccagaacgcttcctccagcttggcgccaaggtcccaaagggcgcactgctgctcggcccccccggctgtgggaagacgctgctggccaaggcggtggccacggaggctcaggtgcccttcctggcgatggccggcccagagttcgtggaggtcattggaggcctcggcgctgcccgtgtgcggagcctctttaaggaagcccgagcccgggccccctgcatcgtctacatcgatgagatcgacgcggtgggcaagaagcgctccaccaccatgtccggcttctccaacacggaggaggagcagacgctcaaccagcttctggtagaaatggatggaatgggtaccacagaccatgtcatcgtcctggcgtccacgaaccgagctgacattttggacggtgctctgatgaggccaggccgactggaccggcacgtcttcattgatctccccacgctgcaggagaggcgggagatttttgagcagcacctgaagagcctgaagctgacccagtccagcaccttttactcccagcgtctggcagagctgacaccaggattcagtggggctgacatcgccaacatctgcaatgaggctgcgctgcacgcggcgcgggagggacacacttccgtgcacactctcaacttcgagtacgccgtggagcgcgtcctcgcagggactgccaaaaagagcaagatcctgtccaaggaagaacagaaagtggttgcgtttcatgagtcgggccacgccttggtgggctggatgctggagcacacggaggccgtgatgaaggtctccataacccctcggacaaacgccgccctgggctttgctcagatgctccccagagaccagcacctcttcaccaaggagcagctgtttgagcggatgtgcatggccctgggaggacgggcctcggaagcactgtccttcaacgaggtcacttctggggcacaggacgacctgaggaaggtcacccgcatcgcctactccatggtgaagcagtttgggatggcacctggcatcgggcccatctccttccctgaggcgcaggagggcctcatgggcatcgggcggcgccccttcagccaaggcctgcagcagatgatggaccatgaagcaagactgctggtggccaaggcctacagacacaccgagaaggtgctgcaggacaacctggacaagttgcaggcgctggcaaacgcccttctggaaaaggaagtgataaactatgaggacattgaggctctcattggcccgccgccccatgggccgaagaaaatgatcgcaccgcagaggtggatcgacgcccagagggagaaacaggacttgggcgaggaggagaccgaagagacccagcagcctccacttggaggcgaagagccgacttggcccaagtagttgggaggtgttggctgcacgtgcgggtggtccgggaagtgagggctcactcagccaccctgagttgcttttcagctgaggtttgcacttcctctcgcggccctcagtagtccctgcacagtgacttctgagatctgttgattgatgacccttttcatgattttaagtttctctgcagaaactactgacggagtcctgtgtttgtgagtcgtttcccctatggggaaggttatcagtgcttcccgagtgagcatggaacacttcgagttcccagggttatagacagtcgttcccagtgtggctgaggccacccagaggcagcagagcattcagactccaaacagacccctgttcatgccgacgcttgcacgaccgccccagttcctgtggctccctcggaatgctaaggggatcggacatgaaaggaccctgtgagccgattgtcctatctccagcggccctgtcatccagctcactcatcaatggggccagtcaggcccaggcactgggctccggaggactcaccactgccccctgctgccatgtggactggtgcaagttgaggacttcttgctggtctagtcacgcatgcagtgttggggatgccttggtttttactgctctgagaattgttgagatactttactaataaactgtgtagttggaaaatcta

SEQ ID NO: 29617 - DNA, 1824 bp, Homo sapiens
  source 1..1824: mol_type = unassigned DNA
atgaggctgcgctgcacgcggcgcgggagggacacacttccgtgcacactctcaacttcgagtacgccgtggagcgcgtcctcgcaggtccccagggctcagcttgggaaagcagtgggttcctgcagaggagtggggagctgctgtgccagacactgcaaaacacacctggcttctctccgacagccctgcggggagaggactggcgctgcctgtgtcttactgatttattttcgtgtaaccatttacttttatgtggaaatcgaaaagcttttgataatagtagcaaagcaggaaggactgagtgggaaccacaagccagttgaaagaaaatacatgacgtacttgagtgctcaggaccacgagctgattcaagttgtacagaatggacacttacagatgtgtggaaaatctgagacaggaaatgaagcctcaccaggactgccaaaaagagcaagatcctgtccaaggaagaacagaaagtggttgcgtttcatgagtcgggccacgccttggtgggctggatgctggagcacacggcgtgatgaaggtctccataacccctcgacaaacgccgccctgggctttgctcaggctccccagagaccagcacctcttcacgagcagctgtttgagcggatgtgcatggccctgggaggacgggcctcggaagcactgtccttcaacgaggtcacttctggggcacaggacgacctgaggaaggtcacccgcatcgcctactccatggtgaagcagtttgggatggcacctggcatcgggcccatctccttccctgaggcgcaggagggcctcatgggcatcgggcggcgccccttcagccaaggcctgcagcagatgatggaccatgaagcaagactgctggtggccaaggcctacagacacaccgagaaggtgctgcaggacaacctggacaagttgcaggcgctggcaaacgcccttctggaaaaggaagtgataaactatgaggacattgaggctctcattggcccgccgccccatgggccgaagaaaatgatcgcaccgcagaggtggatcgacgcccagagggagaaacaggacttgggcgaggaggagaccgaagagacccagcagcctccacttggaggcgaagagccgacttggcccaagtagttgggaggtgttggctgcacgtgcgggtggtccgggaagtgagggctcactcagccaccctgagttgcttttcagctgaggtttgcacttcctctcgcggccctcagtagtccctgcacagtgacttctgagatctgttgattgatgacccttttcatgattttaagtttctctgcagaaactactgacggagtcctgtgtttgtgagtcgtttcccctatggggaaggttatcagtgcttcccgagtgagcatggaacacttcgagttcccagggttatagacagtcgttcccagtgtggctgaggccacccagaggcagcagagcattcagactccaaacagacccctgttcatgccgacgcttgcacgaccgccccagttcctgtggctccctcggaatgctaaggggatcggacatgaaaggaccctgtgagccgattgtcctatctccagcggccctgtcatccagctcactcatcaatggggccagtcaggcccaggcactgggctccggaggactcaccactgccccctgctgccatgtggactggtgcaagttgaggacttcttgctggtctagtcacgcatgcagtgttggggatgccttggtttttactgctctgagaattgttgagatactttactaataaactgtgtagttggaaaatct

SEQ ID NO: 29618 - DNA, 2211 bp, Homo sapiens
  source 1..2211: mol_type = unassigned DNA
ctgggaccacaggcgtgcaccgttgtgcccaggtctaagtgtttcgatttagaaatggtttcctctaggtgggaaccactcctgctcctcactgaagtgacctcagcgaatgaagtgtgggtgacctcgaacagcacagcgttagtctttgtctctgataacgtcagggaagaattggaggaagtgcaggatcttctgtgcaggacgctgcccctccccgtccagctgagctttcctgaggaagctctggatgtcgcccgtgttgctcatgtgtttgtttctcccttttgcttctctgccggctcagaggagaggagacgccgtgagcgggacgaccagatgtaccgagagcggctgcgcaccttgctggtcatcgcggttgtcatgagcctcctgaatgctctcagcaccagcggaggcagcatttcctggaacgactttgtccacgagatgctggccaagggcgaggtgcagcgcgtccaggtggtgcctgagagcgacgtggtggaagtctacctgcaccctggagccgtggtgtttgggcggcctcggctagccttgatgtaccgaatgcaggttgcaaatattgacaagtttgaagagaagcttcgagcagctgaagatgagctgaatatcgaggccaaggacaggatcccagtttcctacaagcgaacaggattctttggaaatgccctgtactctgtggggatgacggcagtgggcctggccatcctgtggtatgttttccgtctggccgggatgactggaagggaaggtggattcagtgcttttaatcagcttaaaatggctcgtttcaccattgtggatgggaagatggggaaaggagtcagcttcaaagacgtggcaggaatgcacgaagccaaactggaagtccgcgagtttgtggattatctgaagagcccagaacgcttcctccagcttggcgccaaggtcccaaagggcgcactgctgctcggcccccccggctgtgggaagacgctgctggccaaggcggtggccacggaggctcaggtgcccttcctggcgatggccggcccagagttcgtggaggtcattggaggcctcggcgctgcccgtgtgcggagcctctttaaggaagcccgagcccgggccccctgcatcgtctacatcgatgagatcgacgcggtgggcaagaagcgctccaccaccatgtccggcttctccaacacggaggaggagcagacgctcaaccagcttctggtagaaatggatggtgcctctcttgaccagctaccctcccaggggaccatgaggaagctcagaggaaagacccccgcctgctcctgtctcacggagcccacagggtcacggagggcaatggagggtcattcgctctgctggggttgccttttgcactgaagatagagaccacctttttgagtgacttgagcccaaaggcaagcgtatatcaaacgatcttctccacataacctctctgtgccatcataagaatagctgcttccgcccccggatttgctcaggcctgggaatccgctgactgaaggcctcttgttgagtgccagctctaaacaagtccctttatgcagagccacagctgtgcatgctcagccctgccgaggtcccaggccaggctttgttgcttccgttcatggaagcgcacaggatagggccgacgctgtgccggtcgtggggaaatctcactggggaagagaaaagcccaagccttgttggttacgtcagccggtccatggcggtgtcctgcggaccccagagcccccgggaagggcgcaagtcaaagagcactggaggcaccgccggcgatggacgtccaggtcccggctcctgtgctggaaagcgttgatggggagcgtcggcgctgaccacacgcgggagctgcggaagcccagcggttcacacaggcctcccttcaacgtagtcatcccctggtggtggaagcaagacgacggcccctgacgtgcagccacacacagaaaaggctgctgtgaacattttatgcttcgactttttttttcttcagagacagggtgtcgttctgtcgcccaggctggagtgcagtgccaccatcatagctcactgcagcctccacctcctaggctcaagcttcctaagtagttgggactcaaggcttgagtcaccatgccaggctctgttttttcagtctgtgaaaaataaagtcatcagcatgtg

SEQ ID NO: 29619 - DNA, 2288 bp, Homo sapiens
  source 1..2288: mol_type = unassigned DNA
ggccaacatggccgtgctgctgctgctgctccgtgccctccgccggggtccaggcccgggtcctcggccgctgtggggcccaggcccggcctggagtccagggttccccgccaggcccgggagggggcggccgtacatggccagcaggcctccgggggacctcgccgaggctggaggccgagctctgcagagcttacaattgagactgctaacccctacctttgaagggatcaacggattgttgttgaaacaacatttagttcagaatccagtcagactctggcaacttttaggtggtactttctattttaacacctcaaggttgaagcagaagaataaggagaaggataagtcgaaggggaaggcgcctgaagaggacgaagaggagaggagacgccgtgagcgggacgaccagatgtaccgagagcggctgcgcaccttgctggtcatcgcggttgtcatgagcctcctgaatgctctcagcaccagcggaggcagcatttcctggaacgactttgtccacgagatgctggccaagggcgaggtgcagcgcgtccaggtggtgcctgagagcgacgtggtggaagtctacctgcaccctggagccgtggtgtttgggcggcctcggctagccttgatgtaccgaatgcaggttgcaaatattgacaagtttgaagagaagcttcgagcagctgaagatgagctgaatatcgaggccaaggacaggatcccagtttcctacaagcgaacaggattctttggaaatgccctgtactctgtggggatgacggcagtgggcctggccatcctgtggtatgttttccgtctggccgggatgactggaagggaaggtggattcagtgcttttaatcagcttaaaatggctcgtttcaccattgtggatgggaagatggggaaaggagtcagcttcaaagacgtggcaggaatgcacgaagccaaactggaagtccgcgagtttgtggattatctgaagagcccagaacgcttcctccagcttggcgccaaggtcccaaagggcgcactgctgctcggcccccccggctgtgggaagacgctgctggccaaggcggtggccacggaggctcaggtgcccttcctggcgatggccggcccagagttcgtggaggtcattggaggcctcggcgctgcccgtgtgcggagcctctttaaggaagcccgagcccgggccccctgcatcgtctacatcgatgagatcgacgcggtgggcaagaagcgctccaccaccatgtccggcttctccaacacggaggaggagcagacgctcaaccagcttctggtagaaatggatggtgcctctcttgaccagctaccctcccaggggaccatgaggaagctcagaggaaagacccccgcctgctcctgtctcacggagcccacagggtcacggagggcaatggagggtcattcgctctgctggggttgccttttgcactgaagatagagaccacctttttgagtgacttgagcccaaaggcaagcgtatatcaaacgatcttctccacataacctctctgtgccatcataagaatagctgcttccgcccccggatttgctcaggcctgggaatccgctgactgaaggcctcttgttgagtgccagctctaaacaagtccctttatgcagagccacagctgtgcatgctcagccctgccgaggtcccaggccaggctttgttgcttccgttcatggaagcgcacaggatagggccgacgctgtgccggtcgtggggaaatctcactggggaagagaaaagcccaagccttgttggttacgtcagccggtccatggcggtgtcctgcggaccccagagcccccgggaagggcgcaagtcaaagagcactggaggcaccgccggcgatggacgtccaggtcccggctcctgtgctggaaagcgttgatggggagcgtcggcgctgaccacacgcgggagctgcggaagcccagcggttcacacaggcctcccttcaacgtagtcatcccctggtggtggaagcaagacgacggcccctgacgtgcagccacacacagaaaaggctgctgtgaacattttatgcttcgactttttttttcttcagagacagggtgtcgttctgtcgcccaggctggagtgcagtgccaccatcatagctcactgcagcctccacctcctaggctcaagcttcctaagtagttgggactcaaggcttgagtcaccatgccaggctctgttttttcagtctgtgaaaaataaagtcatcagcatgtga

SEQ ID NO: 29620 - DNA, 5117 bp, Homo sapiens
  source 1..5117: mol_type = unassigned DNA
gctcctgagaccggcgggcacacgggggtctgtggcccccgccgtagcagtggctgccgccgtcgcttggttcccgtcggtctgcgggaggcgggttatggcggcggcggcagtgagagctgtgaatgaattctccgggtggacgagggaagaagaaaggctccggcggcgccagcaacccggtgcctcccaggcctccgcccccttgcctggcccccgcccctcccgccgccgggccggcccctccgcccgagtcgccgcataagcggaacctgtactatttctcctacccgctgtttgtaggcttcgcgctgctgcgtttggtcgccttccacctggggctcctcttcgtgtggctctgccagcgcttctcccgcgccctcatggcagccaagaggagctccggggccgcgccagcacctgcctcggcctcggccccggcgccggtgccgggcggcgaggccgagcgcgtccgagtcttccacaaacaggccttcgagtacatctccattgccctgcgcatcgatgaggatgagaaagcaggacagaaggagcaagctgtggaatggtataagaaaggtattgaagaactggaaaaaggaatagctgttatagttacaggacaaggtgaacagtgtgaaagagctagacgccttcaagctaaaatgatgactaatttggttatggccaaggaccgcttacaacttctagagaagatgcaaccagttttgccattttccaagtcacaaacggacgtctataatgacagtactaacttggcatgccgcaatggacatctccagtcagaaagtggagctgttccaaaaagaaaagaccccttaacacacactagtaattcactgcctcgttcaaaaacagttatgaaaactggatctgcaggcctttcaggccaccatagagcacctagttacagtggtttatccatggtttctggagtgaaacagggatctggtcctgctcctaccactcataagggtactccgaaaacaaataggacaaataaaccttctacccctacaactgctactcgtaagaaaaaagacttgaagaattttaggaatgtggacagcaaccttgctaaccttataatgaatgaaattgtggacaatggaacagctgttaaatttgatgatatagctggtcaagacttggcaaaacaagcattgcaagaaattgttattcttccttctctgaggcctgagttgttcacagggcttagagctcctgccagagggctgttactctttggtccacctgggaatgggaagacaatgctggctaaagcagtagctgcagaatcgaatgcaaccttctttaatataagtgctgcaagtttaacttcaaaatacgtgggagaaggagagaaattggtgagggctctttttgctgtggctcgagaacttcaaccttctataatttttatagatgaagttgatagccttttgtgtgaaagaagagaaggggagcacgatgctagtagacgcctaaaaactgaatttctaatagaatttgatggtgtacagtctgctggagatgacagagtacttgtaatgggtgcaactaataggccacaagagcttgatgaggctgttctcaggcgtttcatcaaacgggtatatgtgtctttaccaaatgaggagacaagactacttttgcttaaaaatctgttatgtaaacaaggaagtccattgacccaaaaagaactagcacaacttgctagaatgactgatggatactcaggaagtgacctaacagctttggcaaaagatgcagcactgggtcctatccgagaactaaaaccagaacaggtgaagaatatgtctgccagtgagatgagaaatattcgattatctgacttcactgaatccttgaaaaaaataaaacgcagcgtcagccctcaaactttagaagcgtacatacgttggaacaaggactttggagataccactgtttaaggaaatacctttgtaaacctgcagaacattttacttaaaagaggaaacacaagatcttcaatgaacgtcatcggctacagaaacagcctaagtttacaggactttttagagtcttacatatttgtgcaccaaacttgaagatgaaccagaaaacagacttaaacaaaatatacaatgcaaatgtaattttttgttgtttaaggccttgccttgatggtcacagttatcccaatggacactaagttagagcacaacaaaacctgattctggtcttctttaccaatataatcataatgtaaataataatttgtatattgtgttgcagatgaaagtattccaggaacagtgaatggtagaagacacaagaacatttgtttgtttgtcttctgatgttttttcttaaaatagtaatttctcctacttttcttttctactgttgtcttaactacaggtgattggaatgccaaacactcttaagtttattttcttttttcgttttataaattcagtgtgccaaatgaaacttttttcctaagtaactgtaataggaaaaagtttattttgagagtttcttcttcataaatctacagacattaaacaattgttgtgttctttttaccttttatttttctattaccttgctaccaaacagtttagatagcaatataatagcaaaaaagcaaatatggtaaaatagagaaggtttgaaggtttgagttactctgtcatataacatgtagatcagtcttcatgtgacctgcagtatttttttttctaatgtatttgtcagaaatctgttgtagactgttaacttcttcctgatggaatttattttctgcaagaattattctgatatttaagagagccaattttaactgctgtgaaaatgtttccagtgcaagagaagggaaatactaggaactaagacatttctaatttattgcttattactttcttaattttacaggataattataagcaagtggaactaccatcttttattcttaataattattaatcccttcaatgaaactttaaaaaaactgaatttttatacatggcatacatttttctagttccttctgcttgctttattaactcaaaagttctagttctagtctgttgatctgccttttgttctcccaaaatgtacagtaattccatttgtttgtataaatatgcctggattttcattataaaaatgtcattgtagggagtagagactcatatcatggccttttaaatattgtaataaaggcaaatagatatttgcccttagtttactggttaaaagtttgtttacagaacttttctctggtgcttaaatgatgctatgtaaaatgtcatgagtggaaagaatatttgtagtagtaacaagaatttttcatttaggaaagatttcttaggttttgaaagaatacattaaaataaaaaacttgcccctactaggtaagaactttataatgaagacatacattcttcttaattttactcttgctcttgttaaagatttgtttgaatatagaagatgcatgatttctgggtttttttttttttttgagacagagtttcgctcttgttgcccaggctggagtgcaatggcgcaatctcgactcaccacaacctccgcctcccaggttcaagcaattctcctgcctcagcctcccgagtagctgggattacaggcatgcgccactaccccagctaattttgtatttttagtagagatggggtttctccatgttggtcaggctggtcttgaactcctgacctcaggtgatccgcctgcctcggcctcccaaagtgctgggattacaggcataagccactgcgcccagccagaagatgcatgatttcttaggatcatatgctgtttgtagccataaggtaaatcatgtctcttccaatcatgactttggaactccctgaataataaaaatgagagttgagataaataggggaaaaaaaatttttttcaagccagagctatgcatatgttaggtgatgggtagtatccctttaaggtctcaaacattacaacatcaattatgaaatactgataacgaaaggtagtaatgaaatatatatgatgaaaagaattgagaagttctaaattaagacatttcagttaagctcataaaatttcattgttttcatttaaaagattaacgttattgatacttggataactggctaatcatattaaaggactatgtggttccagctcaacttttaatatattgtctcctttaaaactatcatggttataattctattgggaaagacttttagataacaaagatttcaaatgttaaaagagataaaagtcaggttaatactatcttaaacactgagtcagaaaatcattactgtatagaagttgctttcctgatcaagtctgaacttcagctagtgctagagaactattttctatgacttaactctaaccaagttttattttaagctgtttctttgatagaagggccatgaaaatagagtaatgatatagtaggagataagggattggtttggtctttttcaataaagatagaagttgctgaagttttctgaattaataatgacttagattgtgaccttttagattcggtgttgagctctgtgttgtattacttcctaaaagataatgcttaaacattaagcattagtgtgctcttcatgttaatatggcagagttttgtaaactaaattaaaacttactgatatattggactttgagccaagggaaagaatgagtactatctttccagatatcttaagggtaaaagcttattctaagacagtctgtccattgagaatattagatttctgacttgcaaatatgtttgtactccagaagaattagaggaaaagcagatactagaattctaatttaattacatatacagccgtctttgtttatagtgtagaattctttatattttgtacaaaaactaattcttttggtaaaatgaaccatttacagttcggttttggactctgagtcaaaggattttcctttaaatgcttgtctcaattttagtctggtcttttgtacttttcttcagaagaaatgaattaaagggtacagttgcataaagtgggtttttatcctaatgtattggaaataaatgataaacttta

SEQ ID NO: 29621 - DNA, 5116 bp, Homo sapiens
  source 1..5116: mol_type = unassigned DNA
ggcccgagccaccgactgcaggaggagaaggggttgtgctcctggccgaggaaggagaaaggggcggggccggcgggcagcgtgcggcagtgcggagctcctgagaccggcgggcacacgggggtctgtggcccccgccgtagcagtggctgccgccgtcgcttggttcccgtcggtctgcgggaggcgggttatggcggcggcggcagtgagagctgtgaatgaattctccgggtggacgagggaagaagaaaggctccggcggcgccagcaacccggtgcctcccaggcctccgcccccttgcctggcccccgcccctcccgccgccgggccggcccctccgcccgagtcgccgcataagcggaacctgtactatttctcctacccgctgtttgtaggcttcgcgctgctgcgtttggtcgccttccacctggggctcctcttcgtgtggctctgccagcgcttctcccgcgccctcatggcagccaagaggagctccggggccgcgccagcacctgcctcggcctcggccccggcgccggtgccgggcggcgaggccgagcgcgtccgagtcttccacaaacaggccttcgagtacatctccattgccctgcgcatcgatgaggatgagaaagcaggacagaaggagcaagctgtggaatggtataagaaaggtattgaagaactggaaaaaggaatagctgttatagttacaggacaaggtgaacagtgtgaaagagctagacgccttcaagctaaaatgatgactaatttggttatggccaaggaccgcttacaacttctagaaagtggagctgttccaaaaagaaaagaccccttaacacacactagtaattcactgcctcgttcaaaaacagttatgaaaactggatctgcaggcctttcaggccaccatagagcacctagttacagtggtttatccatggtttctggagtgaaacagggatctggtcctgctcctaccactcataagggtactccgaaaacaaataggacaaataaaccttctacccctacaactgctactcgtaagaaaaaagacttgaagaattttaggaatgtggacagcaaccttgctaaccttataatgaatgaaattgtggacaatggaacagctgttaaatttgatgatatagctggtcaagacttggcaaaacaagcattgcaagaaattgttattcttccttctctgaggcctgagttgttcacagggcttagagctcctgccagagggctgttactctttggtccacctgggaatgggaagacaatgctggctaaagcagtagctgcagaatcgaatgcaaccttctttaatataagtgctgcaagtttaacttcaaaatacgtgggagaaggagagaaattggtgagggctctttttgctgtggctcgagaacttcaaccttctataatttttatagatgaagttgatagccttttgtgtgaaagaagagaaggggagcacgatgctagtagacgcctaaaaactgaatttctaatagaatttgatggtgtacagtctgctggagatgacagagtacttgtaatgggtgcaactaataggccacaagagcttgatgaggctgttctcaggcgtttcatcaaacgggtatatgtgtctttaccaaatgaggagacaagactacttttgcttaaaaatctgttatgtaaacaaggaagtccattgacccaaaaagaactagcacaacttgctagaatgactgatggatactcaggaagtgacctaacagctttggcaaaagatgcagcactgggtcctatccgagaactaaaaccagaacaggtgaagaatatgtctgccagtgagatgagaaatattcgattatctgacttcactgaatccttgaaaaaaataaaacgcagcgtcagccctcaaactttagaagcgtacatacgttggaacaaggactttggagataccactgtttaaggaaatacctttgtaaacctgcagaacattttacttaaaagaggaaacacaagatcttcaatgaacgtcatcggctacagaaacagcctaagtttacaggactttttagagtcttacatatttgtgcaccaaacttgaagatgaaccagaaaacagacttaaacaaaatatacaatgcaaatgtaattttttgttgtttaaggccttgccttgatggtcacagttatcccaatggacactaagttagagcacaacaaaacctgattctggtcttctttaccaatataatcataatgtaaataataatttgtatattgtgttgcagatgaaagtattccaggaacagtgaatggtagaagacacaagaacatttgtttgtttgtcttctgatgttttttcttaaaatagtaatttctcctacttttcttttctactgttgtcttaactacaggtgattggaatgccaaacactcttaagtttattttcttttttcgttttataaattcagtgtgccaaatgaaacttttttcctaagtaactgtaataggaaaaagtttattttgagagtttcttcttcataaatctacagacattaaacaattgttgtgttctttttaccttttatttttctattaccttgctaccaaacagtttagatagcaatataatagcaaaaaagcaaatatggtaaaatagagaaggtttgaaggtttgagttactctgtcatataacatgtagatcagtcttcatgtgacctgcagtatttttttttctaatgtatttgtcagaaatctgttgtagactgttaacttcttcctgatggaatttattttctgcaagaattattctgatatttaagagagccaattttaactgctgtgaaaatgtttccagtgcaagagaagggaaatactaggaactaagacatttctaatttattgcttattactttcttaattttacaggataattataagcaagtggaactaccatcttttattcttaataattattaatcccttcaatgaaactttaaaaaaactgaatttttatacatggcatacatttttctagttccttctgcttgctttattaactcaaaagttctagttctagtctgttgatctgccttttgttctcccaaaatgtacagtaattccatttgtttgtataaatatgcctggattttcattataaaaatgtcattgtagggagtagagactcatatcatggccttttaaatattgtaataaaggcaaatagatatttgcccttagtttactggttaaaagtttgtttacagaacttttctctggtgcttaaatgatgctatgtaaaatgtcatgagtggaaagaatatttgtagtagtaacaagaatttttcatttaggaaagatttcttaggttttgaaagaatacattaaaataaaaaacttgcccctactaggtaagaactttataatgaagacatacattcttcttaattttactcttgctcttgttaaagatttgtttgaatatagaagatgcatgatttctgggtttttttttttttttgagacagagtttcgctcttgttgcccaggctggagtgcaatggcgcaatctcgactcaccacaacctccgcctcccaggttcaagcaattctcctgcctcagcctcccgagtagctgggattacaggcatgcgccactaccccagctaattttgtatttttagtagagatggggtttctccatgttggtcaggctggtcttgaactcctgacctcaggtgatccgcctgcctcggcctcccaaagtgctgggattacaggcataagccactgcgcccagccagaagatgcatgatttcttaggatcatatgctgtttgtagccataaggtaaatcatgtctcttccaatcatgactttggaactccctgaataataaaaatgagagttgagataaataggggaaaaaaaatttttttcaagccagagctatgcatatgttaggtgatgggtagtatccctttaaggtctcaaacattacaacatcaattatgaaatactgataacgaaaggtagtaatgaaatatatatgatgaaaagaattgagaagttctaaattaagacatttcagttaagctcataaaatttcattgttttcatttaaaagattaacgttattgatacttggataactggctaatcatattaaaggactatgtggttccagctcaacttttaatatattgtctcctttaaaactatcatggttataattctattgggaaagacttttagataacaaagatttcaaatgttaaaagagataaaagtcaggttaatactatcttaaacactgagtcagaaaatcattactgtatagaagttgctttcctgatcaagtctgaacttcagctagtgctagagaactattttctatgacttaactctaaccaagttttattttaagctgtttctttgatagaagggccatgaaaatagagtaatgatatagtaggagataagggattggtttggtctttttcaataaagatagaagttgctgaagttttctgaattaataatgacttagattgtgaccttttagattcggtgttgagctctgtgttgtattacttcctaaaagataatgcttaaacattaagcattagtgtgctcttcatgttaatatggcagagttttgtaaactaaattaaaacttactgatatattggactttgagccaagggaaagaatgagtactatctttccagatatcttaagggtaaaagcttattctaagacagtctgtccattgagaatattagatttctgacttgcaaatatgtttgtactccagaagaattagaggaaaagcagatactagaattctaatttaattacatatacagccgtctttgtttatagtgtagaattctttatattttgtacaaaaactaattcttttggtaaaatgaaccatttacagttcggttttggactctgagtcaaaggattttcctttaaatgcttgtctcaattttagtctggtcttttgtacttttcttcagaagaaatgaattaaagggtacagttgcataaagtgggtttttatcctaatgtattggaaataaatgataaacttt

SEQ ID NO: 29622 - DNA, 27745 bp, Homo sapiens
  source 1..27745: mol_type = unassigned DNA
cccgggcagtggaaaccgtgggcaaaagttagctggcaggacagcgcagctcctccaggcagcggaggcagcgcgtcccggctctcagggacatttccttcccacctcgacccccgggaggtggtcccggtataaaggctcgctgagcgggtgggtcacagcacagctttgcagctgcggagaaacgcccaaggccgtgcatctccaggagggcggctgggctcccgcagtcctgcagaccgcgcccgatcccggcgacagggcgggcggacagccgcgcatccccggggtcccgccgagcctgggcgcagagagccgggaggaagcgttcgctcgcttcgccttgctgctgggaaactgaacgaggccgagagagaaggttcttgagttcatgtaagaggacagtcttaaaacggaagaagaaaaagaagcagttcagtctttgggagagctgcctccttgttgagtgctgcaaaggcctggaattcatttatgacagaatagatctagaaaagtccaagcatgttttctagagtggtgtagccctgtgctgcctccagtgaagagtctcttggtgttggcttcgtgcttccggagggaccatggcaacctccagaggggcctcccggtgtcctcgggatatcgccaatgtgatgcagaggctgcaagatgagcaagagatagtacaaaaacgaactttcacaaaatggatcaactctcatctggccaagcggaaacctccaatggtggtggacgatctttttgaagacatgaaagatggtgttaaactgcttgcccttctggaggtcctgtctgggcagaaactgccttgtgaacaaggacgccggatgaagcgaatccatgctgtggctaacattggcacggcactcaagttcctcgaaggaagaaagattaaattagtcaacattaactccaccgatatagctgatggccgaccctcaatagttcttggattgatgtggaccattattctatatttccagattgaagagttgaccagcaacctgccccagctccagtctttgtccagcagcgcatcctccgtggacagcatagttagctctgagactcccagcccaccaagtaaacggaaggtgaccaccaagatccaaggaaatgctaagaaggctttattaaagtgggttcagtacacagctggcaagcagactggaatagaagtaaaagattttgggaagagttggagaagcggggttgcctttcattcagttattcatgccattcgaccggaattggtggacttggagacagtgaaaggcagatccaaccgagaaaatttggaggatgctttcactatcgccgaaacagaactggggatcccaagactgctagatcctgaagacgttgatgtggataaaccagatgagaaatctattatgacctatgtagcccagtttctgaaacattatcctgacatccacaatgcaagcactgatgggcaagaggatgatgaaatacttccaggtttcccatcttttgcaaattctgtacaaaattttaagagagaagacagagtaatttttaaggaaatgaaagtttggatagaacaatttgagagagatttgacaagagcacagatggtggaatcaaatttacaggataaatatcagtcatttaagcacttcagagttcaatatgaaatgaagaggaaacagattgaacatttaatacaaccattacacagagacggtaaattgtcacttgaccaagcattggtaaaacaatcttgggatagagtgacctccaggctctttgactggcatatacagcttgataaatctcttcctgcacctctgggcaccataggtgcctggctgtacagagcggaggtggccctgagagaggaaataaccgttcaacaggtccacgaggaaacagcaaacacgatacaacggaaacttgagcaacataaggatctgcttcaaaacacggatgcccacaaaagagcattccatgaaatctaccggaccaggtctgttaacgggattccagtgccacctgatcaattagaggacatggccgagaggtttcattttgtttcctccacatcagagctacacctaatgaaaatggaatttttagaattaaagtaccgtctgctctcactgctggttcttgcagagtcaaagctgaagtcttggatcattaagtacgggaggagagagtcagtggagcagcttctacaaaactacgtgtcttttatagaaaatagcaagttctttgaacaatatgaggtgacataccagatcttgaaacagacagctgagatgtatgtcaaagcagatggttcagtggaagaagctgagaatgtgatgaaattcatgaatgaaaccaccgctcagtggaggaatctctcagtagaagtgaggagtgtgaggagcatgctggaagaagtgatctctaactgggatcgctatggcaatacagtggctagtctgcaagcctggctagaggatgctgaaaaaatgctcaatcaatcagaaaatgccaaaaaggatttttttcgaaatttacctcattggattcagcagcatactgccatgaacgatgctggcaattttctaattgaaacctgtgatgagatggtttcccgtgacctgaagcagcaattactgttgctaaatgggcggtggagggagttgtttatggaagtcaagcaatatgctcaagctgatgagatggacagaatgaagaaggaatacacagactgtgttgttaccctgtctgcttttgcaacggaagcccataagaaactttctgaacccttagaagtctcttttatgaatgtcaagctattaattcaagacttggaggatattgagcagagggtgcctgtgatggatgcccaatacaagataattacaaagacagcacacctcattaccaaagaaagcccccaagaagaaggaaaagaaatgtttgcgaccatgtcaaagctcaaagagcagctaaccaaggtcaaagaatgttactccccactcctttatgagtctcagcagctgttgattccgttggaggaattagaaaagcagatgacgtccttttatgactcacttgggaaaatcaatgaaattatcacagttcttgagcgtgaggcacaatcgagtgccctttttaaacaaaaacatcaggaactgttagcttgtcaagaaaactgtaagaaaaccttgacacttattgagaaaggcagtcaaagtgttcaaaagtttgtgaccttgagcaacgtgttaaagcattttgatcagacgaggctacaaagacagattgcagatattcatgttgcttttcagagtatggtaaagaaaactggagattggaagaagcatgtggaaaccaacagtcgcttgatgaagaagtttgaggagtctcgagcagagttggagaaggtactgcggattgctcaggagggcctggaggaaaagggggatccagaggagctcctgcggagacacactgagtttttcagtcagctggatcagagggtgctcaatgctttcctgaaagcttgtgatgaactcaccgacatccttccagagcaggagcagcaggggctgcaggaagctgttcgaaagctccacaaacaatggaaggatcttcaaggagaagccccttatcatttgcttcatctgaagattgatgtggagaagaataggttcttagcctctgtagaagaatgcagaactgagctggatcgagagaccaagctgatgccccaggaaggcagtgaaaagataattaaagagcacagggttttcttcagtgacaaaggtcctcatcatctctgtgagaaaaggttacagctcatcgaggaactctgtgtgaaactcccagtgcgggacccagtaagggacacacctggaacctgtcacgtgactctcaaagagctcagagctgccattgacagcacctacaggaagctcatggaagacccagacaagtggaaggactacactagcagattctctgagttctcatcttggatatctacaaatgagacacaattaaaggggatcaagggtgaggccatcgatactgccaaccacggagaggttaaacgtgccgttgaagagatcagaaatggtgttaccaaaaggggtgagaccctcagctggctgaaatccaggctgaaagttttgacagaagtttcttctgagaatgaagcccaaaagcagggagatgagctggcaaaattatccagctctttcaaggctcttgtgacgctgctgtcagaggttgaaaagatgctaagcaattttggggactgtgtccagtacaaagaaatagtcaaaaattctctcgaagaattaatttctggctctaaagaagtccaggaacaagctgagaagatcttggatactgaaaatctgtttgaagcacagcagttacttcttcatcaccagcaaaagacaaagcggatctcagcaaagaagagagatgtgcagcagcagatcgcgcaggcgcagcagggagaaggggggctgcctgaccgaggccacgaggagctgcggaagctggagagcacactggatggcctggagcgcagccgggagaggcaggaacgccgcatccaggtcacattaagaaaatgggagcgatttgaaacaaacaaagaaacagtagtaagatacctttttcaaacaggttccagtcatgaacgcttcttgagttttagcagtttggaaagtttatcttcagaactggaacaaacaaaggagttttctaaacggacagaaagtattgcagtccaggctgagaaccttgtaaaggaagcttcagagataccgcttgggccccaaaataagcagctgcttcaacagcaggccaagtcaatcaaagaacaagtcaaaaaattagaagacacgcttgaagaagatattaaaaccatggaaatggtgaaaaccaagtgggatcattttggcagtaattttgagactctgtccgtctggataactgagaaagaaaaagaactcaatgccttggaaacttcgtcatctgccatggacatgcaaatcagccaaattaaggtcacaattcaggaaatagaaagtaagctcagcagcattgtaggattagaagaagaagcccagtcttttgctcagtttgttaccactggagaatctgctcgaattaaagccaagttgacacaaataagaagatacggggaagagcttcgagagcatgcacagtgtctggaaggaacaatcctgggacatttatctcagcagcaaaagtttgaagagaaccttagaaagatccagcaatctgtgtctgaatttgaagataaacttgctgttccaattaaaatatgttcttcagctacagaaacatacaaagttcttcaagaacatatggatctctgccaggccctggagtcactgagcagcgcgatcactgccttctcagccagtgccaggaaggttgtgaacagagattcctgtgttcaggaggctgcggctctacagcagcaatacgaggacatcctaaggagggcgaaggagagacagacggcgctggagaatctgctggcccactggcagaggctagagaaagaactatcatcctttttgacctggttagagcggggtgaagctaaagccagttccccagaaatggacatttctgcagacagagtcaaagtggaaggtgaacttcagttaatacaggcactgcaaaatgaagttgtatcccaggcctcattctatagcaaacttttgcaattgaaggaatcattgttctcagtagcctccaaagatgatgtgaaaatgatgaaactacatttggagcagttggatgagagatggagagatttaccacagatcattaacaaaaggattaattttcttcagtctgtggttgctgaacaccagcaatttgatgagctgctgctttccttttctgtctggattaaactgtttctcagtgaattacaaactacctctgagattagcataatggaccatcaagtagcccttactcggcataaggaccacgcagcagaagtagagagcaaaaagggcgaattgcagagtctgcagggtcacttagcaaagttgggttctctgggccgtgctgaggacctccacctcctgcagggaaaggctgaggactgcttccagctgtttgaggaggccagccaggttgtggagaggcggcagcttgccctgtcccatttggcagaattcctccagagccatgcctctctgtccggcattctccgccagctgaggcaaacagtggaagcaaccaacagtatgaataagaacgagtctgatttgatagaaaaggacctcaatgatgctcttcaaaatgctaaagcattagaatctgctgccgtcagtctggatggcattctttccaaagcccaataccatctgaaaatcgggagctctgagcaaaggacttcctgcagagccacggctgatcagctctgtggagaggtagagaggatccagaaccttctgggaaccaagcagagtgaggcagatgctctggcagtgttgaaaaaagcattccaagaccagaaagaggagcttctgaaaagcattgaggacattgaagaaaggactgacaaagagcgattgaaagaacctacccgccaagctcttcagcagaggttaagagtgtttaatcagctagaagatgaattgaattctcacgagcatgaactatgttggttgaaagacaaagccaagcaaattgcccagaaagatgtagcttttgcacctgaagttgacagggagataaaccgcttagaggtcacctgggatgataccaaaagactaattcatgaaaatcagggtcagtgctgtggacttattgacttaatgagagaatatcagaacctgaaatcagctgtatctaaagtcttagaaaatgccagcagtgtgattgtaaccagaactaccataaaagatcaggaggatcttaaatgggctttttccaagcatgaaactgccaagaacaaaatgaattacaaacagaaagacttggataactttaccagcaaaggaaaacacttgttatctgagctgaagaaaattcacagtagtgatttcagcttggtgaaaacagacatggagagcaccgtggacaaatggctggatgtatcagagaaacttgaagaaaacatggataggctgagagtaagcctgtccatttgggatgatgtactgtcaactagagatgagattgagggatggtcaaacaactgcgttccacagatggcagaaaacatcagcaacctggataaccacctcagagctgaagaactgcttaaagaatttgagtctgaagttaaaaacaaagcattgagattggaagaactgcattccaaagttaatgatctgaaagaattaactaaaaatctagaaacaccgccagaccttcagtttatagaagcagacttaatgcagaaactggagcatgccaaagaaataactgaagtagcaaaaggaaccctgaaggatttcacggctcaaagtacacaagtggagaagtttattaatgacataacaacatggttcacaaaagtggaagaatcgttgatgaactgtgcccaaaatgagacttgtgaagcattgaaaaaagtcaaggatatacaaaaagaacttcaaagtcaacaaagcaacatcagctctacccaagaaaatctcaatagcttgtgccgcaagtaccactcagctgagttggagagcctgggccgtgcaatgactggtctgataaagaaacatgaagccgtgagccagttgtgctccaaaacccaggccagcctgcaggaatctctggaaaaacacttcagtgagtctatgcaggaattccaagaatggtttttgggagcaaaggcagcagcaaaagaatcatcagatcgcaccggtgacagcaaagttctagaagcaaagctccatgatcttcagaacattttggactcagtcagtgatgggcagagcaaacttgatgcagtgactcaagaaggacaaactttgtatgcacatttgtctaaacaaattgtcagtagcattcaagaacaaatcacaaaggccaatgaagagtttcaagcatttctgaaacaatgccttaaagataagcaggctcttcaagactgtgcttcagaacttggaagctttgaagatcagcacagaaaactgaacttatggatccatgaaatggaagaaaggttcaatacggaaaacttgggagagagtaaacagcacattcctgagaagaaaaatgaagttcataaagttgaaatgtttttgggagaactgctggctgcaagagagtctcttgataagctttcccagagagggcagcttctgagtgaagaaggccacggtgctgggcaggagggccgcctgtgttcccagctcctcacaagccaccagaacctacttagaatgaccaaagagaaactccggagctgccaggtggcccttcaggagcacgaagccctggaggaagcactgcaaagcatgtggttctgggtgaaggccattcaggacagactggcctgtgcagagagcactcttgggagcaaagacaccctggagaaacggctgtcacaaatacaggatattctcctgatgaaaggtgaaggggaagttaagttgaatatggccattggcaagggggaacaggccttgagaagtagcaacaaagaaggtcagagggtgattcagactcagttagagacccttaaagaagtgtgggctgacatcatgagctcctccgtccacgctcaaagcactttagagtctgtgattagccaatggaatgactatgtagagaggaaaaaccagttggagcagtggatggaatcagtggatcaaaaaatagaacatcccttacaaccacagccaggtctgaaagagaagttcgtcctgcttgaccacctccagtccatcctgtctgaggcagaagatcacacgagagcccttcaccgtctaattgcgaagtccagggagctctacgaaaagacagaggatgagtctttcaaggacacagctcaagaggagctgaaaacacagtttaatgatataatgactgttgccaaggaaaaaatgaggaaagtggaagagattgtgaaagatcatctaatgtatttagatgcggtccacgagttcacagattggctccattcagcaaaggaagaacttcaccggtggtcagatatgtctggagattcatcagccacccagaaaaagttatcaaaaattaaggagctgatagattccagagagattggtgcaagccgtctcagcagagtggagtcgctggctcccgaagtgaaacagaacacaactgccagtgggtgtgagctcatgcacacggagatgcaggccctgcgtgccgactggaagcagtgggaagacagtgtattccaaacgcagagctgtttggagaacctggtcagccagatggccctttcggagcaggaattctcaggccaagtggctcaactggagcaggccctggaacagttcagtgcccttctgaaaacctgggctcagcagttaaccctcctggaaggcaagaacacggatgaggagatagtggaatgctggcacaaaggacaagagatactggatgctttgcaaaaagcagagcctagaacagaggatctcaagtctcagctgaatgaactttgtcgattttccagagacctgagtacctacagtggaaaagtttctggcttgattaaagagtataattgtctttgtttgcaagcatccaagggctgccagaataaagaacagattttacagcaaagatttcgaaaggccttcagggatttccagcagtggttggttaatgcaaaaatcactaccgccaagtgttttgatatacctcaaaatataagtgaagtttcaactagtcttcagaaaatacaggagtttttgtcagaaagtgaaaatggacagcacaagctaaacatgatgctgtctaaaggggaacttctgagtaccctgctgaccaaagagaaagcgaaagggatccaggccaaagttacagctgcaaaagaagattggaaaaattttcattcaaatctccaccaaaaagaatctgctctagagaatctaaagatccaaatgaaggactttgaagtaagtgctgagcctatccaggactggctgagtaaaactgagaagatggtccatgaaagcagcaatcgcctctatgatctgccagcaaagaggagggagcagcagaagctccagtctgtccttgaggaaatacactgctacgagcctcagctcaacaggctgaaagagaaagctcagcagctgtgggaaggacaagctgccagcaagagctttaggcacagagtgtcgcagctgtcttctcagtatctagcgctaagcaatttaacaaaggagaaagtgtcaagactggatagaatcgttgcagaacacaatcagttctctcttgggattaaagaattacaagactggatgacggatgcgattcacatgctggattcatactgccacccgacatccgacaaaagtgtgctggacagcaggacgctcaagctcgaggctctattatcagtcaaacaggaaaaagagattcagatgaaaatgatagtgaccaggggagaatctgtccttcagaatacttctccagaaggcattcccactattcagcagcagctgcagagtgtgaaggatatgtgggcatcccttttgtctgcagggattcgttgtaaaagccaactcgaaggagctctctccaagtggacaagttatcaggatggcgttcgacagttctccggttggatggatagtatggaagccaacctgaatgaatcagaaaggcagcatgcggagctgcgggataaaacaacgatgctcggaaaagccaagttattaaatgaagaagtgctgagttacagcagcttgctggagaccatcgaagtcaaaggggctggcatgacagaacactatgtcacccagctagaactccaggatctacaggaacgatacagagccatccaagagagggccaaggaagccgtaaccaagtctgaaaaacttgtccgcctgcaccaagagtatcagagagacctaaaggcatttgaagtttggttggggcaagaacaagaaaagctcgaccagtattcagttcttgaaggtgatgcccacactcatgagacaacattgcgtgatcttcaggagctacaggtacactgtgcagaggggcaggccctgttgaactcagtgctgcacaccagagaggatgtgatcccatcaggtatcccacaggcagaggaccgggctttagagtctctccggcaagactggcaggcttaccagcacaggctgtccgagactcgaactcagttcaataacgtggtgaacaaattgaggctaatggagcaaaagtttcagcaagtagatgaatggctcaaaacagcagaggagaaagttagtcccaggaccagacgtcagtctaacagggcaaccaaggagatacaattacatcagatgaagaagtggcacgaagaagtgactgcatacagagatgaagttgaggaagtgggagctagagctcaggagatactggacgagagccacgtgaacagcagaatgggttgccaggccacccagctgacttccagataccaggccctgcttctccaagtgctggaacaaataaaattcctggaggaggagattcagagtttggaggaatcagaatcatccctcagttcctattctgattggtatggctctactcataaaaacttcaagaatgtggctaccaagattgacaaagtagatacagtaatgatggggaagaaattgaagacgttggaggttttgctcaaagacatggagaaaggtcacagtttgctgaaatcagcccgggagaaaggagagagggctgttaaatacttggaggaaggcgaggcagagaggttaagaaaggagattcatgatcacatggagcagttgaaggaactgaccagcactgtccggaaagaacacatgacgctggaaaaaggtcttcatttagcaaaggaattctcagataaatgcaaagcactgacacagtggatagcagaataccaggaaattctacatgttcctgaagaacccaaaatggaattatatgagaaaaaagctcagttatctaaatacaagtcacttcaacaaacggtgctgtcccatgaaccatcagtaaagtcagtgagagagaagggtgaagctcttttggaactggtgcaggacgtcactttaaaggacaaaatagatcaacttcaaagtgattaccaggacctgtgcagcataggaaaggagcatgtcttcagtctggaggcgaaagtcaaagaccatgaagactacaacagtgagctccaagaggtcgaaaagtggctgctgcagatgtctggcagactggtggcacctgacctcctggagacaagcagcctggagacaatcacccagcaattggcccaccacaaggcaatgatggaagaaattgctggttttgaagaccgtttgaacaatcttcaaatgaaaggtgatactttgattggccaatgtgcagaccacctgcaagcgaaacttaaacaaaacgtgcatgctcatctgcagggcacaaaggacagctactcagcgatctgcagcacagctcagaggatgtaccagagtttggaacacgaacttcagaagcacgtcagccgacaagacaccctgcagcagtgccaggcctggctttctgcagtccagccggatttagagccaagtcctcaaccacctcttagtagggcagaagccattaagcaggtcaaacacttcagagctttgcaagagcaggcaaggacctacctagatctcctttgctccatgtgtgacctgtcaaatgcttcggtgaaaaccacagcaaaagacattcaacaaacagagcaaacgattgaacaaaagcttgtccaggcccagaacttaactcagggctgggaagagatcaagcacctgaagtctgagctctggatttacctgcaagatgctgatcagcaactgcagaacatgaagaggaggcactctgagctggagctgaacattgcacagaacatggtttcacaagttaaggattttgttaagaaactacagagcaaacaggcatccgtgaacaccataatagaaaaggtgaataagttaacaaagaaggaggaatcgcctgaacacaaggaaataaatcatttaaatgatcagtggctcgatttgtgccgtcagtctaacaacctgtgcttgcaaagggaagaggatcttcagagaacaagagattaccatgactgtatgaatgttgttgaagtgttcctagaaaaatttactacagaatgggataacttggccagatctgatgcagagagtacagctgtccacctggaagctttgaaaaagttagcattggcattgcaggagagaaagtatgctattgaagatctgaaagatcaaaagcagaaaatgatagagcatctgaatttagatgacaaggagttagtcaaagaacagacgagtcatttagagcaacgttggtttcagcttgaggacctcattaaaaggaaaatccaagtgtcagtcaccaacttggaggagttaaatgtggtgcagtccagatttcaggagctaatggagtgggcagaagagcaacaacccaacatcgccgaggcccttaagcagagccctcctccagatatggctcagaaccttctcatggatcacctggccatctgcagtgaactggaggccaagcagatgctcctgaaatcgcttataaaggacgcagacagggtcatggcagatcttggtctcaatgagcgacaggtcatccagaaggctctctctgatgcacaaagccacgtgaattgtctcagtgacttagtgggccagcgaagaaagtacttaaacaaagccttgtccgagaaaacccagtttctcatggcagtgttccaggccaccagccaaattcagcaacatgagcgaaagataatgttccgtgaacacatctgtctgttaccagatgatgtgagcaaacaagtcaaaacatgtaagagtgcacaagccagcctcaagacttaccaaaatgaagtcactggactttgggcccagggtcgcgaactaatgaaggaagtcacagagcaggaaaagagtgaagtgctggggaagcttcaggaattgcagagtgtctatgacagtgttttacaaaagtgcagtcaccggttacaagaactagagaagaatttggtttctaggaagcattttaaggaagattttgataaagcttgccactggctaaaacaagcagatattgttacatttcctgaaatcaacctaatgaatgagagttctgagcttcatacacaactggctaaataccaaaacattcttgaacaatctccagaatatgaaaatcttctacttacgctgcagagaactgggcagaccatattaccatcgctgaatgaagtcgatcattcctacctcagtgaaaagctaaatgctttgcctcgacaatttaatgtaattgttgccttggctaaagacaagttctataaagtccaggaagcaattcttgctcggaaggaatatgcttccttgattgagttgacaacccagtctctgagtgaacttgaagcccaattcttgaggatgagcaaagttcccaccgacctggccgttgaggaggctctttctctgcaagatggttgcagagccattctggacgaggtggcgggccttggggaggcggtggatgaactgaaccagaaaaaagaaggttttcgcagcacaggtcagccttggcagccagacaagatgctgcaccttgtcaccttatatcacaggctgaagcgacaaacagaacagagggttagcttattagaagacaccaccagtgcttaccaagaacacgagaagatgtgccaacagctggagagacaactgaagtctgtaaaagaggagcagtccaaagtgaatgaggaaacgctgcctgcagaggagaagctcaaaatgtatcactccctggcaggaagtctccaggactcagggattgtactgaaacgagtaaccatacatcttgaagatcttgccccacaccttgaccccttggcttatgagaaagccaggcatcagatccagtcctggcaaggggagttaaaactgttgacttctgccattggtgagacggtgacagaatgtgagagccgaatggtgcagagtatagacttccagactgagatgagtcgctccctggactggctgaggagagtgaaggcagagctcagtgggccggtgtacctagacctcaacctgcaggacatccaagaggaaatcagaaaaatccaaattcatcaggaagaggtccagtccagcttgagaatcatgaatgcgctgagtcacaaggaaaaggagaagttcacaaaggccaaggagctgatttctgcggatttagaacacagcctcgctgagctctcagagctggatggagacatccaggaagccttacgcaccagacaggctaccttgactgaaatatatagccagtgtcaaaggtattatcaggtatttcaagcagccaatgactggcttgaggatgcccaagaattgttacagctggcaggcaatggcctagacgtggagagcgcagaggaaaatctcaaaagccacatggaatttttcagtacagaggatcagttccatagtaacctggaggagctccacagcctggtagccaccctggacccactcatcaagccaaccggcaaagaagacctagaacagaaagtggcttctctggaactcaggagccagaggatgagccgggactctggtgcccaagtggatctcttgcagagatgcacagctcaatggcacgattaccagaaagcaagggaagaggttattgaattgatgaatgatacagaaaagaaattgtctgagttttctttgttgaagacttcgtctagtcatgaagcggaagaaaaattgtcagaacacaaggctttagtgtcagtggttaactctttccatgagaaaattgtggcccttgaggaaaaagcttcacaactggagaaaaccggaaatgatgccagcaaagccaccctgagcaggtcaatgaccaccgtctggcagcgctggacacgccttcgagctgtggcccaggaccaggagaagatcctggaagatgcagtggatgagtggacgggctttaacaacaaggttaaaaaggccactgaaatgattgatcagctgcaagataagttacctggaagttcagcagagaaagcatcgaaagcagagctcttaactcttcttgaataccacgacacgttcgttctggagctggagcagcagcagtcggccttgggcatgctgcggcagcaaaccctgagcatgctccaggatggagccgccccaacccctggggaagagcctccgctcatgcaggaaatcaccgccatgcaagatcggtgcctgaacatgcaggagaaagtgaagactaatggaaagttggtgaagcaagagctgaaggaccgagaaatggtggagactcagatcaattctgtgaaatgttgggttcaggaaacgaaagaatatttagggaatccaacaatagaaatagatgctcaacttgaagaacttcagattctcctaacagaagccacaaatcaccgacagaacattgaaaaaatggcagaagaacagaaggagaagtacttaggtctttataccatattaccttctgaactctcccttcagttggctgaagtggcgttagatctaaagatccgagatcagatccaagacaaaataaaagaagttgagcagagcaaggccacgagccaggaactcagccggcaaattcagaagttagctaaagacctcacaactattctaactaagctgaaagcgaagacagataatgtagttcaagctaaaactgaccaaaaggtgctgggagaggaattagatggctgtaattcaaagttaatggaattagatgcagcagtacagaaattcttggaacagaatggccaactgggtaagccactggccaagaagataggaaaactgactgaacttcaccagcagaccattagacaagctgagaatcggctctccaagctcaatcaggcagcatcacatttagaagaatacaatgaaatgcttgaattaattttgaagtggattgaaaaagctaaagtcttggctcatggaactattgcatggaattctgcaagccagcttcgggaacaatatattttgcatcagaccctgctagaagaatccaaagaaattgacagtgagctggaagcaatgactgagaaattacagtacctcactagcgtgtactgtacagaaaaaatgtctcagcaagtggcagaactgggacgggagactgaggagttgcgacagatgatcaaaattcgtttgcagaacctccaagatgcagctaaggatatgaaaaaatttgaagcagagttgaaaaagttacaagctgccttggagcaagcccaggcaacactgacttctccagaagttggacgtctcagtctcaaggagcagctctctcatcggcagcatttgttgtctgagatggagtcactgaagccgaaggtgcaagcagtgcagctctgccagagtgccctccggatccccgaggatgtggttgccagcttacctctctgtcatgctgctctgcggctgcaggaagaggccagccggctgcagcacaccgccatccagcagtgtaacatcatgcaggcagctgtggtacaatatgaacaatatgagcaagaaatgaaacatctccagcaactgatagaaggagctcacagagagattgaggataaacctgttgccaccagtaacatacaggagctgcaggctcagatttctcggcatgaggagctggcgcagaaaattaagggctaccaggagcagatcgcttctttgaattccaagtgcaagatgctgacgatgaaagccaagcacgccaccatgctgctgacggtgaccgaggtcgaggggctggcggaagggacagaggacctggatggggagctcctccccacgccttcggcccacccctctgtggtcatgatgactgcaggtcgctgtcacactttgctgtcaccggtcactgaggagtctggggaggagggaaccaacagtgagatttcctctccacctgcctgtcgctccccttcacctgtggctaatacagatgcttctgttaaccaggacattgcatattaccaagccttgtctgctgagaggttgcagacagatgctgcaaaaattcaccccagcacatccgcatcccaggagttctatgaaccgggattggagccatccgctactgccaaactgggtgatttgcagcgttcttgggaaaccttaaagaatgtgatcagtgagaagcagcgcacactctatgaagctttggaacgccagcagaagtaccaggactccctccagtccatctctacgaagatggaggccattgagctgaaactcagtgagagcccagagcctggcaggagtccagaaagccagatggctgaacatcaggcattgatggatgagattctcatgctccaggatgaaatcaatgagctccagtcctctctcgcagaggagctggtatccgagtcttgtgaggccgaccctgcggagcagctggccttgcagtccacgctcactgtcttagccgagcgaatgtccaccatcaggatgaaagcctcggggaaacggcagcttttggaggagaagttgaatgatcagctggaggaacaaaggcaggaacaggccctgcagaggtatcgctgtgaagccgatgagctggacagctggctcttgagtaccaaggccactctggacactgcgctgagtccacccaaggagcccatggacatggaggcccagcttatggactgccagaatatgctggtggaaatagagcagaaggtggtggctttatcagaactgtcagtccacaatgagaacctgctgctggagggcaaagctcacaccaaggacgaggccgagcagctggctggaaagctgagaaggctcaaggggagcctgctggagctgcagagagccctgcatgataagcagctcaacatgcagggaacagcacaggagaaggaggagagcgatgttgacctaacagccacgcagagccccggcgtccaggaatggctggcccaagctcgcaccacatggacccagcagcggcagagcagtctccagcaacaaaaagagttagaacaggaattagccgagcagaagagtctccttcgctcagtagccagtcgtggagaggagattctaattcaacattcggcggcagagacctctggtgatgctggcgaaaaacctgatgtgttatcccaggagttggggatggaaggggagaaatcatccgctgaagaccagatgagaatgaaatgggaaagcctacatcaagaatttagtaccaagcagaaactactacagaatgttctggaacaggaacaagagcaagtgctttatagcaggccaaatcgactcttgtctggtgtgccactgtacaaaggggacgtgccaacccaagataaatctgcagttacatctttgctggatggactgaaccaagccttcgaggaggtttcatcccagagtggaggggcaaagaggcagagtatacacttggagcagaagttgtatgatggagtctcagccacctctacttggttggatgacgttgaagaacgtttatttgttgccacagcacttttaccagaagaaacagagacttgtctcttcaaccaagagattcttgccaaagacattaaggaaatgtctgaagaaatggataagaacaaaaacttgttttcccaagcttttccagagaatggtgataatcgagatgttattgaagatactttgggttgtcttttgggcaggttatccttgctagactcagtagtgaatcaacgatgtcatcagatgaaagaaagacttcagcaaatactaaatttccagaatgatctgaaagtgctgtttacatcactggctgacaacaaatacatcattctgcaaaaactggcaaatgtgtttgaacagcccgtagcagaacaaatagaggcaatacaacaggctgaagatggactcaaagaatttgatgcaggaatcattgaattaaagaggcgtggtgacaagctacaggtcgagcagccgtccatgcaagaactctccaagctccaggacatgtatgatgagctgatgatgatcattggctcccggaggagtggtctgaatcagaaccttacactcaagagtcagtatgagagggccctacaagatctggctgacctgctagaaactggtcaggagaagatggcaggagaccagaaaatcatcgtgtcttccaaagaggaaatccagcaactacttgacaaacataaggaatactttcagggcctggaatctcatatgatcttgactgaaacactcttcagaaagataatcagctttgcagtccaaaaggaaacccagttccatacagagctgatggctcaggcttctgctgtactgaaacgggctcacaagaggggtgtggagctggagtacattctagagacgtggtcccatctggatgaggaccagcaggagctcagcagacagctggaggtggtggaaagcagcatcccaagcgtgggtctggtggaggagaacgaggacaggcttattgaccgcataacactctaccagcatttaaaatctagccttaatgaataccagcccaaattatatcaagtattagatgatgggaaacgacttctgatatccatcagctgctcagatctagaaagccaactaaatcaacttggagagtgctggctaagtaacaccaataaaatgtctaaggaacttcacagactggaaacaatattgaaacactggaccagatatcaaagtgaatctgcagatctaattcactggttacaatctgcaaaagaccggctagaattttggactcagcaatctgtgacagtcccacaagagctggaaatggtccgtgatcatctaaatgctttcctggagttttctaaagaagtggatgcccaatcttccctgaaatcatctgttctgagtactggaaatcagctccttcgactaaaaaaggtggacacagccacgctgcgctctgagctgtcgcgcattgatagccagtggactgacctgctaaccaatatcccagccgtccaggagaagctccaccagctccagatggataaactgccttcccgccatgccatttctgaagtcatgagttggatttctctaatggaaaatgttattcagaaggatgaagataatattaaaaattccataggttacaaggcaattcatgaataccttcagaaatataagggttttaagatagacattaactgtaaacagctgacagtggattttgtgaaccagtccgtgctacaaatcagcagtcaggatgtggaaagtaagcgtagtgataagactgattttgctgagcaacttggagcaatgaataaaagttggcaaattctgcaaggtctagtaactgagaagatccagctgttggaaggcttattggaatcttggtcagaatatgaaaataatgtacaatgtctgaaaacatggtttgaaacccaggaaaagagactaaaacaacagcatcgaattggagatcaggcttctgttcaaaatgcactgaaagactgtcaggatctggaagatttgattaaagcaaaagaaaaagaagtagagaaaattgagcagaatggacttgctttgattcagaacaagaaagaagacgtctctagcattgtcatgagcacactgcgagagctcggccaaacctgggcaaatttagatcacatggttggacaattaaagatactgctgaaatcagtgcttgaccaatggagtagtcacaaagtggcctttgacaagataaacagttacctcatggaggccagatactctctttcccgattccgtctgctgactggctccttagaagctgtgcaagttcaggtggacaatcttcagaatctccaagatgatctggaaaaacaggaaaggagcttacagaaatttggctctatcaccaaccaattattaaaagagtgtcacccacccgtgacagaaactcttaccaatacactgaaagaagtcaacatgagatggaataacttgctggaagagattgctgagcagctacagtccagcaaggccctacttcagctttggcaaagatacaaggactactccaaacagtgtgcttcgacagttcagcagcaggaggatcgaaccaatgagctgttgaaggcagccacaaacaaggacattgccgatgatgaggttgccacatggattcaagattgcaacgacctcctcaaaggactgggcacagttaaagattccctcttttttctccatgagctgggagagcaactgaagcaacaagtggatgcttccgcagcatcagctattcaatcggatcaactctctttgagtcaacacttgtgtgccctggagcaagctctctgcaaacagcagacttcattacaggctggagttcttgattatgaaacctttgccaagagtttagaagctttggaggcctggatagtggaagctgaagaaatactacaagggcaggaccctagccactcatctgacctctccacaatccaggaaaggatggaagaacttaagggacagatgttaaaattcagcagcatggctccagatttagaccgtctaaatgagcttggatataggttacccttgaatgataaggaaatcaaaagaatgcagaatctgaaccgccattggtctctgatctcctctcagactacagaaagattcagcaagttgcagtcatttttgctacaacatcagactttcttggaaaaatgtgaaacatggatggaattcctagttcagacagaacaaaagttagcagtagagatttcaggaaattatcagcaccttttggaacagcagagagcacacgagttgtttcaagccgagatgttcagtcgtcagcagattttgcactcaatcattattgatgggcaacgtcttctagaacaaggtcaagttgatgacagggatgaattcaacctgaaattgacactcctcagtaatcaatggcagggagtgattcgcagggcccagcagaggcgggggatcattgacagccagattcgccagtggcagcgctatagggagatggcagaaaagcttcgtaaatggttggttgaagtgtcctacctccccatgagtggtctcggaagtgttcctataccactgcaacaagcaaggaccctctttgatgaagtgcagttcaaagaaaaagtgtttctgcggcaacaaggcagctacatcctgactgtggaggctggcaagcaactccttctctcggcggacagtggcgctgaggccgccttgcaggccgaactcgctgaaatccaagagaaatggaaatcagccagcatgcggctggaagaacagaagaaaaaactagccttcttgttgaaagactgggaaaaatgtgagaaaggaatagcagattccctggagaaactacgaactttcaaaaagaagctttcgcagtctctcccggatcaccatgaagagctccatgcagaacaaatgcgttgcaaggaattagaaaatgcagttgggagctggacagatgacttgacccagttgagcctgctgaaggacaccctctctgcctatatcagtgctgatgatatctccattcttaatgaacgcgtagagcttctgcaaaggcagtgggaagaactatgccaccagctctccttaaggcggcagcaaataggtgaaagattgaatgaatgggcagtcttcagtgaaaagaacaaggaactctgtgagtggttgactcaaatggaaagcaaagtttctcagaatggagacattctcattgaagaaatgatagagaagctcaagaaggattatcaagaggaaattgctattgctcaagagaacaaaatacagctccaacaaatgggagaacgacttgctaaagccagccatgaaagcaaagcatctgagattgaatacaagctgggaaaggtcaacgaccggtggcagcatctcctggacctcattgcagccagggtgaagaagctgaaggagaccctggtagccgtgcagcagcttgataagaacatgagcagcctgaggacctggctcgctcacatcgagtcagagctggccaagccaatagtctacgattcctgtaactcggaagaaatacagagaaagcttaatgagcagcaggagcttcagagagacatagagaagcacagtacaggtgttgcatctgtcctcaacctgtgtgaagtcctgctgcacgactgtgacgcctgtgccactgatgccgagtgtgactctatacagcaggctacgagaaacctggaccggcggtggagaaacatttgtgctatgtccatggaaaggaggctgaaaatcgaagagacgtggcgattgtggcagaaatttctggatgactattcacgttttgaagattggctgaagtcttcagaaaggacagctgcttttcccagctcttctggggtgatctatacagttgccaaggaagaactaaagaaatttgaggctttccagcgacaggtccacgagtgcctgacgcagctggaactgatcaacaagcagtaccgccgcctggccagggagaaccgcactgattcagcatgtagcctcaaacagatggttcacgaaggcaaccagagatgggacaacctgcaaaagcgtgtcacctccatcttgcgcagactcaagcattttattggccagcgtgaggagtttgagactgcgcgggacagcattctggtctggctcacagagatggatctgcagctcactaatattgaacatttttctgagtgtgatgttcaagctaaaataaagcaactcaaggccttccagcaggaaatttcactgaaccacaataagattgagcagataattgcccaaggagaacagctgatagaaaagagtgagcccttggatgcagcgatcatcgaggaggaactagatgagctccgacggtactgccaggaggtcttcgggcgtgtggaaagataccataagaaactgatccgcctgcctctcccagacgatgagcacgacctctcagacagggagctggagctggaagactctgcagctctgtcggacctgcactggcacgaccgctctgcagacagcctgctttctccacagccttcctccaatctctccctctcgctcgctcagcccctccggagcgagcggtcaggacgagacaccccggctagtgtggactccatccccctggagtgggatcacgactatgacctcagtcgggacctggagtctgcaatgtccagagctctgccctctgaggatgaagaaggtcaggatgacaaagatttctacctccggggagctgttggcttatcaggggaccacagtgccctagagtcacagatccgacaactgggcaaagccctggatgatagccgttttcagatacagcaaaccgaaaatatcattcgcagcaaaactcccacggggccggagctagacaccagctacaaaggctacatgaaactgctgggcgaatgcagtagcagtatagactccgtgaagagactggagcacaaactgaaggaggaagaggagagccttcctggctttgttaacctgcatagtaccgaaacccaaacggctggtgtgattgaccgatgggagcttctccaggcccaggcattgagcaaggagttgaggatgaagcagaacctccagaagtggcagcagtttaactcagacttgaacagcatctgggcctggctgggggacacggaggaggagttggaacagctccagcgtctggaactcagcactgacatccagaccatcgagctccagatcaaaaagctcaaggagctccagaaagctgtggaccaccgcaaagccatcatcctctccatcaatctctgcagccctgagttcacccaggctgacagcaaggagagccgggacctgcaggatcgcttgtcgcagatgaatgggcgctgggaccgagtgtgctctctgctggaggagtggcggggcctgctgcaggatgccctgatgcagtgccagggtttccatgaaatgagccatggtttgcttcttatgctggagaacattgacagaaggaaaaatgaaattgtccctattgattctaaccttgatgcagagatacttcaggaccatcacaaacagcttatgcaaataaagcatgagctgttggaatcccaactcagagtagcctctttgcaagacatgtcttgccaactactggtgaatgctgaaggaacagactgtttagaagccaaagaaaaagtccatgttattggaaatcggctcaaacttctcttgaaggaggtcagtcgtcatatcaaggaactggagaagttattagacgtgtcaagtagtcagcaggatttgtcttcctggtcttctgctgatgaactggacacctcagggtctgtgagtcccacatcaggaaggagcaccccaaacagacagaaaacgccacgaggcaagtgtagtctctcacagcctggaccctctgtcagcagtccacatagcaggtccacaaaaggtggctccgattcctccctttctgagccagggccaggtcggtccggccgcggcttcctgttcagagtcctccgagcagctcttccccttcagcttctcctgctcctcctcatcgggcttgcctgccttgtaccaatgtcagaggaagactacagctgtgccctctccaacaactttgcccggtcattccaccccatgctcagatacacgaatggccctcctccactctgaactaagcagatgccatctgcagaagtgctggtagcataaggaggatcgggtcataagcaatcccaaactaccaacaagaggaccttgatcttggcgaaagccctcggtgtggcagctttagccctcctccagatcacatgtgtgcaaattatggcttcagaggtggaagataaacagtgacgggggaacaaacagacaacaagaaggtttggaagaaatctggtttgagactctgaaccttagcactaaggagattgagtaaggacctccaaagttccccggactcatgaattctgggcccttggcccattctgtgcacagccaaggacttcagtagaccatctgggcagctttcccatggtgctgctccaaccatcagataaatgaccctcccaagcaccatgtcagtgtcgtacaatctaccaaccaaccagtgctgaagagattttagaaccttgtaacatacaatttttaagagcttatatggcagcttcctttttaccttgttttcctttggggcatgatgttttaacctttgctttagaagcacaagctgtaaatctaaaaggcacttttttttagaggtataaagaaaaactagatgtaataaataagatcatggaaggctttatgtgaaaaaagttgaatgttatagtaaaaaaaaaaagatatttatgtatgtacagtttgctaaagccaagttttgtttgtattgatttctttgcatttattatagatattataaaata

SEQ ID NO: 29623 - DNA, 26581 bp, Homo sapiens
  source 1..26581: mol_type = unassigned DNA
cccgggcagtggaaaccgtgggcaaaagttagctggcaggacagcgcagctcctccaggcagcggaggcagcgcgtcccggctctcagggacatttccttcccacctcgacccccgggaggtggtcccggtataaaggctcgctgagcgggtgggtcacagcacagctttgcagctgcggagaaacgcccaaggccgtgcatctccaggagggcggctgggctcccgcagtcctgcagaccgcgcccgatcccggcgacagggcgggcggacagccgcgcatccccggggtcccgccgagcctgggcgcagagagccgggaggaagcgttcgctcgcttcgccttgctgctgggaaactgaacgaggccgagagagaaggttcttgagttcatgtaagaggacagtcttaaaacggaagaagaaaaagaagcagttcagtctttgggagagctgcctccttgttgagtgctgcaaaggcctggaattcatttatgacagaatagatctagaaaagtccaagcatgttttctagagtggtgtagccctgtgctgcctccagtgaagagtctcttggtgttggcttcgtgcttccggagggaccatggcaacctccagaggggcctcccggtgtcctcgggatatcgccaatgtgatgcagaggctgcaagatgagcaagagatagtacaaaaacgaactttcacaaaatggatcaactctcatctggccaagcggaaacctccaatggtggtggacgatctttttgaagacatgaaagatggtgttaaactgcttgcccttctggaggtcctgtctgggcagaaactgccttgtgaacaaggacgccggatgaagcgaatccatgctgtggctaacattggcacggcactcaagttcctcgaaggaagaaagattaaattagtcaacattaactccaccgatatagctgatggccgaccctcaatagttcttggattgatgtggaccattattctatatttccagattgaagagttgaccagcaacctgccccagctccagtctttgtccagcagcgcatcctccgtggacagcatagttagctctgagactcccagcccaccaagtaaacggaaggtgaccaccaagatccaaggaaatgctaagaaggctttattaaagtgggttcagtacacagctggcaagcagactggaatagaagtaaaagattttgggaagagttggagaagcggggttgcctttcattcagttattcatgccattcgaccggaattggtggacttggagacagtgaaaggcagatccaaccgagaaaatttggaggatgctttcactatcgccgaaacagaactggggatcccaagactgctagatcctgaagacgttgatgtggataaaccagatgagaaatctattatgacctatgtagcccagtttctgaaacattatcctgacatccacaatgcaagcactgatgggcaagaggatgatgaaatacttccaggtttcccatcttttgcaaattctgtacaaaattttaagagagaagacagagtaatttttaaggaaatgaaagtttggatagaacaatttgagagagatttgacaagagcacagatggtggaatcaaatttacaggataaatatcagtcatttaagcacttcagagttcaatatgaaatgaagaggaaacagattgaacatttaatacaaccattacacagagacggtaaattgtcacttgaccaagcattggtaaaacaatcttgggatagagtgacctccaggctctttgactggcatatacagcttgataaatctcttcctgcacctctgggcaccataggtgcctggctgtacagagcggaggtggccctgagagaggaaataaccgttcaacaggtccacgaggaaacagcaaacacgatacaacggaaacttgagcaacataagagaaaactaaggaatgtaatagatctgcttcaaaacacggatgcccacaaaagagcattccatgaaatctaccggaccaggtctgttaacgggattccagtgccacctgatcaattagaggacatggccgagaggtttcattttgtttcctccacatcagagctacacctaatgaaaatggaatttttagaattaaagtaccgtctgctctcactgctggttcttgcagagtcaaagctgaagtcttggatcattaagtacgggaggagagagtcagtggagcagcttctacaaaactacgtgtcttttatagaaaatagcaagttctttgaacaatatgaggtgacataccagatcttgaaacagacagctgagatgtatgtcaaagcagatggttcagtggaagaagctgagaatgtgatgaaattcatgaatgaaaccaccgctcagtggaggaatctctcagtagaagtgaggagtgtgaggagcatgctggaagaagtgatctctaactgggatcgctatggcaatacagtggctagtctgcaagcctggctagaggatgctgaaaaaatgctcaatcaatcagaaaatgccaaaaaggatttttttcgaaatttacctcattggattcagcagcatactgccatgaacgatgctggcaattttctaattgaaacctgtgatgagatggtttcccgtgacctgaagcagcaattactgttgctaaatgggcggtggagggagttgtttatggaagtcaagcaatatgctcaagctgatgagatggacagaatgaagaaggaatacacagactgtgttgttaccctgtctgcttttgcaacggaagcccataagaaactttctgaacccttagaagtctcttttatgaatgtcaagctattaattcaagacttggaggatattgagcagagggtgcctgtgatggatgcccaatacaagataattacaaagacagcacacctcattaccaaagaaagcccccaagaagaaggaaaagaaatgtttgcgaccatgtcaaagctcaaagagcagctaaccaaggtcaaagaatgttactccccactcctttatgagtctcagcagctgttgattccgttggaggaattagaaaagcagatgacgtccttttatgactcacttgggaaaatcaatgaaattatcacagttcttgagcgtgaggcacaatcgagtgccctttttaaacaaaaacatcagttgaggatactgaaatgcaaatggtgtaattcaagccaaaaaatgaccctctgccttgtgctgggctcaatgatttccatgctgtctactgccaaaatcacaattgcaggctacaagtcagaggtggaggtgtctgaactgttagcttgtcaagaaaactgtaagaaaaccttgacacttattgagaaaggcagtcaaagtgttcaaaagtttgtgaccttgagcaacgtgttaaagcattttgatcagacgaggctacaaacagattgcagatattcatgttgcttttcagtaatgagaaagcagcatcacattatgattgtttttcacatcaagagtatggtaaagaaaactggagattggaagaagcatgtggaaaccaacagtcgcttgatgaagaagtttgaggagtctcgagcagagttggagaaggtactgcggattgctcaggagggcctggaggaaaagggggatccagaggagctcctgcggagacacactgagtttttcagtcagctggatcagagggtgctcaatgctttcctgaaagcttgtgatgaactcaccgacatccttccagagcaggagcagcaggggctgcaggaagctgttcgaaagctccacaaacaatggaaggatcttcaaggagaagccccttatcatttgcttcatctgaagattgatgtggagaagaataggttcttagcctctgtagaagaatgcagaactgagctggatcgagagaccaagctgatgccccaggaaggcagtgaaaagataattaaagagcacagggttttcttcagtgacaaaggtcctcatcatctctgtgagaaaaggttacagctcatcgaggaactctgtgtgaaactcccagtgcgggacccagtaagggacacacctggaacctgtcacgtgactctcaaagagctcagagctgccattgacagcacctacaggaagctcatggaagacccagacaagtggaaggactacactagcagattctctgagttctcatcttggatatctacaaatgagacacaattaaaggggatcaagggtgaggccatcgatactgccaaccacggagaggttaaacgtgccgttgaagagatcagaaatggtgttaccaaaaggggtgagaccctcagctggctgaaatccaggctgaaagttttgacagaagtttcttctgagaatgaagcccaaaagcagggagatgagctggcaaaattatccagctctttcaaggctcttgtgacgctgctgtcagaggttgaaaagatgctaagcaattttggggactgtgtccagtacaaagaaatagtcaaaaattctctcgaagaattaatttctggctctaaagaagtccaggaacaagctgagaagatcttggatactgaaaatctgtttgaagcacagcagttacttcttcatcaccagcaaaagacaaagcggatctcagcaaagaagagagatgtgcagcagcagatcgcgcaggcgcagcagggagaaggggggctgcctgaccgaggccacgaggagctgcggaagctggagagcacactggatggcctggagcgcagccgggagaggcaggaacgccgcatccaggtcacattaagaaaatgggagcgatttgaaacaaacaaagaaacagtagtaagatacctttttcaaacaggttccagtcatgaacgcttcttgagttttagcagtttggaaagtttatcttcagaactggaacaaacaaaggagttttctaaacggacagaaagtattgcagtccaggctgagaaccttgtaaaggaagcttcagagataccgcttgggccccaaaataagcagctgcttcaacagcaggccaagtcaatcaaagaacaagtcaaaaaattagaagacacgcttgaagaagagtatgtgattgacaataaaaccatggaaatggtgaaaaccaagtgggatcattttggcagtaattttgagactctgtccgtctggataactgagaaagaaaaagaactcaatgccttggaaacttcgtcatctgccatggacatgcaaatcagccaaattaaggtcacaattcaggaaatagaaagtaagctcagcagcattgtaggattagaagaagaagcccagtcttttgctcagtttgttaccactggagaatctgctcgaattaaagccaagttgacacaaataagaagatacggggaagagcttcgagagcatgcacagtgtctggaaggaacaatcctgggacatttatctcagcagcaaaagtttgaagagaaccttagaaagatccagcaatctgtgtctgaatttgaagataaacttgctgttccaattaaaatatgttcttcagctacagaaacatacaaagttcttcaagaacatatggatctctgccaggccctggagtcactgagcagcgcgatcactgccttctcagccagtgccaggaaggttgtgaacagagattcctgtgttcaggaggctgcggctctacagcagcaatacgaggacatcctaaggagggcgaaggagagacagacggcgctggagaatctgctggcccactggcagaggctagagaaagaactatcatcctttttgacctggttagagcggggtgaagctaaagccagttccccagaaatggacatttctgcagacagagtcaaagtggaagcctccaaagatgatgtgaaaatgatgaaactacatttggagcagttggatgagagatggagagatttaccacagatcattaacaaaaggattaattttcttcagtctgtggttgctgaacaccagcaatttgatgagctgctgctttccttttctgtctggattaaactgtttctcagtgaattacaaactacctctgagattagcataatggaccatcaagtagcccttactcggcataaggaccacgcagcagaagtagagagcaaaaagggcgaattgcagagtctgcagggtcacttagcaaagttgggttctctgggccgtgctgaggacctccacctcctgcagggaaaggctgaggactgcttccagctgtttgaggaggccagccaggttgtggagaggcggcagcttgccctgtcccatttggcagaattcctccagagccatgcctctctgtccggcattctccgccagctgaggcaaacagtggaagcaaccaacagtatgaataagaacgagtctgatttgatagaaaaggacctcaatgatgctcttcaaaatgctaaagcattagaatctgctgccgtcagtctggatggcattctttccaaagcccaataccatctgaaaatcgggagctctgagcaaaggacttcctgcagagccacggctgatcagctctgtggagaggtagagaggatccagaaccttctgggaaccaagcagagtgaggcagatgctctggcagtgttgaaaaaagcattccaagaccagaaagaggagcttctgaaaagcattgaggacattgaagaaaggactgacaaagagcgattgaaagaacctacccgccaagctcttcagcagaggttaagagtgtttaatcagctagaagatgaattgaattctcacgagcatgaactatgttggttgaaagacaaagccaagcaaattgcccagaaagatgtagcttttgcacctgaagttgacagggagataaaccgcttagaggtcacctgggatgataccaaaagactaattcatgaaaatcagggtcagtgctgtggacttattgacttaatgagagaatatcagaacctgaaatcagctgtatctaaagtcttagaaaatgccagcagtgtgattgtaaccagaactaccataaaagatcaggaggatcttaaatgggctttttccaagcatgaaactgccaagaacaaaatgaattacaaacagaaagacttggataactttaccagcaaaggaaaacacttgttatctgagctgaagaaaattcacagtagtgatttcagcttggtgaaaacagacatggagagcaccgtggacaaatggctggatgtatcagagaaacttgaagaaaacatggataggctgagagtaagcctgtccatttgggatgatgtactgtcaactagagatgagattgagggatggtcaaacaactgcgttccacagatggcagaaaacatcagcaacctggataaccacctcagagctgaagaactgcttaaagaatttgagtctgaagttaaaaacaaagcattgagattggaagaactgcattccaaagttaatgatctgaaagaattaactaaaaatctagaaacaccgccagaccttcagtttatagaagcagacttaatgcagaaactggagcatgccaaagaaataactgaagtagcaaaaggaaccctgaaggatttcacggctcaaagtacacaagtggagaagtttattaatgacataacaacatggttcacaaaagtggaagaatcgttgatgaactgtgcccaaaatgagacttgtgaagcattgaaaaaagtcaaggatatacaaaaagaacttcaaagtcaacaaagcaacatcagctctacccaagaaaatctcaatagcttgtgccgcaagtaccactcagctgagttggagagcctgggccgtgcaatgactggtctgataaagaaacatgaagccgtgagccagttgtgctccaaaacccaggccagcctgcaggaatctctggaaaaacacttcagtgaagagtctatgcaggaattccaagaatggtttttgggagcaaaggcagcagcaaaagaatcatcagatcgcaccggtgacagcaaagttctagaagcaaagctccatgatcttcagcagaacattttggactcagtcagtgatgggcagagcaaacttgatgcagtgactcaagaaggacaaactttgtatgcacatttgtctaaacaaattgtcagtagcattcaagaacaaatcacaaaggccaatgaagagtttcaagcatttctgaaacaatgccttaaagataagcaggctcttcaagactgtgcttcagaacttggaagctttgaagatcagcacagaaaactgaacttatggatccatgaaatggaagaaaggttcaatacggaaaacttgggagagagtaaacagcacattcctgagaagaaaaatgaagttcataaagttgaaatgtttttgggagaactgctggctgcaagagagtctcttgataagctttcccagagagggcagcttctgagtgaagaaggccacggtgctgggcaggagggccgcctgtgttcccagctcctcacaagccaccagaacctacttagaatgaccaaagagaaactccggagctgccaggtggcccttcaggagcacgaagccctggaggaagcactgcaaagcatgtggttctgggtgaaggccattcaggacagactggcctgtgcagagagcactcttgggagcaaagacaccctggagaaacggctgtcacaaatacaggatattctcctgatgaaaggtgaaggggaagttaagttgaatatggccattggcaagggggaacaggccttgagaagtagcaacaaagaaggtcagagggtgattcagactcagttagagacccttaaagaagtgtgggctgacatcatgagctcctccgtccacgctcaaagcactttagagtctgtgattagccaatggaatgactatgtagagaggaaaaaccagttggagcagtggatggaatcagtggatcaaaaaatagaacatcccttacaaccacagccaggtctgaaagagaagttcgtcctgcttgaccacctccagtccatcctgtctgaggcagaagatcacacgagagcccttcaccgtctaattgcgaagtccagggagctctacgaaaagacagaggatgagtctttcaaggacacagctcaagaggagctgaaaacacagtttaatgatataatgactgttgccaaggaaaaaatgaggaaagtggaagagattgtgaaagatcatctaatgtatttagatgcggtccacgagttcacagattggctccattcagcaaaggaagaacttcaccggtggtcagatatgtctggagattcatcagccacccagaaaaagttatcaaaaattaaggagctgatagattccagagagattggtgcaagccgtctcagcagagtggagtcgctggctcccgaagtgaaacagaacacaactgccagtgggtgtgagctcatgcacacggagatgcaggccctgcgtgccgactggaagcagtgggaagacagtgtattccaaacgcagagctgtttggagaacctggtcagccagatggccctttcggagcaggaattctcaggccaagtggctcaactggagcaggccctggaacagttcagtgcccttctgaaaacctgggctcagcagttaaccctcctggaaggcaagaacacggatgaggagatagtggaatgctggcacaaaggacaagagatactggatgctttgcaaaaagcagagcctagaacagaggatctcaagtctcagctgaatgaactttgtcgattttccagagacctgagtacctacagtggaaaagtttctggcttgattaaagagtataattgtctttgtttgcaagcatccaagggctgccagaataaagaacagattttacagcaaagatttcgaaaggccttcagggatttccagcagtggttggttaatgcaaaaatcactaccgccaagtgttttgatatacctcaaaatataagtgaagtttcaactagtcttcagaaaatacaggagtttttgtcagaaagtgaaaatggacagcacaagctaaacatgatgctgtctaaaggggaacttctgagtaccctgctgaccaaagagaaagcgaaagggatccaggccaaagttacagctgcaaaagaagattggaaaaattttcattcaaatctccaccaaaaagaatctgctctagagaatctaaagatccaaatgaaggactttgaagtaagtgctgagcctatccaggactggctgagtaaaactgagaagatggtccatgaaagcagcaatcgcctctatgatctgccagcaaagaggagggagcagcagaagctccagtctgtccttgaggaaatacactgctacgagcctcagctcaacaggctgaaagagaaagctcagcagctgtgggaaggacaagctgccagcaagagctttaggcacagagtgtcgcagctgtcttctcagtatctagcgctaagcaatttaacaaaggagaaagtgtcaagactggatagaatcgttgcagaacacaatcagttctctcttgggattaaagaattacaagactggatgacggatgcgattcacatgctggattcatactgccacccgacatccgacaaaagtgtgctggacagcaggacgctcaagctcgaggctctattatcagtcaaacaggaaaaagagattcagatgaaaatgatagtgaccaggggagaatctgtccttcagaatacttctccagaaggcattcccactattcagcagcagctgcagagtgtgaaggatatgtgggcatcccttttgtctgcagggattcgttgtaaaagggtgaggctcccctgtgcctatattgccctcaaactgagagtacatcagcatgcggagctgcgggataaaacaacgatgctcggaaaagccaaggaagccgtaaccaagtctgaaaaacttgtccgcctgcaccaagagtatcagagagacctaaaggcatttgaagtttggttggggcaagaacaagaaaagctcgaccagtattcagttcttgaaggtgatgcccacactcatgagacaacattgcgtgatcttcaggagctacaggtacactgtgcagaggggcaggccctgttgaactcagtgctgcacaccagagaggatgtgatcccatcaggtatcccacaggcagaggaccgggctttagagtctctccggcaagactggcaggcttaccagcacaggctgtccgagactcgaactcagttcaataacgtggtgaacaaattgaggctaatggagcaaaagtttcagcaagtagatgaatggctcaaaacagcagaggagaaagttagtcccaggaccagacgtcagtctaacagggcaaccaaggagatacaattacatcagatgaagaagtggcacgaagaagtgactgcatacagagatgaagttgaggaagtgggagctagagctcaggagatactggacgagagccacgtgaacagcagaatgggttgccaggccacccagctgacttccagataccaggccctgcttctccaagtgctggaacaaataaaattcctggaggaggagattcagagtttggaggaatcagaatcatccctcagttcctattctgattggtatggctctactcataaaaacttcaagaatgtggctaccaagattgacaaagtagatacagtaatgatggggaagaaattgaagacgttggaggttttgctcaaagacatggagaaaggtcacagtttgctgaaatcagcccgggagaaaggagagagggctgttaaatacttggaggaaggcgaggcagagaggttaagaaaggagattcatgatcacatggagcagttgaaggaactgaccagcactgtccggaaagaacacatgacgctggaaaaatcacttcaacaaacggtgctgtcccatgaaccatcagtaaagtcagtgagagagaagggtgaagctcttttggaactggtgcaggacgtcactttaaaggacaaaatagatcaacttcaaagtgattaccaggacctgtgcagcataggaaaggagcatgtcttcagtctggaggcgaaagtcaaagaccatgaagactacaacagtgagctccaagaggtcgaaaagtggctgctgcagatgtctggcagactggtggcacctgacctcctggagacaagcagcctggagacaatcacccagcaattggcccaccacaagatgtaccagagtttggaacacgaacttcagaagcacgtcagccgacaagacaccctgcagcagtgccaggcctggctttctgcagtccagccggatttagagccaagtcctcaaccacctcttagtagggcagaagccattaagcaggtcaaacacttcagagctttgcaagagcaggcaaggacctacctagatctcctttgctccatgtgtgacctgtcaaatgcttcggtgaaaaccacagcaaaagacattcaacaaacagagcaaacgattgaacaaaagcttgtccaggcccagaacttaactcagggctgggaagagatcaagcacctgaagtctgagctctggatttacctgcaagatgctgatcagcaactgcagaacatgaagaggaggcactctgagctggagctgaacattgcacagaacatggtttcacaagttaaggattttgttaagaaactacagagcaaacaggcatccgtgaacaccataatagaaaaggtgaataagttaacaaagaaggaggaatcgcctgaacacaaggaaataaatcatttaaatgatcagtggctcgatttgtgccgtcagtctaacaacctgtgcttgcaaagggaagaggatcttcagagaacaagagattaccatgactgtatgaatgttgttgaagtgttcctagaaaaatttactacagaatgggataacttggccagatctgatgcagagagtacagctgtccacctggaagctttgaaaaagttagcattggcattgcaggagagaaagtatgctattgaagatctgaaagatcaaaagcagaaaatgatagagcatctgaatttagatgacaaggagttagtcaaagaacagacgagtcatttagagcaacgttggtttcagcttgaggacctcattaaaaggaaaatccaagtgtcagtcaccaacttggaggagttaaatgtggtgcagtccagatttcaggagctaatggagtgggcagaagagcaacaacccaacatcgccgaggcccttaagcagagccctcctccagatatggctcagaaccttctcatggatcacctggccatctgcagtgaactggaggccaagcagatgctcctgaaatcgcttataaaggacgcagacagggtcatggcagatcttggtctcaatgagcgacaggtcatccagaaggctctctctgatgcacaaagccacgtgaattgtctcagtgacttagtgggccagcgaagaaagaagcattttaaggaagattttgataaagcttgccactggctaaaacaagcagatattgttacatttcctgaaatcaacctaatgaatgagagttctgagcttcatacacaactggctaaataccaaaacattcttgaacaatctccagaatatgaaaatcttctacttacgctgcagagaactgggcagaccatattaccatcgctgaatgaagtcgatcattcctacctcagtgaaaagctaaatgctttgcctcgacaatttaatgtaattgttgccttggctaaagacaagttctataaagtccaggaagcaattcttgctcggaaggaatatgcttccttgattgagttgacaacccagtctctgagtgaacttgaagcccaattcttgaggatgagcaaagttcccaccgacctggccgttgaggaggctctttctctgcaagatggttgcagagccattctggacgaggtggcgggccttggggaggcggtggatgaactgaaccagaaaaaagaaggttttcgcagcacaggtcagccttggcagccagacaagatgctgcaccttgtcaccttatatcacaggctgaagcgacaaacagaacagagggttagcttattagaagacaccaccagtgcttaccaagaacacgagaagatgtgccaacagctggagagacaactgaagtctgtaaaagaggagcagtccaaagtgaatgaggaaacgctgcctgcagaggagaagctcaaaatgtatcactccctggcaggaagtctccaggactcagggattgtactgaaacgagtaaccatacatcttgaagatcttgccccacaccttgaccccttggcttatgagaaagccaggcatcagatccagtcctggcaaggggagttaaaactgttgacttctgccattggtgagacggtgacagaatgtgagagccgaatggtgcagagtatagacttccagactgagatgagtcgctccctggactggctgaggagagtgaaggcagagctcagtgggccggtgtacctagacctcaacctgcaggacatccaagaggaaatcagaaaaatccaaattcatcaggaagaggtccagtccagcttgagaatcatgaatgcgctgagtcacaaggaaaaggagaagttcacaaaggccaaggagctgatttctgcggatttagaacacagcctcgctgagctctcagagctggatggagacatccaggaagccttacgcaccagacaggctaccttgactgaaatatatagccagtgtcaaaggtattatcaggtatttcaagcagccaatgactggcttgaggatgcccaagaattgttacagctggcaggcaatggcctagacgtggagagcgcagaggaaaatctcaaaagccacatggaatttttcagtacagaggatcagttccatagtaacctggaggagctccacagcctggtagccaccctggacccactcatcaagccaaccggcaaagaagacctagaacagaaagtggcttctctggaactcaggagccagaggatgagccgggactctggtgcccaagctttagtgtcagtggttaactctttccatgagaaaattgtggcccttgaggaaaaagcttcacaactggagaaaaccggaaatgatgccagcaaagccaccctgagcaggtcaatgaccaccgtctggcagcgctggacacgccttcgagctgtggcccaggaccaggagaagatcctggaagatgcagtggatgagtggacgggctttaacaacaaggttaaaaaggccactgaaatgattgatcagctgcaagataagttacctggaagttcagcagagaaagcatcgaaagcagagctcttaactcttcttgaataccacgacacgttcgttctggagctggagcagcagcagtcggccttgggcatgctgcggcagcaaaccctgagcatgctccaggatggagccgccccaacccctggggaagagcctccgctcatgcaggaaatcaccgccatgcaagatcggtgcctgaaaatggtggagactcagatcaattctgtgaaatgttgggttcaggaaacgaaagaatatttagggaatccaacaatagaaatagatgctcaacttgaagaacttcagattctcctaacagaagccacaaatcaccgacagaacattgaaaaaatggcagaagaacagaaggagaagtacttaggtctttataccatattaccttctgaactctcccttcagttggctgaagtggcgttagatctaaagatccgagatcagatccaagacaaaataaaagaagttgagcagagcaaggccacgagccaggaactcagccggcaaattcagaagttagctaaagacctcacaactattctaactaagctgaaagcgaagacagataatgtagttcaagctaaaactgaccaaaaggcagcatcacatttagaagaatacaatgaaatgcttgaattaattttgaagtggattgaaaaagctaaagtcttggctcatggaactattgcatggaattctgcaagccagcttcgggaacaatatattttgcatcagaccctgctagaagaatccaaagaaattgacagtgagctggaagcaatgactgagaaattacagtacctcactagcgtgtactgtacagaaaaaatgtctcagcaagtggcagaactgggacgggagactgaggagttgcgacagatgatcaaaattcgtttgcagaacctccaagatgcagctaaggatatgaaaaaatttgaagcagagttgaaaaagttacaagctgccttggagcaagcccaggcaacactgacttctccagaagttggacgtctcagtctcaaggagcagctctctcatcggcagcatttgttgtctgagatggagtcactgaagccgaaggtgcaagcagtgcagctctgccagagtgccctccggatccccgaggatgtggttgccagcttacctctctgtcatgctgctctgcggctgcaggaagaggccagccggctgcagcacaccgccatccagcagtgtaacatcatgcaggaagctgtggtacaatatgaacaatatgagcaagaaatgaaacatctccagcaactgatagaaggagctcacagagagattgaggataaacctgttgccaccagtaacatacaggagctgcaggctcagatttctcggcatgaggagctggcgcagaaaattaagggctaccaggagcagatcgcttctttgaattccaagtgcaagatgctgacgatgaaagccaagcacgccaccatgctgctgacggtgaccgaggtcgaggggctggcggaagggacagaggacctggatggggagctcctccccacgccttcggcccacccctctgtggtcatgatgactgcaggtcgctgtcacactttgctgtcaccggtcactgaggagtctggggaggagggaaccaacagtgagatttcctctccacctgcctgtcgctccccttcacctgtggctaatacagatgcttctgttaaccaggacattgcatattaccaagccttgtctgctgagaggttgcagacagatgctgcaaaaattcaccccagcacatccgcatcccaggagttctatgaaccgggattggagccatccgctactgccaaactgggtgatttgcagcgttcttgggaaaccttaaagaatgtgatcagtgagaagcagcgcacactctatgaagctttggaacgccagcagaagtaccaggactccctccagtccatctctacgaagatggaggccattgagctgaaactcagtgagagcccagagcctggcaggagtccagaaagccagatggctgaacatcaggcattgatggatgagattctcatgctccaggatgaaatcaatgagctccagtcctctctcgcagaggagctggtatccgagtcttgtgaggccgaccctgcggagcagctggccttgcagtccacgctcactgtcttagccgagcgaatgtccaccatcaggatgaaagcctcggggaaacggcagcttttggaggagaagttgaatgatcagctggaggaacaaaggcaggaacaggccctgcagaggtatcgctgtgaagccgatgagctggacagctggctcttgagtaccaaggccactctggacactgcgctgagtccacccaaggagcccatggacatggaggcccagcttatggactgccagaatatgctggtggaaatagagcagaaggtggtggctttatcagaactgtcagtccacaatgagaacctgctgctggagggcaaagctcacaccaaggacgaggccgagcagctggctggaaagctgagaaggctcaaggggagcctgctggagctgcagagagccctgcatgataagcagctcaacatgcagggaacagcacaggagaaggaggagagcgatgttgacctaacagccacgcagagccccggcgtccaggaatggctggcccaagctcgcaccacatggacccagcagcggcagagcagtctccagcaacaaaaagagttagaacaggaattagccgagcagaagagtctccttcgctcagtagccagtcgtggagaggagattctaattcaacattcggcggcagagacctctggtgatgctggcgaaaaacctgatgtgttatcccaggagttggggatggaaggggagaaatcatccgctgaagaccagatgagaatgaaatgggaaagcctacatcaagaatttagtaccaagcagaaactactacagaatgttctggaacaggaacaagagcaagtgctttatagcaggccaaatcgactcttgtctggtgtgccactgtacaaaggggacgtgccaacccaagataaatctgcagttacatctttgctggatggactgaaccaagccttcgaggaggtttcatcccagagtggaggggcaaagaggcagagtatacacttggagcagaagttgtatgatggagtctcagccacctctacttggttggatgacgttgaagaacgtttatttgttgccacagcacttttaccagaagaaacagagacttgtctcttcaaccaagagattcttgccaaagacattaaggaaatgtctgaagaaatggataagaacaaaaacttgttttcccaagcttttccagagaatggtgataatcgagatgttattgaagatactttgggttgtcttttgggcaggttatccttgctagactcagtagtgaatcaacgatgtcatcagatgaaagaaagacttcagcaaatactaaatttccagaatgatctgaaagtgctgtttacatcactggctgacaacaaatacatcattctgcaaaaactggcaaatgtgtttgaacagcccgtagcagaacaaatagaggcaatacaacaggctgaagatggactcaaagaatttgatgcaggaatcattgaattaaagaggcgtggtgacaagctacaggtcgagcagccgtccatgcaagaactctccaagctccaggacatgtatgatgagctgatgatgatcattggctcccggaggagtggtctgaatcagaaccttacactcaagagtcagtatgagagggccctacaagatctggctgacctgctagaaactggtcaggagaagatggcaggagaccagaaaatcatcgtgtcttccaaagaggaaatccagcaactacttgacaaacataaggaatactttcagggcctggaatctcatatgatcttgactgaaacactcttcagaaagataatcagctttgcagtccaaaaggaaacccagttccatacagagctgatggctcaggcttctgctgtactgaaacgggctcacaagaggggtgtggagctggagtacattctagagacgtggtcccatctggatgaggaccagcaggagctcagcagacagctggaggtggtggaaagcagcatcccaagcgtgggtctggtggaggagaacgaggacaggcttattgaccgcataacactctaccagcatttaaaatctagccttaatgaataccagcccaaattatatcaagtattagatgatgggaaacgacttctgatatccatcagctgctcagatctagaaagccaactaaatcaacttggagagtgctggctaagtaacaccaataaaatgtctaaggaacttcacagactggaaacaatattgaaacactggaccagatatcaaagtgaatctgcagatctaattcactggttacaatctgcaaaagaccggctagaattttggactcagcaatctgtgacagtcccacaagagctggaaatggtccgtgatcatctaaatgctttcctggagttttctaaagaagtggatgcccaatcttccctgaaatcatctgttctgagtactggaaatcagctccttcgactaaaaaaggtggacacagccacgctgcgctctgagctgtcgcgcattgatagccagtggactgacctgctaaccaatatcccagccgtccaggagaagctccaccagctccagatggataaactgccttcccgccatgccatttctgaagtcatgagttggatttctctaatggaaaatgttattcagaaggatgaagataatattaaaaattccataggttacaaggcaattcatgaataccttcagaaatataagggttttaagatagacattaactgtaaacagctgacagtggattttgtgaaccagtccgtgctacaaatcagcagtcaggatgtggaaagtaagcgtagtgataagactgattttgctgagcaacttggagcaatgaataaaagttggcaaattctgcaaggtctagtaactgagaagatccagctgttggaaggcttattggaatcttggtcagaatatgaaaataatgtacaatgtctgaaaacatggtttgaaacccaggaaaagagactaaaacaacagcatcgaattggagatcaggcttctgttcaaaatgcactgaaagactgtcaggatctggaagatttgattaaagcaaaagaaaaagaagtagagaaaattgagcagaatggacttgctttgattcagaacaagaaagaagacgtctctagcattgtcatgagcacactgcgagagctcggccaaacctgggcaaatttagatcacatggttggacaattaaagatactgctgaaatcagtgcttgaccaatggagtagtcacaaagtggcctttgacaagataaacagttacctcatggaggccagatactctctttcccgattccgtctgctgactggctccttagaagctgtgcaagttcaggtggacaatcttcagaatctccaagatgatctggaaaaacaggaaaggagcttacagaaatttggctctatcaccaaccaattattaaaagagtgtcacccacccgtgacagaaactcttaccaatacactgaaagaagtcaacatgagatggaataacttgctggaagagattgctgagcagctacagtccagcaaggccctacttcagctttggcaaagatacaaggactactccaaacagtgtgcttcgacagttcagcagcaggaggatcgaaccaatgagctgttgaaggcagccacaaacaaggacattgccgatgatgaggttgccacatggattcaagattgcaacgacctcctcaaaggactgggcacagttaaagattccctcttttttctccatgagctgggagagcaactgaagcaacaagtggatgcttccgcagcatcagctattcaatcggatcaactctctttgagtcaacacttgtgtgccctggagcaagctctctgcaaacagcagacttcattacaggctggagttcttgattatgaaacctttgccaagagtttagaagctttggaggcctggatagtggaagctgaagaaatactacaagggcaggaccctagccactcatctgacctctccacaatccaggaaaggatggaagaacttaagggacagatgttaaaattcagcagcatggctccagatttagaccgtctaaatgagcttggatataggttacccttgaatgataaggaaatcaaaagaatgcagaatctgaaccgccattggtctctgatctcctctcagactacagaaagattcagcaagttgcagtcatttttgctacaacatcagactttcttggaaaaatgtgaaacatggatggaattcctagttcagacagaacaaaagttagcagtagagatttcaggaaattatcagcaccttttggaacagcagagagcacacgagttgtttcaagccgagatgttcagtcgtcagcagattttgcactcaatcattattgatgggcaacgtcttctagaacaaggtcaagttgatgacagggatgaattcaacctgaaattgacactcctcagtaatcaatggcagggagtgattcgcagggcccagcagaggcgggggatcattgacagccagattcgccagtggcagcgctatagggagatggcagaaaagcttcgtaaatggttggttgaagtgtcctacctccccatgagtggtctcggaagtgttcctataccactgcaacaagcaaggaccctctttgatgaagtgcagttcaaagaaaaagtgtttctgcggcaacaaggcagctacatcctgactgtggaggctggcaagcaactccttctctcggcggacagtggcgctgaggccgccttgcaggccgaactcgctgaaatccaagagaaatggaaatcagccagcatgcggctggaagaacagaagaaaaaactagccttcttgttgaaagactgggaaaaatgtgagaaaggaatagcagattccctggagaaactacgaactttcaaaaagaagctttcgcagtctctcccggatcaccatgaagagctccatgcagaacaaatgcgttgcaaggaattagaaaatgcagttgggagctggacagatgacttgacccagttgagcctgctgaaggacaccctctctgcctatatcagtgctgatgatatctccattcttaatgaacgcgtagagcttctgcaaaggcagtgggaagaactatgccaccagctctccttaaggcggcagcaaataggtgaaagattgaatgaatgggcagtcttcagtgaaaagaacaaggaactctgtgagtggttgactcaaatggaaagcaaagtttctcagaatggagacattctcattgaagaaatgatagagaagctcaagaaggattatcaagaggaaattgctattgctcaagagaacaaaatacagctccaacaaatgggagaacgacttgctaaagccagccatgaaagcaaagcatctgagattgaatacaagctgggaaaggtcaacgaccggtggcagcatctcctggacctcattgcagccagggtgaagaagctgaaggagaccctggtagccgtgcagcagcttgataagaacatgagcagcctgaggacctggctcgctcacatcgagtcagagctggccaagccaatagtctacgattcctgtaactcggaagaaatacagagaaagcttaatgagcagcaggagcttcagagagacatagagaagcacagtacaggtgttgcatctgtcctcaacctgtgtgaagtcctgctgcacgactgtgacgcctgtgccactgatgccgagtgtgactctatacagcaggctacgagaaacctggaccggcggtggagaaacatttgtgctatgtccatggaaaggaggctgaaaatcgaagagacgtggcgattgtggcagaaatttctggatgactattcacgttttgaagattggctgaagtcttcagaaaggacagctgcttttcccagctcttctggggtgatctatacagttgccaaggaagaactaaagaaatttgaggctttccagcgacaggtccacgagtgcctgacgcagctggaactgatcaacaagcagtaccgccgcctggccagggagaaccgcactgattcagcatgtagcctcaaacagatggttcacgaaggcaaccagagatgggacaacctgcaaaagcgtgtcacctccatcttgcgcagactcaagcattttattggccagcgtgaggagtttgagactgcgcgggacagcattctggtctggctcacagagatggatctgcagctcactaatattgaacatttttctgagtgtgatgttcaagctaaaataaagcaactcaaggccttccagcaggaaatttcactgaaccacaataagattgagcagataattgcccaaggagaacagctgatagaaaagagtgagcccttggatgcagcgatcatcgaggaggaactagatgagctccgacggtactgccaggaggtcttcgggcgtgtggaaagataccataagaaactgatccgcctgcctctcccagacgatgagcacgacctctcagacagggagctggagctggaagactctgcagctctgtcggacctgcactggcacgaccgctctgcagacagcctgctttctccacagccttcctccaatctctccctctcgctcgctcagcccctccggagcgagcggtcaggacgagacaccccggctagtgtggactccatccccctggagtgggatcacgactatgacctcagtcgggacctggagtctgcaatgtccagagctctgccctctgaggatgaagaaggtcaggatgacaaagatttctacctccggggagctgttggcttatcaggggaccacagtgccctagagtcacagatccgacaactgggcaaagccctggatgatagccgttttcagatacagcaaaccgaaaatatcattcgcagcaaaactcccacggggccggagctagacaccagctacaaaggctacatgaaactgctgggcgaatgcagtagcagtatagactccgtgaagagactggagcacaaactgaaggaggaagaggagagccttcctggctttgttaacctgcatagtaccgaaacccaaacggctggtgtgattgaccgatgggagcttctccaggcccaggcattgagcaaggagttgaggatgaagcagaacctccagaagtggcagcagtttaactcagacttgaacagcatctgggcctggctgggggacacggaggaggagttggaacagctccagcgtctggaactcagcactgacatccagaccatcgagctccagatcaaaaagctcaaggagctccagaaagctgtggaccaccgcaaagccatcatcctctccatcaatctctgcagccctgagttcacccaggctgacagcaaggagagccgggacctgcaggatcgcttgtcgcagatgaatgggcgctgggaccgagtgtgctctctgctggaggagtggcggggcctgctgcaggatgccctgatgcagtgccagggtttccatgaaatgagccatggtttgcttcttatgctggagaacattgacagaaggaaaaatgaaattgtccctattgattctaaccttgatgcagagatacttcaggaccatcacaaacagcttatgcaaataaagcatgagctgttggaatcccaactcagagtagcctctttgcaagacatgtcttgccaactactggtgaatgctgaaggaacagactgtttagaagccaaagaaaaagtccatgttattggaaatcggctcaaacttctcttgaaggaggtcagtcgtcatatcaaggaactggagaagttattagacgtgtcaagtagtcagcaggatttgtcttcctggtcttctgctgatgaactggacacctcagggtctgtgagtcccacatcaggaaggagcaccccaaacagacagaaaacgccacgaggcaagtgtagtctctcacagcctggaccctctgtcagcagtccacatagcaggtccacaaaaggtggctccgattcctccctttctgagccagggccaggtcggtccggccgcggcttcctgttcagagtcctccgagcagctcttccccttcagcttctcctgctcctcctcatcgggcttgcctgccttgtaccaatgtcagaggaagactacagctgtgccctctccaacaactttgcccggtcattccaccccatgctcagatacacgaatggccctcctccactctgaactaagcagatgccatctgcagaagtgctggtagcataaggaggatcgggtcataagcaatcccaaactaccaacaagaggaccttgatcttggcgaaagccctcggtgtggcagctttagccctcctccagatcacatgtgtgcaaattatggcttcagaggtggaagataaacagtgacgggggaacaaacagacaacaagaaggtttggaagaaatctggtttgagactctgaaccttagcactaaggagattgagtaaggacctccaaagttccccggactcatgaattctgggcccttggcccattctgtgcacagccaaggacttcagtagaccatctgggcagctttcccatggtgctgctccaaccatcagataaatgaccctcccaagcaccatgtcagtgtcgtacaatctaccaaccaaccagtgctgaagagattttagaaccttgtaacatacaatttttaagagcttatatggcagcttcctttttaccttgttttcctttggggcatgatgttttaacctttgctttagaagcacaagctgtaaatctaaaaggcacttttttttagaggtataaagaaaaactagatgtaataaataagatcatggaaggctttatgtgaaaaaagttgaatgttatagtaaaaaaaaaaagatatttatgtatgtacagtttgctaaagccaagttttgtttgtattgatttctttgcatttattatagatattataaaata

SEQ ID NO: 29624 - DNA, 10835 bp, Homo sapiens
  source 1..10835: mol_type = unassigned DNA
caaaaatcagtctgatctcgggaaacctggagaaatttattttctgtactctaatgttctttcattttggtgaccatcaaggtgctgggagaggaattagatggctgtaattcaaagttaatggaattagatgcagcagtacagaaattcttggaacagaatggccaactgggtaagccactggccaagaagataggaaaactgactgaacttcaccagcagaccattagacaagctgagaatcggctctccaagctcaatcaggcagcatcacatttagaagaatacaatgaaatgcttgaattaattttgaagtggattgaaaaagctaaagtcttggctcatggaactattgcatggaattctgcaagccagcttcgggaacaatatattttgcatcagaccctgctagaagaatccaaagaaattgacagtgagctggaagcaatgactgagaaattacagtacctcactagcgtgtactgtacagaaaaaatgtctcagcaagtggcagaactgggacgggagactgaggagttgcgacagatgatcaaaattcgtttgcagaacctccaagatgcagctaaggatatgaaaaaatttgaagcagagttgaaaaagttacaagctgccttggagcaagcccaggcaacactgacttctccagaagttggacgtctcagtctcaaggagcagctctctcatcggcagcatttgttgtctgagatggagtcactgaagccgaaggtgcaagcagtgcagctctgccagagtgccctccggatccccgaggatgtggttgccagcttacctctctgtcatgctgctctgcggctgcaggaagaggccagccggctgcagcacaccgccatccagcagtgtaacatcatgcaggcagctgtggtacaatatgaacaatatgagcaagaaatgaaacatctccagcaactgatagaaggagctcacagagagattgaggataaacctgttgccaccagtaacatacaggagctgcaggctcagatttctcggcatgaggagctggcgcagaaaattaagggctaccaggagcagatcgcttctttgaattccaagtgcaagatgctgacgatgaaagccaagcacgccaccatgctgctgacggtgaccgaggtcgaggggctggcggaagggacagaggacctggatggggagctcctccccacgccttcggcccacccctctgtggtcatgatgactgcaggtcgctgtcacactttgctgtcaccggtcactgaggagtctggggaggagggaaccaacagtgagatttcctctccacctgcctgtcgctccccttcacctgtggctaatacagatgcttctgttaaccaggacattgcatattaccaagccttgtctgctgagaggttgcagacagatgctgcaaaaattcaccccagcacatccgcatcccaggagttctatgaaccgggattggagccatccgctactgccaaactgggtgatttgcagcgttcttgggaaaccttaaagaatgtgatcagtgagaagcagcgcacactctatgaagctttggaacgccagcagaagtaccaggactccctccagtccatctctacgaagatggaggccattgagctgaaactcagtgagagcccagagcctggcaggagtccagaaagccagatggctgaacatcaggcattgatggatgagattctcatgctccaggatgaaatcaatgagctccagtcctctctcgcagaggagctggtatccgagtcttgtgaggccgaccctgcggagcagctggccttgcagtccacgctcactgtcttagccgagcgaatgtccaccatcaggatgaaagcctcggggaaacggcagcttttggaggagaagttgaatgatcagctggaggaacaaaggcaggaacaggccctgcagaggtatcgctgtgaagccgatgagctggacagctggctcttgagtaccaaggccactctggacactgcgctgagtccacccaaggagcccatggacatggaggcccagcttatggactgccagaatatgctggtggaaatagagcagaaggtggtggctttatcagaactgtcagtccacaatgagaacctgctgctggagggcaaagctcacaccaaggacgaggccgagcagctggctggaaagctgagaaggctcaaggggagcctgctggagctgcagagagccctgcatgataagcagctcaacatgcagggaacagcacaggagaaggaggagagcgatgttgacctaacagccacgcagagccccggcgtccaggaatggctggcccaagctcgcaccacatggacccagcagcggcagagcagtctccagcaacaaaaagagttagaacaggaattagccgagcagaagagtctccttcgctcagtagccagtcgtggagaggagattctaattcaacattcggcggcagagacctctggtgatgctggcgaaaaacctgatgtgttatcccaggagttggggatggaaggggagaaatcatccgctgaagaccagatgagaatgaaatgggaaagcctacatcaagaatttagtaccaagcagaaactactacagaatgttctggaacaggaacaagagcaagtgctttatagcaggccaaatcgactcttgtctggtgtgccactgtacaaaggggacgtgccaacccaagataaatctgcagttacatctttgctggatggactgaaccaagccttcgaggaggtttcatcccagagtggaggggcaaagaggcagagtatacacttggagcagaagttgtatgatggagtctcagccacctctacttggttggatgacgttgaagaacgtttatttgttgccacagcacttttaccagaagaaacagagacttgtctcttcaaccaagagattcttgccaaagacattaaggaaatgtctgaagaaatggataagaacaaaaacttgttttcccaagcttttccagagaatggtgataatcgagatgttattgaagatactttgggttgtcttttgggcaggttatccttgctagactcagtagtgaatcaacgatgtcatcagatgaaagaaagacttcagcaaatactaaatttccagaatgatctgaaagtgctgtttacatcactggctgacaacaaatacatcattctgcaaaaactggcaaatgtgtttgaacagcccgtagcagaacaaatagaggcaatacaacaggctgaagatggactcaaagaatttgatgcaggaatcattgaattaaagaggcgtggtgacaagctacaggtcgagcagccgtccatgcaagaactctccaagctccaggacatgtatgatgagctgatgatgatcattggctcccggaggagtggtctgaatcagaaccttacactcaagagtcagtatgagagggccctacaagatctggctgacctgctagaaactggtcaggagaagatggcaggagaccagaaaatcatcgtgtcttccaaagaggaaatccagcaactacttgacaaacataaggaatactttcagggcctggaatctcatatgatcttgactgaaacactcttcagaaagataatcagctttgcagtccaaaaggaaacccagttccatacagagctgatggctcaggcttctgctgtactgaaacgggctcacaagaggggtgtggagctggagtacattctagagacgtggtcccatctggatgaggaccagcaggagctcagcagacagctggaggtggtggaaagcagcatcccaagcgtgggtctggtggaggagaacgaggacaggcttattgaccgcataacactctaccagcatttaaaatctagccttaatgaataccagcccaaattatatcaagtattagatgatgggaaacgacttctgatatccatcagctgctcagatctagaaagccaactaaatcaacttggagagtgctggctaagtaacaccaataaaatgtctaaggaacttcacagactggaaacaatattgaaacactggaccagatatcaaagtgaatctgcagatctaattcactggttacaatctgcaaaagaccggctagaattttggactcagcaatctgtgacagtcccacaagagctggaaatggtccgtgatcatctaaatgctttcctggagttttctaaagaagtggatgcccaatcttccctgaaatcatctgttctgagtactggaaatcagctccttcgactaaaaaaggtggacacagccacgctgcgctctgagctgtcgcgcattgatagccagtggactgacctgctaaccaatatcccagccgtccaggagaagctccaccagctccagatggataaactgccttcccgccatgccatttctgaagtcatgagttggatttctctaatggaaaatgttattcagaaggatgaagataatattaaaaattccataggttacaaggcaattcatgaataccttcagaaatataagggttttaagatagacattaactgtaaacagctgacagtggattttgtgaaccagtccgtgctacaaatcagcagtcaggatgtggaaagtaagcgtagtgataagactgattttgctgagcaacttggagcaatgaataaaagttggcaaattctgcaaggtctagtaactgagaagatccagctgttggaaggcttattggaatcttggtcagaatatgaaaataatgtacaatgtctgaaaacatggtttgaaacccaggaaaagagactaaaacaacagcatcgaattggagatcaggcttctgttcaaaatgcactgaaagactgtcaggatctggaagatttgattaaagcaaaagaaaaagaagtagagaaaattgagcagaatggacttgctttgattcagaacaagaaagaagacgtctctagcattgtcatgagcacactgcgagagctcggccaaacctgggcaaatttagatcacatggttggacaattaaagatactgctgaaatcagtgcttgaccaatggagtagtcacaaagtggcctttgacaagataaacagttacctcatggaggccagatactctctttcccgattccgtctgctgactggctccttagaagctgtgcaagttcaggtggacaatcttcagaatctccaagatgatctggaaaaacaggaaaggagcttacagaaatttggctctatcaccaaccaattattaaaagagtgtcacccacccgtgacagaaactcttaccaatacactgaaagaagtcaacatgagatggaataacttgctggaagagattgctgagcagctacagtccagcaaggccctacttcagctttggcaaagatacaaggactactccaaacagtgtgcttcgacagttcagcagcaggaggatcgaaccaatgagctgttgaaggcagccacaaacaaggacattgccgatgatgaggttgccacatggattcaagattgcaacgacctcctcaaaggactgggcacagttaaagattccctcttttttctccatgagctgggagagcaactgaagcaacaagtggatgcttccgcagcatcagctattcaatcggatcaactctctttgagtcaacacttgtgtgccctggagcaagctctctgcaaacagcagacttcattacaggctggagttcttgattatgaaacctttgccaagagtttagaagctttggaggcctggatagtggaagctgaagaaatactacaagggcaggaccctagccactcatctgacctctccacaatccaggaaaggatggaagaacttaagggacagatgttaaaattcagcagcatggctccagatttagaccgtctaaatgagcttggatataggttacccttgaatgataaggaaatcaaaagaatgcagaatctgaaccgccattggtctctgatctcctctcagactacagaaagattcagcaagttgcagtcatttttgctacaacatcagactttcttggaaaaatgtgaaacatggatggaattcctagttcagacagaacaaaagttagcagtagagatttcaggaaattatcagcaccttttggaacagcagagagcacacgagttgtttcaagccgagatgttcagtcgtcagcagattttgcactcaatcattattgatgggcaacgtcttctagaacaaggtcaagttgatgacagggatgaattcaacctgaaattgacactcctcagtaatcaatggcagggagtgattcgcagggcccagcagaggcgggggatcattgacagccagattcgccagtggcagcgctatagggagatggcagaaaagcttcgtaaatggttggttgaagtgtcctacctccccatgagtggtctcggaagtgttcctataccactgcaacaagcaaggaccctctttgatgaagtgcagttcaaagaaaaagtgtttctgcggcaacaaggcagctacatcctgactgtggaggctggcaagcaactccttctctcggcggacagtggcgctgaggccgccttgcaggccgaactcgctgaaatccaagagaaatggaaatcagccagcatgcggctggaagaacagaagaaaaaactagccttcttgttgaaagactgggaaaaatgtgagaaaggaatagcagattccctggagaaactacgaactttcaaaaagaagctttcgcagtctctcccggatcaccatgaagagctccatgcagaacaaatgcgttgcaaggaattagaaaatgcagttgggagctggacagatgacttgacccagttgagcctgctgaaggacaccctctctgcctatatcagtgctgatgatatctccattcttaatgaacgcgtagagcttctgcaaaggcagtgggaagaactatgccaccagctctccttaaggcggcagcaaataggtgaaagattgaatgaatgggcagtcttcagtgaaaagaacaaggaactctgtgagtggttgactcaaatggaaagcaaagtttctcagaatggagacattctcattgaagaaatgatagagaagctcaagaaggattatcaagaggaaattgctattgctcaagagaacaaaatacagctccaacaaatgggagaacgacttgctaaagccagccatgaaagcaaagcatctgagattgaatacaagctgggaaaggtcaacgaccggtggcagcatctcctggacctcattgcagccagggtgaagaagctgaaggagaccctggtagccgtgcagcagcttgataagaacatgagcagcctgaggacctggctcgctcacatcgagtcagagctggccaagccaatagtctacgattcctgtaactcggaagaaatacagagaaagcttaatgagcagcaggagcttcagagagacatagagaagcacagtacaggtgttgcatctgtcctcaacctgtgtgaagtcctgctgcacgactgtgacgcctgtgccactgatgccgagtgtgactctatacagcaggctacgagaaacctggaccggcggtggagaaacatttgtgctatgtccatggaaaggaggctgaaaatcgaagagacgtggcgattgtggcagaaatttctggatgactattcacgttttgaagattggctgaagtcttcagaaaggacagctgcttttcccagctcttctggggtgatctatacagttgccaaggaagaactaaagaaatttgaggctttccagcgacaggtccacgagtgcctgacgcagctggaactgatcaacaagcagtaccgccgcctggccagggagaaccgcactgattcagcatgtagcctcaaacagatggttcacgaaggcaaccagagatgggacaacctgcaaaagcgtgtcacctccatcttgcgcagactcaagcattttattggccagcgtgaggagtttgagactgcgcgggacagcattctggtctggctcacagagatggatctgcagctcactaatattgaacatttttctgagtgtgatgttcaagctaaaataaagcaactcaaggccttccagcaggaaatttcactgaaccacaataagattgagcagataattgcccaaggagaacagctgatagaaaagagtgagcccttggatgcagcgatcatcgaggaggaactagatgagctccgacggtactgccaggaggtcttcgggcgtgtggaaagataccataagaaactgatccgcctgcctctcccagacgatgagcacgacctctcagacagggagctggagctggaagactctgcagctctgtcggacctgcactggcacgaccgctctgcagacagcctgctttctccacagccttcctccaatctctccctctcgctcgctcagcccctccggagcgagcggtcaggacgagacaccccggctagtgtggactccatccccctggagtgggatcacgactatgacctcagtcgggacctggagtctgcaatgtccagagctctgccctctgaggatgaagaaggtcaggatgacaaagatttctacctccggggagctgttggcttatcaggggaccacagtgccctagagtcacagatccgacaactgggcaaagccctggatgatagccgttttcagatacagcaaaccgaaaatatcattcgcagcaaaactcccacggggccggagctagacaccagctacaaaggctacatgaaactgctgggcgaatgcagtagcagtatagactccgtgaagagactggagcacaaactgaaggaggaagaggagagccttcctggctttgttaacctgcatagtaccgaaacccaaacggctggtgtgattgaccgatgggagcttctccaggcccaggcattgagcaaggagttgaggatgaagcagaacctccagaagtggcagcagtttaactcagacttgaacagcatctgggcctggctgggggacacggaggaggagttggaacagctccagcgtctggaactcagcactgacatccagaccatcgagctccagatcaaaaagctcaaggagctccagaaagctgtggaccaccgcaaagccatcatcctctccatcaatctctgcagccctgagttcacccaggctgacagcaaggagagccgggacctgcaggatcgcttgtcgcagatgaatgggcgctgggaccgagtgtgctctctgctggaggagtggcggggcctgctgcaggatgccctgatgcagtgccagggtttccatgaaatgagccatggtttgcttcttatgctggagaacattgacagaaggaaaaatgaaattgtccctattgattctaaccttgatgcagagatacttcaggaccatcacaaacagcttatgcaaataaagcatgagctgttggaatcccaactcagagtagcctctttgcaagacatgtcttgccaactactggtgaatgctgaaggaacagactgtttagaagccaaagaaaaagtccatgttattggaaatcggctcaaacttctcttgaaggaggtcagtcgtcatatcaaggaactggagaagttattagacgtgtcaagtagtcagcaggatttgtcttcctggtcttctgctgatgaactggacacctcagggtctgtgagtcccacatcaggaaggagcaccccaaacagacagaaaacgccacgaggcaagtgtagtctctcacagcctggaccctctgtcagcagtccacatagcaggtccacaaaaggtggctccgattcctccctttctgagccagggccaggtcggtccggccgcggcttcctgttcagagtcctccgagcagctcttccccttcagcttctcctgctcctcctcatcgggcttgcctgccttgtaccaatgtcagaggaagactacagctgtgccctctccaacaactttgcccggtcattccaccccatgctcagatacacgaatggccctcctccactctgaactaagcagatgccatctgcagaagtgctggtagcataaggaggatcgggtcataagcaatcccaaactaccaacaagaggaccttgatcttggcgaaagccctcggtgtggcagctttagccctcctccagatcacatgtgtgcaaattatggcttcagaggtggaagataaacagtgacgggggaacaaacagacaacaagaaggtttggaagaaatctggtttgagactctgaaccttagcactaaggagattgagtaaggacctccaaagttccccggactcatgaattctgggcccttggcccattctgtgcacagccaaggacttcagtagaccatctgggcagctttcccatggtgctgctccaaccatcagataaatgaccctcccaagcaccatgtcagtgtcgtacaatctaccaaccaaccagtgctgaagagattttagaaccttgtaacatacaatttttaagagcttatatggcagcttcctttttaccttgttttcctttggggcatgatgttttaacctttgctttagaagcacaagctgtaaatctaaaaggcacttttttttagaggtataaagaaaaactagatgtaataaataagatcatggaaggctttatgtgaaaaaagttgaatgttatagtaaaaaaaaaaagatatttatgtatgtacagtttgctaaagccaagttttgtttgtattgatttctttgcatttattatagatattataaaata

SEQ ID NO: 29625 - DNA, 3683 bp, Homo sapiens
  source 1..3683: mol_type = unassigned DNA
atggtggtggcggaggacctgagtgccctgaggatggcagaggacagctgtgtggatgcagatctcccagattgtaactgcgatgtcacaaggcagagggtgaagaagctgaaggagaccctggtagccgtgcagcagcttgataagaacatgagcagcctgaggacctggctcgctcacatcgagtcagagctggccaagccaatagtctacgattcctgtaactcggaagaaatacagagaaagcttaatgagcagcaggagcttcagagagacatagagaagcacagtacaggtgttgcatctgtcctcaacctgtgtgaagtcctgctgcacgactgtgacgcctgtgccactgatgccgagtgtgactctatacagcaggctacgagaaacctggaccggcggtggagaaacatttgtgctatgtccatggaaaggaggctgaaaatcgaagagacgtggcgattgtggcagaaatttctggatgactattcacgttttgaagattggctgaagtcttcagaaaggacagctgcttttcccagctcttctggggtgatctatacagttgccaaggaagaactaaagaaatttgaggctttccagcgacaggtccacgagtgcctgacgcagctggaactgatcaacaagcagtaccgccgcctggccagggagaaccgcactgattcagcatgtagcctcaaacagatggttcacgaaggcaaccagagatgggacaacctgcaaaagcgtgtcacctccatcttgcgcagactcaagcattttattggccagcgtgaggagtttgagactgcgcgggacagcattctggtctggctcacagagatggatctgcagctcactaatattgaacatttttctgagtgtgatgttcaagctaaaataaagcaactcaaggccttccagcaggaaatttcactgaaccacaataagattgagcagataattgcccaaggagaacagctgatagaaaagagtgagcccttggatgcagcgatcatcgaggaggaactagatgagctccgacggtactgccaggaggtcttcgggcgtgtggaaagataccataagaaactgatccgcctgcctctcccagacgatgagcacgacctctcagacagggagctggagctggaagactctgcagctctgtcggacctgcactggcacgaccgctctgcagacagcctgctttctccacagccttcctccaatctctccctctcgctcgctcagcccctccggagcgagcggtcaggacgagacaccccggctagtgtggactccatccccctggagtgggatcacgactatgacctcagtcgggacctggagtctgcaatgtccagagctctgccctctgaggatgaagaaggtcaggatgacaaagatttctacctccggggagctgttggcttatcagatgtaatgatccccgaaagccctgaggcctatgtaaaactcacagaaaatgcaatcaaaaatacctccggggaccacagtgccctagagtcacagatccgacaactgggcaaagccctggatgatagccgttttcagatacagcaaaccgaaaatatcattcgcagcaaaactcccacggggccggagctagacaccagctacaaaggctacatgaaactgctgggcgaatgcagtagcagtatagactccgtgaagagactggagcacaaactgaaggaggaagaggagagccttcctggctttgttaacctgcatagtaccgaaacccaaacggctggtgtgattgaccgatgggagcttctccaggcccaggcattgagcaaggagttgaggatgaagcagaacctccagaagtggcagcagtttaactcagacttgaacagcatctgggcctggctgggggacacggaggaggagttggaacagctccagcgtctggaactcagcactgacatccagaccatcgagctccagatcaaaaagctcaaggagctccagaaagctgtggaccaccgcaaagccatcatcctctccatcaatctctgcagccctgagttcacccaggctgacagcaaggagagccgggacctgcaggatcgcttgtcgcagatgaatgggcgctgggaccgagtgtgctctctgctggaggagtggcggggcctgctgcaggatgccctgatgcagtgccagggtttccatgaaatgagccatggtttgcttcttatgctggagaacattgacagaaggaaaaatgaaattgtccctattgattctaaccttgatgcagagatacttcaggaccatcacaaacagcttatgcaaataaagcatgagctgttggaatcccaactcagagtagcctctttgcaagacatgtcttgccaactactggtgaatgctgaaggaacagactgtttagaagccaaagaaaaagtccatgttattggaaatcggctcaaacttctcttgaaggaggtcagtcgtcatatcaaggaactggagaagttattagacgtgtcaagtagtcagcaggatttgtcttcctggtcttctgctgatgaactggacacctcagggtctgtgagtcccacatcaggaaggagcaccccaaacagacagaaaacgccacgaggcaagtgtagtctctcacagcctggaccctctgtcagcagtccacatagcaggtccacaaaaggtggctccgattcctccctttctgagccagggccaggtcggtccggccgcggcttcctgttcagagtcctccgagcagctcttccccttcagcttctcctgctcctcctcatcgggcttgcctgccttgtaccaatgtcagaggaagactacagctgtgccctctccaacaactttgcccggtcattccaccccatgctcagatacacgaatggccctcctccactctgaactaagcagatgccatctgcagaagtgctggtagcataaggaggatcgggtcataagcaatcccaaactaccaacaagaggaccttgatcttggcgaaagccctcggtgtggcagctttagccctcctccagatcacatgtgtgcaaattatggcttcagaggtggaagataaacagtgacgggggaacaaacagacaacaagaaggtttggaagaaatctggtttgagactctgaaccttagcactaaggagattgagtaaggacctccaaagttccccggactcatgaattctgggcccttggcccattctgtgcacagccaaggacttcagtagaccatctgggcagctttcccatggtgctgctccaaccatcagataaatgaccctcccaagcaccatgtcagtgtcgtacaatctaccaaccaaccagtgctgaagagattttagaaccttgtaacatacaatttttaagagcttatatggcagcttcctttttaccttgttttcctttggggcatgatgttttaacctttgctttagaagcacaagctgtaaatctaaaaggcacttttttttagaggtataaagaaaaactagatgtaataaataagatcatggaaggctttatgtgaaaaaagttgaatgttatagtaaaaaaaaaaagatatttatgtatgtacagtttgctaaagccaagttttgtttgtattgatttctttgcatttattatagatattataaaata

SEQ ID NO: 29626 - DNA, 27748 bp, Homo sapiens
  source 1..27748: mol_type = unassigned DNA
cccgggcagtggaaaccgtgggcaaaagttagctggcaggacagcgcagctcctccaggcagcggaggcagcgcgtcccggctctcagggacatttccttcccacctcgacccccgggaggtggtcccggtataaaggctcgctgagcgggtgggtcacagcacagctttgcagctgcggagaaacgcccaaggccgtgcatctccaggagggcggctgggctcccgcagtcctgcagaccgcgcccgatcccggcgacagggcgggcggacagccgcgcatccccggggtcccgccgagcctgggcgcagagagccgggaggaagcgttcgctcgcttcgccttgctgctgggaaactgaacgaggccgagagagaaggttcttgagttcatgtaagaggacagtcttaaaacggaagaagaaaaagaagcagttcagtctttgggagagctgcctccttgttgagtgctgcaaaggcctggaattcatttatgacagaatagatctagaaaagtccaagcatgttttctagagtggtgtagccctgtgctgcctccagtgaagagtctcttggtgttggcttcgtgcttccggagggaccatggcaacctccagaggggcctcccggtgtcctcgggatatcgccaatgtgatgcagaggctgcaagatgagcaagagatagtacaaaaacgaactttcacaaaatggatcaactctcatctggccaagcggaaacctccaatggtggtggacgatctttttgaagacatgaaagatggtgttaaactgcttgcccttctggaggtcctgtctgggcagaaactgccttgtgaacaaggacgccggatgaagcgaatccatgctgtggctaacattggcacggcactcaagttcctcgaaggaagaaagattaaattagtcaacattaactccaccgatatagctgatggccgaccctcaatagttcttggattgatgtggaccattattctatatttccagattgaagagttgaccagcaacctgccccagctccagtctttgtccagcagcgcatcctccgtggacagcatagttagctctgagactcccagcccaccaagtaaacggaaggtgaccaccaagatccaaggaaatgctaagaaggctttattaaagtgggttcagtacacagctggcaagcagactggaatagaagtaaaagattttgggaagagttggagaagcggggttgcctttcattcagttattcatgccattcgaccggaattggtggacttggagacagtgaaaggcagatccaaccgagaaaatttggaggatgctttcactatcgccgaaacagaactggggatcccaagactgctagatcctgaagacgttgatgtggataaaccagatgagaaatctattatgacctatgtagcccagtttctgaaacattatcctgacatccacaatgcaagcactgatgggcaagaggatgatgaaatacttccaggtttcccatcttttgcaaattctgtacaaaattttaagagagaagacagagtaatttttaaggaaatgaaagtttggatagaacaatttgagagagatttgacaagagcacagatggtggaatcaaatttacaggataaatatcagtcatttaagcacttcagagttcaatatgaaatgaagaggaaacagattgaacatttaatacaaccattacacagagacggtaaattgtcacttgaccaagcattggtaaaacaatcttgggatagagtgacctccaggctctttgactggcatatacagcttgataaatctcttcctgcacctctgggcaccataggtgcctggctgtacagagcggaggtggccctgagagaggaaataaccgttcaacaggtccacgaggaaacagcaaacacgatacaacggaaacttgagcaacataaggatctgcttcaaaacacggatgcccacaaaagagcattccatgaaatctaccggaccaggtctgttaacgggattccagtgccacctgatcaattagaggacatggccgagaggtttcattttgtttcctccacatcagagctacacctaatgaaaatggaatttttagaattaaagtaccgtctgctctcactgctggttcttgcagagtcaaagctgaagtcttggatcattaagtacgggaggagagagtcagtggagcagcttctacaaaactacgtgtcttttatagaaaatagcaagttctttgaacaatatgaggtgacataccagatcttgaaacagacagctgagatgtatgtcaaagcagatggttcagtggaagaagctgagaatgtgatgaaattcatgaatgaaaccaccgctcagtggaggaatctctcagtagaagtgaggagtgtgaggagcatgctggaagaagtgatctctaactgggatcgctatggcaatacagtggctagtctgcaagcctggctagaggatgctgaaaaaatgctcaatcaatcagaaaatgccaaaaaggatttttttcgaaatttacctcattggattcagcagcatactgccatgaacgatgctggcaattttctaattgaaacctgtgatgagatggtttcccgtgacctgaagcagcaattactgttgctaaatgggcggtggagggagttgtttatggaagtcaagcaatatgctcaagctgatgagatggacagaatgaagaaggaatacacagactgtgttgttaccctgtctgcttttgcaacggaagcccataagaaactttctgaacccttagaagtctcttttatgaatgtcaagctattaattcaagacttggaggatattgagcagagggtgcctgtgatggatgcccaatacaagataattacaaagacagcacacctcattaccaaagaaagcccccaagaagaaggaaaagaaatgtttgcgaccatgtcaaagctcaaagagcagctaaccaaggtcaaagaatgttactccccactcctttatgagtctcagcagctgttgattccgttggaggaattagaaaagcagatgacgtccttttatgactcacttgggaaaatcaatgaaattatcacagttcttgagcgtgaggcacaatcgagtgccctttttaaacaaaaacatcaggaactgttagcttgtcaagaaaactgtaagaaaaccttgacacttattgagaaaggcagtcaaagtgttcaaaagtttgtgaccttgagcaacgtgttaaagcattttgatcagacgaggctacaaagacagattgcagatattcatgttgcttttcagagtatggtaaagaaaactggagattggaagaagcatgtggaaaccaacagtcgcttgatgaagaagtttgaggagtctcgagcagagttggagaaggtactgcggattgctcaggagggcctggaggaaaagggggatccagaggagctcctgcggagacacactgagtttttcagtcagctggatcagagggtgctcaatgctttcctgaaagcttgtgatgaactcaccgacatccttccagagcaggagcagcaggggctgcaggaagctgttcgaaagctccacaaacaatggaaggatcttcaaggagaagccccttatcatttgcttcatctgaagattgatgtggagaagaataggttcttagcctctgtagaagaatgcagaactgagctggatcgagagaccaagctgatgccccaggaaggcagtgaaaagataattaaagagcacagggttttcttcagtgacaaaggtcctcatcatctctgtgagaaaaggttacagctcatcgaggaactctgtgtgaaactcccagtgcgggacccagtaagggacacacctggaacctgtcacgtgactctcaaagagctcagagctgccattgacagcacctacaggaagctcatggaagacccagacaagtggaaggactacactagcagattctctgagttctcatcttggatatctacaaatgagacacaattaaaggggatcaagggtgaggccatcgatactgccaaccacggagaggttaaacgtgccgttgaagagatcagaaatggtgttaccaaaaggggtgagaccctcagctggctgaaatccaggctgaaagttttgacagaagtttcttctgagaatgaagcccaaaagcagggagatgagctggcaaaattatccagctctttcaaggctcttgtgacgctgctgtcagaggttgaaaagatgctaagcaattttggggactgtgtccagtacaaagaaatagtcaaaaattctctcgaagaattaatttctggctctaaagaagtccaggaacaagctgagaagatcttggatactgaaaatctgtttgaagcacagcagttacttcttcatcaccagcaaaagacaaagcggatctcagcaaagaagagagatgtgcagcagcagatcgcgcaggcgcagcagggagaaggggggctgcctgaccgaggccacgaggagctgcggaagctggagagcacactggatggcctggagcgcagccgggagaggcaggaacgccgcatccaggtcacattaagaaaatgggagcgatttgaaacaaacaaagaaacagtagtaagatacctttttcaaacaggttccagtcatgaacgcttcttgagttttagcagtttggaaagtttatcttcagaactggaacaaacaaaggagttttctaaacggacagaaagtattgcagtccaggctgagaaccttgtaaaggaagcttcagagataccgcttgggccccaaaataagcagctgcttcaacagcaggccaagtcaatcaaagaacaagtcaaaaaattagaagacacgcttgaagaagatattaaaaccatggaaatggtgaaaaccaagtgggatcattttggcagtaattttgagactctgtccgtctggataactgagaaagaaaaagaactcaatgccttggaaacttcgtcatctgccatggacatgcaaatcagccaaattaaggtcacaattcaggaaatagaaagtaagctcagcagcattgtaggattagaagaagaagcccagtcttttgctcagtttgttaccactggagaatctgctcgaattaaagccaagttgacacaaataagaagatacggggaagagcttcgagagcatgcacagtgtctggaaggaacaatcctgggacatttatctcagcagcaaaagtttgaagagaaccttagaaagatccagcaatctgtgtctgaatttgaagataaacttgctgttccaattaaaatatgttcttcagctacagaaacatacaaagttcttcaagaacatatggatctctgccaggccctggagtcactgagcagcgcgatcactgccttctcagccagtgccaggaaggttgtgaacagagattcctgtgttcaggaggctgcggctctacagcagcaatacgaggacatcctaaggagggcgaaggagagacagacggcgctggagaatctgctggcccactggcagaggctagagaaagaactatcatcctttttgacctggttagagcggggtgaagctaaagccagttccccagaaatggacatttctgcagacagagtcaaagtggaaggtgaacttcagttaatacaggcactgcaaaatgaagttgtatcccaggcctcattctatagcaaacttttgcaattgaaggaatcattgttctcagtagcctccaaagatgatgtgaaaatgatgaaactacatttggagcagttggatgagagatggagagatttaccacagatcattaacaaaaggattaattttcttcagtctgtggttgctgaacaccagcaatttgatgagctgctgctttccttttctgtctggattaaactgtttctcagtgaattacaaactacctctgagattagcataatggaccatcaagtagcccttactcggcataaggaccacgcagcagaagtagagagcaaaaagggcgaattgcagagtctgcagggtcacttagcaaagttgggttctctgggccgtgctgaggacctccacctcctgcagggaaaggctgaggactgcttccagctgtttgaggaggccagccaggttgtggagaggcggcagcttgccctgtcccatttggcagaattcctccagagccatgcctctctgtccggcattctccgccagctgaggcaaacagtggaagcaaccaacagtatgaataagaacgagtctgatttgatagaaaaggacctcaatgatgctcttcaaaatgctaaagcattagaatctgctgccgtcagtctggatggcattctttccaaagcccaataccatctgaaaatcgggagctctgagcaaaggacttcctgcagagccacggctgatcagctctgtggagaggtagagaggatccagaaccttctgggaaccaagcagagtgaggcagatgctctggcagtgttgaaaaaagcattccaagaccagaaagaggagcttctgaaaagcattgaggacattgaagaaaggactgacaaagagcgattgaaagaacctacccgccaagctcttcagcagaggttaagagtgtttaatcagctagaagatgaattgaattctcacgagcatgaactatgttggttgaaagacaaagccaagcaaattgcccagaaagatgtagcttttgcacctgaagttgacagggagataaaccgcttagaggtcacctgggatgataccaaaagactaattcatgaaaatcagggtcagtgctgtggacttattgacttaatgagagaatatcagaacctgaaatcagctgtatctaaagtcttagaaaatgccagcagtgtgattgtaaccagaactaccataaaagatcaggaggatcttaaatgggctttttccaagcatgaaactgccaagaacaaaatgaattacaaacagaaagacttggataactttaccagcaaaggaaaacacttgttatctgagctgaagaaaattcacagtagtgatttcagcttggtgaaaacagacatggagagcaccgtggacaaatggctggatgtatcagagaaacttgaagaaaacatggataggctgagagtaagcctgtccatttgggatgatgtactgtcaactagagatgagattgagggatggtcaaacaactgcgttccacagatggcagaaaacatcagcaacctggataaccacctcagagctgaagaactgcttaaagaatttgagtctgaagttaaaaacaaagcattgagattggaagaactgcattccaaagttaatgatctgaaagaattaactaaaaatctagaaacaccgccagaccttcagtttatagaagcagacttaatgcagaaactggagcatgccaaagaaataactgaagtagcaaaaggaaccctgaaggatttcacggctcaaagtacacaagtggagaagtttattaatgacataacaacatggttcacaaaagtggaagaatcgttgatgaactgtgcccaaaatgagacttgtgaagcattgaaaaaagtcaaggatatacaaaaagaacttcaaagtcaacaaagcaacatcagctctacccaagaaaatctcaatagcttgtgccgcaagtaccactcagctgagttggagagcctgggccgtgcaatgactggtctgataaagaaacatgaagccgtgagccagttgtgctccaaaacccaggccagcctgcaggaatctctggaaaaacacttcagtgagtctatgcaggaattccaagaatggtttttgggagcaaaggcagcagcaaaagaatcatcagatcgcaccggtgacagcaaagttctagaagcaaagctccatgatcttcagaacattttggactcagtcagtgatgggcagagcaaacttgatgcagtgactcaagaaggacaaactttgtatgcacatttgtctaaacaaattgtcagtagcattcaagaacaaatcacaaaggccaatgaagagtttcaagcatttctgaaacaatgccttaaagataagcaggctcttcaagactgtgcttcagaacttggaagctttgaagatcagcacagaaaactgaacttatggatccatgaaatggaagaaaggttcaatacggaaaacttgggagagagtaaacagcacattcctgagaagaaaaatgaagttcataaagttgaaatgtttttgggagaactgctggctgcaagagagtctcttgataagctttcccagagagggcagcttctgagtgaagaaggccacggtgctgggcaggagggccgcctgtgttcccagctcctcacaagccaccagaacctacttagaatgaccaaagagaaactccggagctgccaggtggcccttcaggagcacgaagccctggaggaagcactgcaaagcatgtggttctgggtgaaggccattcaggacagactggcctgtgcagagagcactcttgggagcaaagacaccctggagaaacggctgtcacaaatacaggatattctcctgatgaaaggtgaaggggaagttaagttgaatatggccattggcaagggggaacaggccttgagaagtagcaacaaagaaggtcagagggtgattcagactcagttagagacccttaaagaagtgtgggctgacatcatgagctcctccgtccacgctcaaagcactttagagtctgtgattagccaatggaatgactatgtagagaggaaaaaccagttggagcagtggatggaatcagtggatcaaaaaatagaacatcccttacaaccacagccaggtctgaaagagaagttcgtcctgcttgaccacctccagtccatcctgtctgaggcagaagatcacacgagagcccttcaccgtctaattgcgaagtccagggagctctacgaaaagacagaggatgagtctttcaaggacacagctcaagaggagctgaaaacacagtttaatgatataatgactgttgccaaggaaaaaatgaggaaagtggaagagattgtgaaagatcatctaatgtatttagatgcggtccacgagttcacagattggctccattcagcaaaggaagaacttcaccggtggtcagatatgtctggagattcatcagccacccagaaaaagttatcaaaaattaaggagctgatagattccagagagattggtgcaagccgtctcagcagagtggagtcgctggctcccgaagtgaaacagaacacaactgccagtgggtgtgagctcatgcacacggagatgcaggccctgcgtgccgactggaagcagtgggaagacagtgtattccaaacgcagagctgtttggagaacctggtcagccagatggccctttcggagcaggaattctcaggccaagtggctcaactggagcaggccctggaacagttcagtgcccttctgaaaacctgggctcagcagttaaccctcctggaaggcaagaacacggatgaggagatagtggaatgctggcacaaaggacaagagatactggatgctttgcaaaaagcagagcctagaacagaggatctcaagtctcagctgaatgaactttgtcgattttccagagacctgagtacctacagtggaaaagtttctggcttgattaaagagtataattgtctttgtttgcaagcatccaagggctgccagaataaagaacagattttacagcaaagatttcgaaaggccttcagggatttccagcagtggttggttaatgcaaaaatcactaccgccaagtgttttgatatacctcaaaatataagtgaagtttcaactagtcttcagaaaatacaggagtttttgtcagaaagtgaaaatggacagcacaagctaaacatgatgctgtctaaaggggaacttctgagtaccctgctgaccaaagagaaagcgaaagggatccaggccaaagttacagctgcaaaagaagattggaaaaattttcattcaaatctccaccaaaaagaatctgctctagagaatctaaagatccaaatgaaggactttgaagtaagtgctgagcctatccaggactggctgagtaaaactgagaagatggtccatgaaagcagcaatcgcctctatgatctgccagcaaagaggagggagcagcagaagctccagtctgtccttgaggaaatacactgctacgagcctcagctcaacaggctgaaagagaaagctcagcagctgtgggaaggacaagctgccagcaagagctttaggcacagagtgtcgcagctgtcttctcagtatctagcgctaagcaatttaacaaaggagaaagtgtcaagactggatagaatcgttgcagaacacaatcagttctctcttgggattaaagaattacaagactggatgacggatgcgattcacatgctggattcatactgccacccgacatccgacaaaagtgtgctggacagcaggacgctcaagctcgaggctctattatcagtcaaacaggaaaaagagattcagatgaaaatgatagtgaccaggggagaatctgtccttcagaatacttctccagaaggcattcccactattcagcagcagctgcagagtgtgaaggatatgtgggcatcccttttgtctgcagggattcgttgtaaaagccaactcgaaggagctctctccaagtggacaagttatcaggatggcgttcgacagttctccggttggatggatagtatggaagccaacctgaatgaatcagaaaggcagcatgcggagctgcgggataaaacaacgatgctcggaaaagccaagttattaaatgaagaagtgctgagttacagcagcttgctggagaccatcgaagtcaaaggggctggcatgacagaacactatgtcacccagctagaactccaggatctacaggaacgatacagagccatccaagagagggccaaggaagccgtaaccaagtctgaaaaacttgtccgcctgcaccaagagtatcagagagacctaaaggcatttgaagtttggttggggcaagaacaagaaaagctcgaccagtattcagttcttgaaggtgatgcccacactcatgagacaacattgcgtgatcttcaggagctacaggtacactgtgcagaggggcaggccctgttgaactcagtgctgcacaccagagaggatgtgatcccatcaggtatcccacaggcagaggaccgggctttagagtctctccggcaagactggcaggcttaccagcacaggctgtccgagactcgaactcagttcaataacgtggtgaacaaattgaggctaatggagcaaaagtttcagcaagtagatgaatggctcaaaacagcagaggagaaagttagtcccaggaccagacgtcagtctaacagggcaaccaaggagatacaattacatcagatgaagaagtggcacgaagaagtgactgcatacagagatgaagttgaggaagtgggagctagagctcaggagatactggacgagagccacgtgaacagcagaatgggttgccaggccacccagctgacttccagataccaggccctgcttctccaagtgctggaacaaataaaattcctggaggaggagattcagagtttggaggaatcagaatcatccctcagttcctattctgattggtatggctctactcataaaaacttcaagaatgtggctaccaagattgacaaagtagatacagtaatgatggggaagaaattgaagacgttggaggttttgctcaaagacatggagaaaggtcacagtttgctgaaatcagcccgggagaaaggagagagggctgttaaatacttggaggaaggcgaggcagagaggttaagaaaggagattcatgatcacatggagcagttgaaggaactgaccagcactgtccggaaagaacacatgacgctggaaaaaggtcttcatttagcaaaggaattctcagataaatgcaaagcactgacacagtggatagcagaataccaggaaattctacatgttcctgaagaacccaaaatggaattatatgagaaaaaagctcagttatctaaatacaagtcacttcaacaaacggtgctgtcccatgaaccatcagtaaagtcagtgagagagaagggtgaagctcttttggaactggtgcaggacgtcactttaaaggacaaaatagatcaacttcaaagtgattaccaggacctgtgcagcataggaaaggagcatgtcttcagtctggaggcgaaagtcaaagaccatgaagactacaacagtgagctccaagaggtcgaaaagtggctgctgcagatgtctggcagactggtggcacctgacctcctggagacaagcagcctggagacaatcacccagcaattggcccaccacaaggcaatgatggaagaaattgctggttttgaagaccgtttgaacaatcttcaaatgaaaggtgatactttgattggccaatgtgcagaccacctgcaagcgaaacttaaacaaaacgtgcatgctcatctgcagggcacaaaggacagctactcagcgatctgcagcacagctcagaggatgtaccagagtttggaacacgaacttcagaagcacgtcagccgacaagacaccctgcagcagtgccaggcctggctttctgcagtccagccggatttagagccaagtcctcaaccacctcttagtagggcagaagccattaagcaggtcaaacacttcagagctttgcaagagcaggcaaggacctacctagatctcctttgctccatgtgtgacctgtcaaatgcttcggtgaaaaccacagcaaaagacattcaacaaacagagcaaacgattgaacaaaagcttgtccaggcccagaacttaactcagggctgggaagagatcaagcacctgaagtctgagctctggatttacctgcaagatgctgatcagcaactgcagaacatgaagaggaggcactctgagctggagctgaacattgcacagaacatggtttcacaagttaaggattttgttaagaaactacagagcaaacaggcatccgtgaacaccataatagaaaaggtgaataagttaacaaagaaggaggaatcgcctgaacacaaggaaataaatcatttaaatgatcagtggctcgatttgtgccgtcagtctaacaacctgtgcttgcaaagggaagaggatcttcagagaacaagagattaccatgactgtatgaatgttgttgaagtgttcctagaaaaatttactacagaatgggataacttggccagatctgatgcagagagtacagctgtccacctggaagctttgaaaaagttagcattggcattgcaggagagaaagtatgctattgaagatctgaaagatcaaaagcagaaaatgatagagcatctgaatttagatgacaaggagttagtcaaagaacagacgagtcatttagagcaacgttggtttcagcttgaggacctcattaaaaggaaaatccaagtgtcagtcaccaacttggaggagttaaatgtggtgcagtccagatttcaggagctaatggagtgggcagaagagcaacaacccaacatcgccgaggcccttaagcagagccctcctccagatatggctcagaaccttctcatggatcacctggccatctgcagtgaactggaggccaagcagatgctcctgaaatcgcttataaaggacgcagacagggtcatggcagatcttggtctcaatgagcgacaggtcatccagaaggctctctctgatgcacaaagccacgtgaattgtctcagtgacttagtgggccagcgaagaaagtacttaaacaaagccttgtccgagaaaacccagtttctcatggcagtgttccaggccaccagccaaattcagcaacatgagcgaaagataatgttccgtgaacacatctgtctgttaccagatgatgtgagcaaacaagtcaaaacatgtaagagtgcacaagccagcctcaagacttaccaaaatgaagtcactggactttgggcccagggtcgcgaactaatgaaggaagtcacagagcaggaaaagagtgaagtgctggggaagcttcaggaattgcagagtgtctatgacagtgttttacaaaagtgcagtcaccggttacaagaactagagaagaatttggtttctaggaagcattttaaggaagattttgataaagcttgccactggctaaaacaagcagatattgttacatttcctgaaatcaacctaatgaatgagagttctgagcttcatacacaactggctaaataccaaaacattcttgaacaatctccagaatatgaaaatcttctacttacgctgcagagaactgggcagaccatattaccatcgctgaatgaagtcgatcattcctacctcagtgaaaagctaaatgctttgcctcgacaatttaatgtaattgttgccttggctaaagacaagttctataaagtccaggaagcaattcttgctcggaaggaatatgcttccttgattgagttgacaacccagtctctgagtgaacttgaagcccaattcttgaggatgagcaaagttcccaccgacctggccgttgaggaggctctttctctgcaagatggttgcagagccattctggacgaggtggcgggccttggggaggcggtggatgaactgaaccagaaaaaagaaggttttcgcagcacaggtcagccttggcagccagacaagatgctgcaccttgtcaccttatatcacaggctgaagcgacaaacagaacagagggttagcttattagaagacaccaccagtgcttaccaagaacacgagaagatgtgccaacagctggagagacaactgaagtctgtaaaagaggagcagtccaaagtgaatgaggaaacgctgcctgcagaggagaagctcaaaatgtatcactccctggcaggaagtctccaggactcagggattgtactgaaacgagtaaccatacatcttgaagatcttgccccacaccttgaccccttggcttatgagaaagccaggcatcagatccagtcctggcaaggggagttaaaactgttgacttctgccattggtgagacggtgacagaatgtgagagccgaatggtgcagagtatagacttccagactgagatgagtcgctccctggactggctgaggagagtgaaggcagagctcagtgggccggtgtacctagacctcaacctgcaggacatccaagaggaaatcagaaaaatccaaattcatcaggaagaggtccagtccagcttgagaatcatgaatgcgctgagtcacaaggaaaaggagaagttcacaaaggccaaggagctgatttctgcggatttagaacacagcctcgctgagctctcagagctggatggagacatccaggaagccttacgcaccagacaggctaccttgactgaaatatatagccagtgtcaaaggtattatcaggtatttcaagcagccaatgactggcttgaggatgcccaagaattgttacagctggcaggcaatggcctagacgtggagagcgcagaggaaaatctcaaaagccacatggaatttttcagtacagaggatcagttccatagtaacctggaggagctccacagcctggtagccaccctggacccactcatcaagccaaccggcaaagaagacctagaacagaaagtggcttctctggaactcaggagccagaggatgagccgggactctggtgcccaagtggatctcttgcagagatgcacagctcaatggcacgattaccagaaagcaagggaagaggttattgaattgatgaatgatacagaaaagaaattgtctgagttttctttgttgaagacttcgtctagtcatgaagcggaagaaaaattgtcagaacacaaggctttagtgtcagtggttaactctttccatgagaaaattgtggcccttgaggaaaaagcttcacaactggagaaaaccggaaatgatgccagcaaagccaccctgagcaggtcaatgaccaccgtctggcagcgctggacacgccttcgagctgtggcccaggaccaggagaagatcctggaagatgcagtggatgagtggacgggctttaacaacaaggttaaaaaggccactgaaatgattgatcagctgcaagataagttacctggaagttcagcagagaaagcatcgaaagcagagctcttaactcttcttgaataccacgacacgttcgttctggagctggagcagcagcagtcggccttgggcatgctgcggcagcaaaccctgagcatgctccaggatggagccgccccaacccctggggaagagcctccgctcatgcaggaaatcaccgccatgcaagatcggtgcctgaacatgcaggagaaagtgaagactaatggaaagttggtgaagcaagagctgaaggaccgagaaatggtggagactcagatcaattctgtgaaatgttgggttcaggaaacgaaagaatatttagggaatccaacaatagaaatagatgctcaacttgaagaacttcagattctcctaacagaagccacaaatcaccgacagaacattgaaaaaatggcagaagaacagaaggagaagtacttaggtctttataccatattaccttctgaactctcccttcagttggctgaagtggcgttagatctaaagatccgagatcagatccaagacaaaataaaagaagttgagcagagcaaggccacgagccaggaactcagccggcaaattcagaagttagctaaagacctcacaactattctaactaagctgaaagcgaagacagataatgtagttcaagctaaaactgaccaaaaggtgctgggagaggaattagatggctgtaattcaaagttaatggaattagatgcagcagtacagaaattcttggaacagaatggccaactgggtaagccactggccaagaagataggaaaactgactgaacttcaccagcagaccattagacaagctgagaatcggctctccaagctcaatcaggcagcatcacatttagaagaatacaatgaaatgcttgaattaattttgaagtggattgaaaaagctaaagtcttggctcatggaactattgcatggaattctgcaagccagcttcgggaacaatatattttgcatcagaccctgctagaagaatccaaagaaattgacagtgagctggaagcaatgactgagaaattacagtacctcactagcgtgtactgtacagaaaaaatgtctcagcaagtggcagaactgggacgggagactgaggagttgcgacagatgatcaaaattcgtttgcagaacctccaagatgcagctaaggatatgaaaaaatttgaagcagagttgaaaaagttacaagctgccttggagcaagcccaggcaacactgacttctccagaagttggacgtctcagtctcaaggagcagctctctcatcggcagcatttgttgtctgagatggagtcactgaagccgaaggtgcaagcagtgcagctctgccagagtgccctccggatccccgaggatgtggttgccagcttacctctctgtcatgctgctctgcggctgcaggaagaggccagccggctgcagcacaccgccatccagcagtgtaacatcatgcaggaagctgtggtacaatatgaacaatatgagcaagaaatgaaacatctccagcaactgatagaaggagctcacagagagattgaggataaacctgttgccaccagtaacatacaggagctgcaggctcagatttctcggcatgaggagctggcgcagaaaattaagggctaccaggagcagatcgcttctttgaattccaagtgcaagatgctgacgatgaaagccaagcacgccaccatgctgctgacggtgaccgaggtcgaggggctggcggaagggacagaggacctggatggggagctcctccccacgccttcggcccacccctctgtggtcatgatgactgcaggtcgctgtcacactttgctgtcaccggtcactgaggagtctggggaggagggaaccaacagtgagatttcctctccacctgcctgtcgctccccttcacctgtggctaatacagatgcttctgttaaccaggacattgcatattaccaagccttgtctgctgagaggttgcagacagatgctgcaaaaattcaccccagcacatccgcatcccaggagttctatgaaccgggattggagccatccgctactgccaaactgggtgatttgcagcgttcttgggaaaccttaaagaatgtgatcagtgagaagcagcgcacactctatgaagctttggaacgccagcagaagtaccaggactccctccagtccatctctacgaagatggaggccattgagctgaaactcagtgagagcccagagcctggcaggagtccagaaagccagatggctgaacatcaggcattgatggatgagattctcatgctccaggatgaaatcaatgagctccagtcctctctcgcagaggagctggtatccgagtcttgtgaggccgaccctgcggagcagctggccttgcagtccacgctcactgtcttagccgagcgaatgtccaccatcaggatgaaagcctcggggaaacggcagcttttggaggagaagttgaatgatcagctggaggaacaaaggcaggaacaggccctgcagaggtatcgctgtgaagccgatgagctggacagctggctcttgagtaccaaggccactctggacactgcgctgagtccacccaaggagcccatggacatggaggcccagcttatggactgccagaatatgctggtggaaatagagcagaaggtggtggctttatcagaactgtcagtccacaatgagaacctgctgctggagggcaaagctcacaccaaggacgaggccgagcagctggctggaaagctgagaaggctcaaggggagcctgctggagctgcagagagccctgcatgataagcagctcaacatgcagggaacagcacaggagaaggaggagagcgatgttgacctaacagccacgcagagccccggcgtccaggaatggctggcccaagctcgcaccacatggacccagcagcggcagagcagtctccagcaacaaaaagagttagaacaggaattagccgagcagaagagtctccttcgctcagtagccagtcgtggagaggagattctaattcaacattcggcggcagagacctctggtgatgctggcgaaaaacctgatgtgttatcccaggagttggggatggaaggggagaaatcatccgctgaagaccagatgagaatgaaatgggaaagcctacatcaagaatttagtaccaagcagaaactactacagaatgttctggaacaggaacaagagcaagtgctttatagcaggccaaatcgactcttgtctggtgtgccactgtacaaaggggacgtgccaacccaagataaatctgcagttacatctttgctggatggactgaaccaagccttcgaggaggtttcatcccagagtggaggggcaaagaggcagagtatacacttggagcagaagttgtatgatggagtctcagccacctctacttggttggatgacgttgaagaacgtttatttgttgccacagcacttttaccagaagaaacagagacttgtctcttcaaccaagagattcttgccaaagacattaaggaaatgtctgaagaaatggataagaacaaaaacttgttttcccaagcttttccagagaatggtgataatcgagatgttattgaagatactttgggttgtcttttgggcaggttatccttgctagactcagtagtgaatcaacgatgtcatcagatgaaagaaagacttcagcaaatactaaatttccagaatgatctgaaagtgctgtttacatcactggctgacaacaaatacatcattctgcaaaaactggcaaatgtgtttgaacagcccgtagcagaacaaatagaggcaatacaacaggctgaagatggactcaaagaatttgatgcaggaatcattgaattaaagaggcgtggtgacaagctacaggtcgagcagccgtccatgcaagaactctccaagctccaggacatgtatgatgagctgatgatgatcattggctcccggaggagtggtctgaatcagaaccttacactcaagagtcagtatgagagggccctacaagatctggctgacctgctagaaactggtcaggagaagatggcaggagaccagaaaatcatcgtgtcttccaaagaggaaatccagcaactacttgacaaacataaggaatactttcagggcctggaatctcatatgatcttgactgaaacactcttcagaaagataatcagctttgcagtccaaaaggaaacccagttccatacagagctgatggctcaggcttctgctgtactgaaacgggctcacaagaggggtgtggagctggagtacattctagagacgtggtcccatctggatgaggaccagcaggagctcagcagacagctggaggtggtggaaagcagcatcccaagcgtgggtctggtggaggagaacgaggacaggcttattgaccgcataacactctaccagcatttaaaatctagccttaatgaataccagcccaaattatatcaagtattagatgatgggaaacgacttctgatatccatcagctgctcagatctagaaagccaactaaatcaacttggagagtgctggctaagtaacaccaataaaatgtctaaggaacttcacagactggaaacaatattgaaacactggaccagatatcaaagtgaatctgcagatctaattcactggttacaatctgcaaaagaccggctagaattttggactcagcaatctgtgacagtcccacaagagctggaaatggtccgtgatcatctaaatgctttcctggagttttctaaagaagtggatgcccaatcttccctgaaatcatctgttctgagtactggaaatcagctccttcgactaaaaaaggtggacacagccacgctgcgctctgagctgtcgcgcattgatagccagtggactgacctgctaaccaatatcccagccgtccaggagaagctccaccagctccagatggataaactgccttcccgccatgccatttctgaagtcatgagttggatttctctaatggaaaatgttattcagaaggatgaagataatattaaaaattccataggttacaaggcaattcatgaataccttcagaaatataagggttttaagatagacattaactgtaaacagctgacagtggattttgtgaaccagtccgtgctacaaatcagcagtcaggatgtggaaagtaagcgtagtgataagactgattttgctgagcaacttggagcaatgaataaaagttggcaaattctgcaaggtctagtaactgagaagatccagctgttggaaggcttattggaatcttggtcagaatatgaaaataatgtacaatgtctgaaaacatggtttgaaacccaggaaaagagactaaaacaacagcatcgaattggagatcaggcttctgttcaaaatgcactgaaagactgtcaggatctggaagatttgattaaagcaaaagaaaaagaagtagagaaaattgagcagaatggacttgctttgattcagaacaagaaagaagacgtctctagcattgtcatgagcacactgcgagagctcggccaaacctgggcaaatttagatcacatggttggacaattaaagatactgctgaaatcagtgcttgaccaatggagtagtcacaaagtggcctttgacaagataaacagttacctcatggaggccagatactctctttcccgattccgtctgctgactggctccttagaagctgtgcaagttcaggtggacaatcttcagaatctccaagatgatctggaaaaacaggaaaggagcttacagaaatttggctctatcaccaaccaattattaaaagagtgtcacccacccgtgacagaaactcttaccaatacactgaaagaagtcaacatgagatggaataacttgctggaagagattgctgagcagctacagtccagcaaggccctacttcagctttggcaaagatacaaggactactccaaacagtgtgcttcgacagttcagcagcaggaggatcgaaccaatgagctgttgaaggcagccacaaacaaggacattgccgatgatgaggttgccacatggattcaagattgcaacgacctcctcaaaggactgggcacagttaaagattccctcttttttctccatgagctgggagagcaactgaagcaacaagtggatgcttccgcagcatcagctattcaatcggatcaactctctttgagtcaacacttgtgtgccctggagcaagctctctgcaaacagcagacttcattacaggctggagttcttgattatgaaacctttgccaagagtttagaagctttggaggcctggatagtggaagctgaagaaatactacaagggcaggaccctagccactcatctgacctctccacaatccaggaaaggatggaagaacttaagggacagatgttaaaattcagcagcatggctccagatttagaccgtctaaatgagcttggatataggttacccttgaatgataaggaaatcaaaagaatgcagaatctgaaccgccattggtctctgatctcctctcagactacagaaagattcagcaagttgcagtcatttttgctacaacatcagactttcttggaaaaatgtgaaacatggatggaattcctagttcagacagaacaaaagttagcagtagagatttcaggaaattatcagcaccttttggaacagcagagagcacacgagttgtttcaagccgagatgttcagtcgtcagcagattttgcactcaatcattattgatgggcaacgtcttctagaacaaggtcaagttgatgacagggatgaattcaacctgaaattgacactcctcagtaatcaatggcagggagtgattcgcagggcccagcagaggcgggggatcattgacagccagattcgccagtggcagcgctatagggagatggcagaaaagcttcgtaaatggttggttgaagtgtcctacctccccatgagtggtctcggaagtgttcctataccactgcaacaagcaaggaccctctttgatgaagtgcagttcaaagaaaaagtgtttctgcggcaacaaggcagctacatcctgactgtggaggctggcaagcaactccttctctcggcggacagtggcgctgaggccgccttgcaggccgaactcgctgaaatccaagagaaatggaaatcagccagcatgcggctggaagaacagaagaaaaaactagccttcttgttgaaagactgggaaaaatgtgagaaaggaatagcagattccctggagaaactacgaactttcaaaaagaagctttcgcagtctctcccggatcaccatgaagagctccatgcagaacaaatgcgttgcaaggaattagaaaatgcagttgggagctggacagatgacttgacccagttgagcctgctgaaggacaccctctctgcctatatcagtgctgatgatatctccattcttaatgaacgcgtagagcttctgcaaaggcagtgggaagaactatgccaccagctctccttaaggcggcagcaaataggtgaaagattgaatgaatgggcagtcttcagtgaaaagaacaaggaactctgtgagtggttgactcaaatggaaagcaaagtttctcagaatggagacattctcattgaagaaatgatagagaagctcaagaaggattatcaagaggaaattgctattgctcaagagaacaaaatacagctccaacaaatgggagaacgacttgctaaagccagccatgaaagcaaagcatctgagattgaatacaagctgggaaaggtcaacgaccggtggcagcatctcctggacctcattgcagccagggtgaagaagctgaaggagaccctggtagccgtgcagcagcttgataagaacatgagcagcctgaggacctggctcgctcacatcgagtcagagctggccaagccaatagtctacgattcctgtaactcggaagaaatacagagaaagcttaatgagcagcaggagcttcagagagacatagagaagcacagtacaggtgttgcatctgtcctcaacctgtgtgaagtcctgctgcacgactgtgacgcctgtgccactgatgccgagtgtgactctatacagcaggctacgagaaacctggaccggcggtggagaaacatttgtgctatgtccatggaaaggaggctgaaaatcgaagagacgtggcgattgtggcagaaatttctggatgactattcacgttttgaagattggctgaagtcttcagaaaggacagctgcttttcccagctcttctggggtgatctatacagttgccaaggaagaactaaagaaatttgaggctttccagcgacaggtccacgagtgcctgacgcagctggaactgatcaacaagcagtaccgccgcctggccagggagaaccgcactgattcagcatgtagcctcaaacagatggttcacgaaggcaaccagagatgggacaacctgcaaaagcgtgtcacctccatcttgcgcagactcaagcattttattggccagcgtgaggagtttgagactgcgcgggacagcattctggtctggctcacagagatggatctgcagctcactaatattgaacatttttctgagtgtgatgttcaagctaaaataaagcaactcaaggccttccagcaggaaatttcactgaaccacaataagattgagcagataattgcccaaggagaacagctgatagaaaagagtgagcccttggatgcagcgatcatcgaggaggaactagatgagctccgacggtactgccaggaggtcttcgggcgtgtggaaagataccataagaaactgatccgcctgcctctcccagacgatgagcacgacctctcagacagggagctggagctggaagactctgcagctctgtcggacctgcactggcacgaccgctctgcagacagcctgctttctccacagccttcctccaatctctccctctcgctcgctcagcccctccggagcgagcggtcaggacgagacaccccggctagtgtggactccatccccctggagtgggatcacgactatgacctcagtcgggacctggagtctgcaatgtccagagctctgccctctgaggatgaagaaggtcaggatgacaaagatttctacctccggggagctgttggcttatcaggggaccacagtgccctagagtcacagatccgacaactgggcaaagccctggatgatagccgttttcagatacagcaaaccgaaaatatcattcgcagcaaaactcccacggggccggagctagacaccagctacaaaggctacatgaaactgctgggcgaatgcagtagcagtatagactccgtgaagagactggagcacaaactgaaggaggaagaggagagccttcctggctttgttaacctgcatagtaccgaaacccaaacggctggtgtgattgaccgatgggagcttctccaggcccaggcattgagcaaggagttgaggatgaagcagaacctccagaagtggcagcagtttaactcagacttgaacagcatctgggcctggctgggggacacggaggaggagttggaacagctccagcgtctggaactcagcactgacatccagaccatcgagctccagatcaaaaagctcaaggagctccagaaagctgtggaccaccgcaaagccatcatcctctccatcaatctctgcagccctgagttcacccaggctgacagcaaggagagccgggacctgcaggatcgcttgtcgcagatgaatgggcgctgggaccgagtgtgctctctgctggaggagtggcggggcctgctgcaggatgccctgatgcagtgccagggtttccatgaaatgagccatggtttgcttcttatgctggagaacattgacagaaggaaaaatgaaattgtccctattgattctaaccttgatgcagagatacttcaggaccatcacaaacagcttatgcaaataaagcatgagctgttggaatcccaactcagagtagcctctttgcaagacatgtcttgccaactactggtgaatgctgaaggaacagactgtttagaagccaaagaaaaagtccatgttattggaaatcggctcaaacttctcttgaaggaggtcagtcgtcatatcaaggaactggagaagttattagacgtgtcaagtagtcagcaggatttgtcttcctggtcttctgctgatgaactggacacctcagggtctgtgagtcccacatcaggaaggagcaccccaaacagacagaaaacgccacgaggcaagtgtagtctctcacagcctggaccctctgtcagcagtccacatagcaggtccacaaaaggtggctccgattcctccctttctgagccagggccaggtcggtccggccgcggcttcctgttcagagtcctccgagcagctcttccccttcagcttctcctgctcctcctcatcgggcttgcctgccttgtaccaatgtcagaggaagactacagctgtgccctctccaacaactttgcccggtcattccaccccatgctcagatacacgaatggccctcctccactctgaactaagcagatgccatctgcagaagtgctggtagcataaggaggatcgggtcataagcaatcccaaactaccaacaagaggaccttgatcttggcgaaagccctcggtgtggcagctttagccctcctccagatcacatgtgtgcaaattatggcttcagaggtggaagataaacagtgacgggggaacaaacagacaacaagaaggtttggaagaaatctggtttgagactctgaaccttagcactaaggagattgagtaaggacctccaaagttccccggactcatgaattctgggcccttggcccattctgtgcacagccaaggacttcagtagaccatctgggcagctttcccatggtgctgctccaaccatcagataaatgaccctcccaagcaccatgtcagtgtcgtacaatctaccaaccaaccagtgctgaagagattttagaaccttgtaacatacaatttttaagagcttatatggcagcttcctttttaccttgttttcctttggggcatgatgttttaacctttgctttagaagcacaagctgtaaatctaaaaggcacttttttttagaggtataaagaaaaactagatgtaataaataagatcatggaaggctttatgtgaaaaaagttgaatgttatagtaaaaaaaaaaagatatttatgtatgtacagtttgctaaagccaagttttgtttgtattgatttctttgcatttattatagatattataaaatagtt

SEQ ID NO: 29627 - DNA, 27436 bp, Homo sapiens
  source 1..27436: mol_type = unassigned DNA
cggccgccggccgcagcgggctgagattgttgtcctctgtcaccagggcggctgggctcccgcagtcctgcagaccgcgcccgatcccggcgacagggcgggcggacagccgcgcatccccggggtcccgccgagcctgggcgcagagagccgggaggaagcgttcgctcgcttcgccttgctgctgggaaactgaacgaggccgagagagaaggttcttgagttcatgtaagaggacagtcttaaaacggaagaagaaaaagaagcagttcagtctttgggagagctgcctccttgttgagtgctgcaaaggcctggaattcatttatgacagaatagatctagaaaagtccaagcatgttttctagagtggtgtagccctgtgctgcctccagtgaagagtctcttggtgttggcttcgtgcttccggagggaccatggcaacctccagaggggcctcccggtgtcctcgggatatcgccaatgtgatgcagaggctgcaagatgagcaagagatagtacaaaaacgaactttcacaaaatggatcaactctcatctggccaagcggaaacctccaatggtggtggacgatctttttgaagacatgaaagatggtgttaaactgcttgcccttctggaggtcctgtctgggcagaaactgccttgtgaacaaggacgccggatgaagcgaatccatgctgtggctaacattggcacggcactcaagttcctcgaaggaagaaagtccatgcacagaggatcaccgattaaattagtcaacattaactccaccgatatagctgatggccgaccctcaatagttcttggattgatgtggaccattattctatatttccagattgaagagttgaccagcaacctgccccagctccagtctttgtccagcagcgcatcctccgtggacagcatagttagctctgagactcccagcccaccaagtaaacggaaggtgaccaccaagatccaaggaaatgctaagaaggctttattaaagtgggttcagtacacagctggcaagcagactggaatagaagtaaaagattttgggaagagttggagaagcggggttgcctttcattcagttattcatgccattcgaccggaattggtggacttggagacagtgaaaggcagatccaaccgagaaaatttggaggatgctttcactatcgccgaaacagaactggggatcccaagactgctagatcctgaagacgttgatgtggataaaccagatgagaaatctattatgacctatgtagcccagtttctgaaacattatcctgacatccacaatgcaagcactgatgggcaagaggatgatgaaatacttccaggtttcccatcttttgcaaattctgtacaaaattttaagagagaagacagagtaatttttaaggaaatgaaagtttggatagaacaatttgagagagatttgacaagagcacagatggtggaatcaaatttacaggataaatatcagtcatttaagcacttcagagttcaatatgaaatgaagaggaaacagattgaacatttaatacaaccattacacagagacggtaaattgtcacttgaccaagcattggtaaaacaatcttgggatagagtgacctccaggctctttgactggcatatacagcttgataaatctcttcctgcacctctgggcaccataggtgcctggctgtacagagcggaggtggccctgagagaggaaataaccgttcaacaggtccacgaggaaacagcaaacacgatacaacggaaacttgagcaacataaggatctgcttcaaaacacggatgcccacaaaagagcattccatgaaatctaccggaccaggtctgttaacgggattccagtgccacctgatcaattagaggacatggccgagaggtttcattttgtttcctccacatcagagctacacctaatgaaaatggaatttttagaattaaagtaccgtctgctctcactgctggttcttgcagagtcaaagctgaagtcttggatcattaagtacgggaggagagagtcagtggagcagcttctacaaaactacgtgtcttttatagaaaatagcaagttctttgaacaatatgaggtgacataccagatcttgaaacagacagctgagatgtatgtcaaagcagatggttcagtggaagaagctgagaatgtgatgaaattcatgaatgaaaccaccgctcagtggaggaatctctcagtagaagtgaggagtgtgaggagcatgctggaagaagtgatctctaactgggatcgctatggcaatacagtggctagtctgcaagcctggctagaggatgctgaaaaaatgctcaatcaatcagaaaatgccaaaaaggatttttttcgaaatttacctcattggattcagcagcatactgccatgaacgatgctggcaattttctaattgaaacctgtgatgagatggtttcccgtgacctgaagcagcaattactgttgctaaatgggcggtggagggagttgtttatggaagtcaagcaatatgctcaagctgatgagatggacagaatgaagaaggaatacacagactgtgttgttaccctgtctgcttttgcaacggaagcccataagaaactttctgaacccttagaagtctcttttatgaatgtcaagctattaattcaagacttggaggatattgagcagagggtgcctgtgatggatgcccaatacaagataattacaaagacagcacacctcattaccaaagaaagcccccaagaagaaggaaaagaaatgtttgcgaccatgtcaaagctcaaagagcagctaaccaaggtcaaagaatgttactccccactcctttatgagtctcagcagctgttgattccgttggaggaattagaaaagcagatgacgtccttttatgactcacttgggaaaatcaatgaaattatcacagttcttgagcgtgaggcacaatcgagtgccctttttaaacaaaaacatcaggaactgttagcttgtcaagaaaactgtaagaaaaccttgacacttattgagaaaggcagtcaaagtgttcaaaagtttgtgaccttgagcaacgtgttaaagcattttgatcagacgaggctacaaagacagattgcagatattcatgttgcttttcagagtatggtaaagaaaactggagattggaagaagcatgtggaaaccaacagtcgcttgatgaagaagtttgaggagtctcgagcagagttggagaaggtactgcggattgctcaggagggcctggaggaaaagggggatccagaggagctcctgcggagacacactgagtttttcagtcagctggatcagagggtgctcaatgctttcctgaaagcttgtgatgaactcaccgacatccttccagagcaggagcagcaggggctgcaggaagctgttcgaaagctccacaaacaatggaaggatcttcaaggagaagccccttatcatttgcttcatctgaagattgatgtggagaagaataggttcttagcctctgtagaagaatgcagaactgagctggatcgagagaccaagctgatgccccaggaaggcagtgaaaagataattaaagagcacagggttttcttcagtgacaaaggtcctcatcatctctgtgagaaaaggttacagctcatcgaggaactctgtgtgaaactcccagtgcgggacccagtaagggacacacctggaacctgtcacgtgactctcaaagagctcagagctgccattgacagcacctacaggaagctcatggaagacccagacaagtggaaggactacactagcagattctctgagttctcatcttggatatctacaaatgagacacaattaaaggggatcaagggtgaggccatcgatactgccaaccacggagaggttaaacgtgccgttgaagagatcagaaatggtgttaccaaaaggggtgagaccctcagctggctgaaatccaggctgaaagttttgacagaagtttcttctgagaatgaagcccaaaagcagggagatgagctggcaaaattatccagctctttcaaggctcttgtgacgctgctgtcagaggttgaaaagatgctaagcaattttggggactgtgtccagtacaaagaaatagtcaaaaattctctcgaagaattaatttctggctctaaagaagtccaggaacaagctgagaagatcttggatactgaaaatctgtttgaagcacagcagttacttcttcatcaccagcaaaagacaaagcggatctcagcaaagaagagagatgtgcagcagcagatcgcgcaggcgcagcagggagaaggggggctgcctgaccgaggccacgaggagctgcggaagctggagagcacactggatggcctggagcgcagccgggagaggcaggaacgccgcatccaggtcacattaagaaaatgggagcgatttgaaacaaacaaagaaacagtagtaagatacctttttcaaacaggttccagtcatgaacgcttcttgagttttagcagtttggaaagtttatcttcagaactggaacaaacaaaggagttttctaaacggacagaaagtattgcagtccaggctgagaaccttgtaaaggaagcttcagagataccgcttgggccccaaaataagcagctgcttcaacagcaggccaagtcaatcaaagaacaagtcaaaaaattagaagacacgcttgaagaagatattaaaaccatggaaatggtgaaaaccaagtgggatcattttggcagtaattttgagactctgtccgtctggataactgagaaagaaaaagaactcaatgccttggaaacttcgtcatctgccatggacatgcaaatcagccaaattaaggtcacaattcaggaaatagaaagtaagctcagcagcattgtaggattagaagaagaagcccagtcttttgctcagtttgttaccactggagaatctgctcgaattaaagccaagttgacacaaataagaagatacggggaagagcttcgagagcatgcacagtgtctggaaggaacaatcctgggacatttatctcagcagcaaaagtttgaagagaaccttagaaagatccagcaatctgtgtctgaatttgaagataaacttgctgttccaattaaaatatgttcttcagctacagaaacatacaaagttcttcaagaacatatggatctctgccaggccctggagtcactgagcagcgcgatcactgccttctcagccagtgccaggaaggttgtgaacagagattcctgtgttcaggaggctgcggctctacagcagcaatacgaggacatcctaaggagggcgaaggagagacagacggcgctggagaatctgctggcccactggcagaggctagagaaagaactatcatcctttttgacctggttagagcggggtgaagctaaagccagttccccagaaatggacatttctgcagacagagtcaaagtggaaggtgaacttcagttaatacaggcactgcaaaatgaagttgtatcccaggcctcattctatagcaaacttttgcaattgaaggaatcattgttctcagtagcctccaaagatgatgtgaaaatgatgaaactacatttggagcagttggatgagagatggagagatttaccacagatcattaacaaaaggattaattttcttcagtctgtggttgctgaacaccagcaatttgatgagctgctgctttccttttctgtctggattaaactgtttctcagtgaattacaaactacctctgagattagcataatggaccatcaagtagcccttactcggcataaggaccacgcagcagaagtagagagcaaaaagggcgaattgcagagtctgcagggtcacttagcaaagttgggttctctgggccgtgctgaggacctccacctcctgcagggaaaggctgaggactgcttccagctgtttgaggaggccagccaggttgtggagaggcggcagcttgccctgtcccatttggcagaattcctccagagccatgcctctctgtccggcattctccgccagctgaggcaaacagtggaagcaaccaacagtatgaataagaacgagtctgatttgatagaaaaggacctcaatgatgctcttcaaaatgctaaagcattagaatctgctgccgtcagtctggatggcattctttccaaagcccaataccatctgaaaatcgggagctctgagcaaaggacttcctgcagagccacggctgatcagctctgtggagaggtagagaggatccagaaccttctgggaaccaagcagagtgaggcagatgctctggcagtgttgaaaaaagcattccaagaccagaaagaggagcttctgaaaagcattgaggacattgaagaaaggactgacaaagagcgattgaaagaacctacccgccaagctcttcagcagaggttaagagtgtttaatcagctagaagatgaattgaattctcacgagcatgaactatgttggttgaaagacaaagccaagcaaattgcccagaaagatgtagcttttgcacctgaagttgacagggagataaaccgcttagaggtcacctgggatgataccaaaagactaattcatgaaaatcagggtcagtgctgtggacttattgacttaatgagagaatatcagaacctgaaatcagctgtatctaaagtcttagaaaatgccagcagtgtgattgtaaccagaactaccataaaagatcaggaggatcttaaatgggctttttccaagcatgaaactgccaagaacaaaatgaattacaaacagaaagacttggataactttaccagcaaaggaaaacacttgttatctgagctgaagaaaattcacagtagtgatttcagcttggtgaaaacagacatggagagcaccgtggacaaatggctggatgtatcagagaaacttgaagaaaacatggataggctgagagtaagcctgtccatttgggatgatgtactgtcaactagagatgagattgagggatggtcaaacaactgcgttccacagatggcagaaaacatcagcaacctggataaccacctcagagctgaagaactgcttaaagaatttgagtctgaagttaaaaacaaagcattgagattggaagaactgcattccaaagttaatgatctgaaagaattaactaaaaatctagaaacaccgccagaccttcagtttatagaagcagacttaatgcagaaactggagcatgccaaagaaataactgaagtagcaaaaggaaccctgaaggatttcacggctcaaagtacacaagtggagaagtttattaatgacataacaacatggttcacaaaagtggaagaatcgttgatgaactgtgcccaaaatgagacttgtgaagcattgaaaaaagtcaaggatatacaaaaagaacttcaaagtcaacaaagcaacatcagctctacccaagaaaatctcaatagcttgtgccgcaagtaccactcagctgagttggagagcctgggccgtgcaatgactggtctgataaagaaacatgaagccgtgagccagttgtgctccaaaacccaggccagcctgcaggaatctctggaaaaacacttcagtgagtctatgcaggaattccaagaatggtttttgggagcaaaggcagcagcaaaagaatcatcagatcgcaccggtgacagcaaagttctagaagcaaagctccatgatcttcagaacattttggactcagtcagtgatgggcagagcaaacttgatgcagtgactcaagaaggacaaactttgtatgcacatttgtctaaacaaattgtcagtagcattcaagaacaaatcacaaaggccaatgaagagtttcaagcatttctgaaacaatgccttaaagataagcaggctcttcaagactgtgcttcagaacttggaagctttgaagatcagcacagaaaactgaacttatggatccatgaaatggaagaaaggttcaatacggaaaacttgggagagagtaaacagcacattcctgagaagaaaaatgaagttcataaagttgaaatgtttttgggagaactgctggctgcaagagagtctcttgataagctttcccagagagggcagcttctgagtgaagaaggccacggtgctgggcaggagggccgcctgtgttcccagctcctcacaagccaccagaacctacttagaatgaccaaagagaaactccggagctgccaggtggcccttcaggagcacgaagccctggaggaagcactgcaaagcatgtggttctgggtgaaggccattcaggacagactggcctgtgcagagagcactcttgggagcaaagacaccctggagaaacggctgtcacaaatacaggatattctcctgatgaaaggtgaaggggaagttaagttgaatatggccattggcaagggggaacaggccttgagaagtagcaacaaagaaggtcagagggtgattcagactcagttagagacccttaaagaagtgtgggctgacatcatgagctcctccgtccacgctcaaagcactttagagtctgtgattagccaatggaatgactatgtagagaggaaaaaccagttggagcagtggatggaatcagtggatcaaaaaatagaacatcccttacaaccacagccaggtctgaaagagaagttcgtcctgcttgaccacctccagtccatcctgtctgaggcagaagatcacacgagagcccttcaccgtctaattgcgaagtccagggagctctacgaaaagacagaggatgagtctttcaaggacacagctcaagaggagctgaaaacacagtttaatgatataatgactgttgccaaggaaaaaatgaggaaagtggaagagattgtgaaagatcatctaatgtatttagatgcggtccacgagttcacagattggctccattcagcaaaggaagaacttcaccggtggtcagatatgtctggagattcatcagccacccagaaaaagttatcaaaaattaaggagctgatagattccagagagattggtgcaagccgtctcagcagagtggagtcgctggctcccgaagtgaaacagaacacaactgccagtgggtgtgagctcatgcacacggagatgcaggccctgcgtgccgactggaagcagtgggaagacagtgtattccaaacgcagagctgtttggagaacctggtcagccagatggccctttcggagcaggaattctcaggccaagtggctcaactggagcaggccctggaacagttcagtgcccttctgaaaacctgggctcagcagttaaccctcctggaaggcaagaacacggatgaggagatagtggaatgctggcacaaaggacaagagatactggatgctttgcaaaaagcagagcctagaacagaggatctcaagtctcagctgaatgaactttgtcgattttccagagacctgagtacctacagtggaaaagtttctggcttgattaaagagtataattgtctttgtttgcaagcatccaagggctgccagaataaagaacagattttacagcaaagatttcgaaaggccttcagggatttccagcagtggttggttaatgcaaaaatcactaccgccaagtgttttgatatacctcaaaatataagtgaagtttcaactagtcttcagaaaatacaggagtttttgtcagaaagtgaaaatggacagcacaagctaaacatgatgctgtctaaaggggaacttctgagtaccctgctgaccaaagagaaagcgaaagggatccaggccaaagttacagctgcaaaagaagattggaaaaattttcattcaaatctccaccaaaaagaatctgctctagagaatctaaagatccaaatgaaggactttgaagtaagtgctgagcctatccaggactggctgagtaaaactgagaagatggtccatgaaagcagcaatcgcctctatgatctgccagcaaagaggagggagcagcagaagctccagtctgtccttgaggaaatacactgctacgagcctcagctcaacaggctgaaagagaaagctcagcagctgtgggaaggacaagctgccagcaagagctttaggcacagagtgtcgcagctgtcttctcagtatctagcgctaagcaatttaacaaaggagaaagtgtcaagactggatagaatcgttgcagaacacaatcagttctctcttgggattaaagaattacaagactggatgacggatgcgattcacatgctggattcatactgccacccgacatccgacaaaagtgtgctggacagcaggacgctcaagctcgaggctctattatcagtcaaacaggaaaaagagattcagatgaaaatgatagtgaccaggggagaatctgtccttcagaatacttctccagaaggcattcccactattcagcagcagctgcagagtgtgaaggatatgtgggcatcccttttgtctgcagggattcgttgtaaaagccaactcgaaggagctctctccaagtggacaagttatcaggatggcgttcgacagttctccggttggatggatagtatggaagccaacctgaatgaatcagaaaggcagcatgcggagctgcgggataaaacaacgatgctcggaaaagccaagttattaaatgaagaagtgctgagttacagcagcttgctggagaccatcgaagtcaaaggggctggcatgacagaacactatgtcacccagctagaactccaggatctacaggaacgatacagagccatccaagagagggccaaggaagccgtaaccaagtctgaaaaacttgtccgcctgcaccaagagtatcagagagacctaaaggcatttgaagtttggttggggcaagaacaagaaaagctcgaccagtattcagttcttgaaggtgatgcccacactcatgagacaacattgcgtgatcttcaggagctacaggtacactgtgcagaggggcaggccctgttgaactcagtgctgcacaccagagaggatgtgatcccatcaggtatcccacaggcagaggaccgggctttagagtctctccggcaagactggcaggcttaccagcacaggctgtccgagactcgaactcagttcaataacgtggtgaacaaattgaggctaatggagcaaaagtttcagcaagtagatgaatggctcaaaacagcagaggagaaaaagtggcacgaagaagtgactgcatacagagatgaagttgaggaagtgggagctagagctcaggagatactggacgagagccacgtgaacagcagaatgggttgccaggccacccagctgacttccagataccaggccctgcttctccaagtgctggaacaaataaaattcctggaggaggagattcagagtttggaggaatcagaatcatccctcagttcctattctgattggtatggctctactcataaaaacttcaagaatgtggctaccaagattgacaaagtagatacagtaatgatggggaagaaattgaagacgttggaggttttgctcaaagacatggagaaaggtcacagtttgctgaaatcagcccgggagaaaggagagagggctgttaaatacttggaggaaggcgaggcagagaggttaagaaaggagattcatgatcacatggagcagttgaaggaactgaccagcactgtccggaaagaacacatgacgctggaaaaaggtcttcatttagcaaaggaattctcagataaatgcaaagcactgacacagtggatagcagaataccaggaaattctacatgttcctgaagaacccaaaatggaattatatgagaaaaaagctcagttatctaaatacaagtcacttcaacaaacggtgctgtcccatgaaccatcagtaaagtcagtgagagagaagggtgaagctcttttggaactggtgcaggacgtcactttaaaggacaaaatagatcaacttcaaagtgattaccaggacctgtgcagcataggaaaggcaatgatggaagaaattgctggttttgaagaccgtttgaacaatcttcaaatgaaaggtgatactttgattggccaatgtgcagaccacctgcaagcgaaacttaaacaaaacgtgcatgctcatctgcagggcacaaaggacagctactcagcgatctgcagcacagctcagaggatgtaccagagtttggaacacgaacttcagaagcacgtcagccgacaagacaccctgcagcagtgccaggcctggctttctgcagtccagccggatttagagccaagtcctcaaccacctcttagtagggcagaagccattaagcaggtcaaacacttcagagctttgcaagagcaggcaaggacctacctagatctcctttgctccatgtgtgacctgtcaaatgcttcggtgaaaaccacagcaaaagacattcaacaaacagagcaaacgattgaacaaaagcttgtccaggcccagaacttaactcagggctgggaagagatcaagcacctgaagtctgagctctggatttacctgcaagatgctgatcagcaactgcagaacatgaagaggaggcactctgagctggagctgaacattgcacagaacatggtttcacaagttaaggattttgttaagaaactacagagcaaacaggcatccgtgaacaccataatagaaaaggtgaataagttaacaaagaaggaggaatcgcctgaacacaaggaaataaatcatttaaatgatcagtggctcgatttgtgccgtcagtctaacaacctgtgcttgcaaagggaagaggatcttcagagaacaagagattaccatgactgtatgaatgttgttgaagtgttcctagaaaaatttactacagaatgggataacttggccagatctgatgcagagagtacagctgtccacctggaagctttgaaaaagttagcattggcattgcaggagagaaagtatgctattgaagatctgaaagatcaaaagcagaaaatgatagagcatctgaatttagatgacaaggagttagtcaaagaacagacgagtcatttagagcaacgttggtttcagcttgaggacctcattaaaaggaaaatccaagtgtcagtcaccaacttggaggagttaaatgtggtgcagtccagatttcaggagctaatggagtgggcagaagagcaacaacccaacatcgccgaggcccttaagcagagccctcctccagatatggctcagaaccttctcatggatcacctggccatctgcagtgaactggaggccaagcagatgctcctgaaatcgcttataaaggacgcagacagggtcatggcagatcttggtctcaatgagcgacaggtcatccagaaggctctctctgatgcacaaagccacgtgaattgtctcagtgacttagtgggccagcgaagaaagtacttaaacaaagccttgtccgagaaaacccagtttctcatggcagtgttccaggccaccagccaaattcagcaacatgagcgaaagataatgttccgtgaacacatctgtctgttaccagatgatgtgagcaaacaagtcaaaacatgtaagagtgcacaagccagcctcaagacttaccaaaatgaagtcactggactttgggcccagggtcgcgaactaatgaaggaagtcacagagcaggaaaagagtgaagtgctggggaagcttcaggaattgcagagtgtctatgacagtgttttacaaaagtgcagtcaccggttacaagaactagagaagaatttggtttctaggaagcattttaaggaagattttgataaagcttgccactggctaaaacaagcagatattgttacatttcctgaaatcaacctaatgaatgagagttctgagcttcatacacaactggctaaataccaaaacattcttgaacaatctccagaatatgaaaatcttctacttacgctgcagagaactgggcagaccatattaccatcgctgaatgaagtcgatcattcctacctcagtgaaaagctaaatgctttgcctcgacaatttaatgtaattgttgccttggctaaagacaagttctataaagtccaggaagcaattcttgctcggaaggaatatgcttccttgattgagttgacaacccagtctctgagtgaacttgaagcccaattcttgaggatgagcaaagttcccaccgacctggccgttgaggaggctctttctctgcaagatggttgcagagccattctggacgaggtggcgggccttggggaggcggtggatgaactgaaccagaaaaaagaaggttttcgcagcacaggtcagccttggcagccagacaagatgctgcaccttgtcaccttatatcacaggctgaagcgacaaacagaacagagggttagcttattagaagacaccaccagtgcttaccaagaacacgagaagatgtgccaacagctggagagacaactgaagtctgtaaaagaggagcagtccaaagtgaatgaggaaacgctgcctgcagaggagaagctcaaaatgtatcactccctggcaggaagtctccaggactcagggattgtactgaaacgagtaaccatacatcttgaagatcttgccccacaccttgaccccttggcttatgagaaagccaggcatcagatccagtcctggcaaggggagttaaaactgttgacttctgccattggtgagacggtgacagaatgtgagagccgaatggtgcagagtatagacttccagactgagatgagtcgctccctggactggctgaggagagtgaaggcagagctcagtgggccggtgtacctagacctcaacctgcaggacatccaagaggaaatcagaaaaatccaaattcatcaggaagaggtccagtccagcttgagaatcatgaatgcgctgagtcacaaggaaaaggagaagttcacaaaggccaaggagctgatttctgcggatttagaacacagcctcgctgagctctcagagctggatggagacatccaggaagccttacgcaccagacaggctaccttgactgaaatatatagccagtgtcaaaggtattatcaggtatttcaagcagccaatgactggcttgaggatgcccaagaattgttacagctggcaggcaatggcctagacgtggagagcgcagaggaaaatctcaaaagccacatggaatttttcagtacagaggatcagttccatagtaacctggaggagctccacagcctggtagccaccctggacccactcatcaagccaaccggcaaagaagacctagaacagaaagtggcttctctggaactcaggagccagaggatgagccgggactctggtgcccaagtggatctcttgcagagatgcacagctcaatggcacgattaccagaaagcaagggaagaggttattgaattgatgaatgatacagaaaagaaattgtctgagttttctttgttgaagacttcgtctagtcatgaagcggaagaaaaattgtcagaacacaaggctttagtgtcagtggttaactctttccatgagaaaattgtggcccttgaggaaaaagcttcacaactggagaaaaccggaaatgatgccagcaaagccaccctgagcaggtcaatgaccaccgtctggcagcgctggacacgccttcgagctgtggcccaggaccaggagaagatcctggaagatgcagtggatgagtggacgggctttaacaacaaggttaaaaaggccactgaaatgattgatcagctgcaagataagttacctggaagttcagcagagaaagcatcgaaagcagagctcttaactcttcttgaataccacgacacgttcgttctggagctggagcagcagcagtcggccttgggcatgctgcggcagcaaaccctgagcatgctccaggatggagccgccccaacccctggggaagagcctccgctcatgcaggaaatcaccgccatgcaagatcggtgcctgaacatgcaggagaaagtgaagactaatggaaagttggtgaagcaagagctgaaggaccgagaaatggtggagactcagatcaattctgtgaaatgttgggttcaggaaacgaaagaatatttagggaatccaacaatagaaatagatgctcaacttgaagaacttcagattctcctaacagaagccacaaatcaccgacagaacattgaaaaaatggcagaagaacagaaggagaagtacttaggtctttataccatattaccttctgaactctcccttcagttggctgaagtggcgttagatctaaagatccgagatcagatccaagacaaaataaaagaagttgagcagagcaaggccacgagccaggaactcagccggcaaattcagaagttagctaaagacctcacaactattctaactaagctgaaagcgaagacagataatgtagttcaagctaaaactgaccaaaaggtgctgggagaggaattagatggctgtaattcaaagttaatggaattagatgcagcagtacagaaattcttggaacagaatggccaactgggtaagccactggccaagaagataggaaaactgactgaacttcaccagcagaccattagacaagctgagaatcggctctccaagctcaatcaggcagcatcacatttagaagaatacaatgaaatgcttgaattaattttgaagtggattgaaaaagctaaagtcttggctcatggaactattgcatggaattctgcaagccagcttcgggaacaatatattttgcatcagaccctgctagaagaatccaaagaaattgacagtgagctggaagcaatgactgagaaattacagtacctcactagcgtgtactgtacagaaaaaatgtctcagcaagtggcagaactgggacgggagactgaggagttgcgacagatgatcaaaattcgtttgcagaacctccaagatgcagctaaggatatgaaaaaatttgaagcagagttgaaaaagttacaagctgccttggagcaagcccaggcaacactgacttctccagaagttggacgtctcagtctcaaggagcagctctctcatcggcagcatttgttgtctgagatggagtcactgaagccgaaggtgcaagcagtgcagctctgccagagtgccctccggatccccgaggatgtggttgccagcttacctctctgtcatgctgctctgcggctgcaggaagaggccagccggctgcagcacaccgccatccagcagtgtaacatcatgcaggcagctgtggtacaatatgaacaatatgagcaagaaatgaaacatctccagcaactgatagaaggagctcacagagagattgaggataaacctgttgccaccagtaacatacaggagctgcaggctcagatttctcggcatgaggagctggcgcagaaaattaagggctaccaggagcagatcgcttctttgaattccaagtgcaagatgctgacgatgaaagccaagcacgccaccatgctgctgacggtgaccgaggtcgaggggctggcggaagggacagaggacctggatggggagctcctccccacgccttcggcccacccctctgtggtcatgatgactgcaggtcgctgtcacactttgctgtcaccggtcactgaggagtctggggaggagggaaccaacagtgagatttcctctccacctgcctgtcgctccccttcacctgtggctaatacagatgcttctgttaaccaggacattgcatattaccaagccttgtctgctgagaggttgcagacagatgctgcaaaaattcaccccagcacatccgcatcccaggagttctatgaaccgggattggagccatccgctactgccaaactgggtgatttgcagcgttcttgggaaaccttaaagaatgtgatcagtgagaagcagcgcacactctatgaagctttggaacgccagcagaagtaccaggactccctccagtccatctctacgaagatggaggccattgagctgaaactcagtgagagcccagagcctggcaggagtccagaaagccagatggctgaacatcaggcattgatggatgagattctcatgctccaggatgaaatcaatgagctccagtcctctctcgcagaggagctggtatccgagtcttgtgaggccgaccctgcggagcagctggccttgcagtccacgctcactgtcttagccgagcgaatgtccaccatcaggatgaaagcctcggggaaacggcagcttttggaggagaagttgaatgatcagctggaggaacaaaggcaggaacaggccctgcagaggtatcgctgtgaagccgatgagctggacagctggctcttgagtaccaaggccactctggacactgcgctgagtccacccaaggagcccatggacatggaggcccagcttatggactgccagaatatgctggtggaaatagagcagaaggtggtggctttatcagaactgtcagtccacaatgagaacctgctgctggagggcaaagctcacaccaaggacgaggccgagcagctggctggaaagctgagaaggctcaaggggagcctgctggagctgcagagagccctgcatgataagcagctcaacatgcagggaacagcacaggagaaggaggagagcgatgttgacctaacagccacgcagagccccggcgtccaggaatggctggcccaagctcgcaccacatggacccagcagcggcagagcagtctccagcaacaaaaagagttagaacaggaattagccgagcagaagagtctccttcgctcagtagccagtcgtggagaggagattctaattcaacattcggcggcagagacctctggtgatgctggcgaaaaacctgatgtgttatcccaggagttggggatggaaggggagaaatcatccgctgaagaccagatgagaatgaaatgggaaagcctacatcaagaatttagtaccaagcagaaactactacagaatgttctggaacaggaacaagagcaagtgctttatagcaggccaaatcgactcttgtctggtgtgccactgtacaaaggggacgtgccaacccaagataaatctgcagttacatctttgctggatggactgaaccaagccttcgaggaggtttcatcccagagtggaggggcaaagaggcagagtatacacttggagcagaagttgtatgatggagtctcagccacctctacttggttggatgacgttgaagaacgtttatttgttgccacagcacttttaccagaagaaacagagacttgtctcttcaaccaagagattcttgccaaagacattaaggaaatgtctgaagaaatggataagaacaaaaacttgttttcccaagcttttccagagaatggtgataatcgagatgttattgaagatactttgggttgtcttttgggcaggttatccttgctagactcagtagtgaatcaacgatgtcatcagatgaaagaaagacttcagcaaatactaaatttccagaatgatctgaaagtgctgtttacatcactggctgacaacaaatacatcattctgcaaaaactggcaaatgtgtttgaacagcccgtagcagaacaaatagaggcaatacaacaggctgaagatggactcaaagaatttgatgcaggaatcattgaattaaagaggcgtggtgacaagctacaggtcgagcagccgtccatgcaagaactctccaagctccaggacatgtatgatgagctgatgatgatcattggctcccggaggagtggtctgaatcagaaccttacactcaagagtcagtatgagagggccctacaagatctggctgacctgctagaaactggtcaggagaagatggcaggagaccagaaaatcatcgtgtcttccaaagaggaaatccagcaactacttgacaaacataaggaatactttcagggcctggaatctcatatgatcttgactgaaacactcttcagaaagataatcagctttgcagtccaaaaggaaacccagttccatacagagctgatggctcaggcttctgctgtactgaaacgggctcacaagaggggtgtggagctggagtacattctagagacgtggtcccatctggatgaggaccagcaggagctcagcagacagctggaggtggtggaaagcagcatcccaagcgtgggtctggtggaggagaacgaggacaggcttattgaccgcataacactctaccagcatttaaaatctagccttaatgaataccagcccaaattatatcaagtattagatgatgggaaacgacttctgatatccatcagctgctcagatctagaaagccaactaaatcaacttggagagtgctggctaagtaacaccaataaaatgtctaaggaacttcacagactggaaacaatattgaaacactggaccagatatcaaagtgaatctgcagatctaattcactggttacaatctgcaaaagaccggctagaattttggactcagcaatctgtgacagtcccacaagagctggaaatggtccgtgatcatctaaatgctttcctggagttttctaaagaagtggatgcccaatcttccctgaaatcatctgttctgagtactggaaatcagctccttcgactaaaaaaggtggacacagccacgctgcgctctgagctgtcgcgcattgatagccagtggactgacctgctaaccaatatcccagccgtccaggagaagctccaccagctccagatggataaactgccttcccgccatgccatttctgaagtcatgagttggatttctctaatggaaaatgttattcagaaggatgaagataatattaaaaattccataggttacaaggcaattcatgaataccttcagaaatataagggttttaagatagacattaactgtaaacagctgacagtggattttgtgaaccagtccgtgctacaaatcagcagtcaggatgtggaaagtaagcgtagtgataagactgattttgctgagcaacttggagcaatgaataaaagttggcaaattctgcaaggtctagtaactgagaagatccagctgttggaaggcttattggaatcttggtcagaatatgaaaataatgtacaatgtctgaaaacatggtttgaaacccaggaaaagagactaaaacaacagcatcgaattggagatcaggcttctgttcaaaatgcactgaaagactgtcaggatctggaagatttgattaaagcaaaagaaaaagaagtagagaaaattgagcagaatggacttgctttgattcagaacaagaaagaagacgtctctagcattgtcatgagcacactgcgagagctcggccaaacctgggcaaatttagatcacatggttggacaattaaagatactgctgaaatcagtgcttgaccaatggagtagtcacaaagtggcctttgacaagataaacagttacctcatggaggccagatactctctttcccgattccgtctgctgactggctccttagaagctgtgcaagttcaggtggacaatcttcagaatctccaagatgatctggaaaaacaggaaaggagcttacagaaatttggctctatcaccaaccaattattaaaagagtgtcacccacccgtgacagaaactcttaccaatacactgaaagaagtcaacatgagatggaataacttgctggaagagattgctgagcagctacagtccagcaaggccctacttcagctttggcaaagatacaaggactactccaaacagtgtgcttcgacagttcagcagcaggaggatcgaaccaatgagctgttgaaggcagccacaaacaaggacattgccgatgatgaggttgccacatggattcaagattgcaacgacctcctcaaaggactgggcacagttaaagattccctcttttttctccatgagctgggagagcaactgaagcaacaagtggatgcttccgcagcatcagctattcaatcggatcaactctctttgagtcaacacttgtgtgccctggagcaagctctctgcaaacagcagacttcattacaggctggagttcttgattatgaaacctttgccaagagtttagaagctttggaggcctggatagtggaagctgaagaaatactacaagggcaggaccctagccactcatctgacctctccacaatccaggaaaggatggaagaacttaagggacagatgttaaaattcagcagcatggctccagatttagaccgtctaaatgagcttggatataggttacccttgaatgataaggaaatcaaaagaatgcagaatctgaaccgccattggtctctgatctcctctcagactacagaaagattcagcaagttgcagtcatttttgctacaacatcagactttcttggaaaaatgtgaaacatggatggaattcctagttcagacagaacaaaagttagcagtagagatttcaggaaattatcagcaccttttggaacagcagagagcacacgagttgtttcaagccgagatgttcagtcgtcagcagattttgcactcaatcattattgatgggcaacgtcttctagaacaaggtcaagttgatgacagggatgaattcaacctgaaattgacactcctcagtaatcaatggcagggagtgattcgcagggcccagcagaggcgggggatcattgacagccagattcgccagtggcagcgctatagggagatggcagaaaagcttcgtaaatggttggttgaagtgtcctacctccccatgagtggtctcggaagtgttcctataccactgcaacaagcaaggaccctctttgatgaagtgcagttcaaagaaaaagtgtttctgcggcaacaaggcagctacatcctgactgtggaggctggcaagcaactccttctctcggcggacagtggcgctgaggccgccttgcaggccgaactcgctgaaatccaagagaaatggaaatcagccagcatgcggctggaagaacagaagaaaaaactagccttcttgttgaaagactgggaaaaatgtgagaaaggaatagcagattccctggagaaactacgaactttcaaaaagaagctttcgcagtctctcccggatcaccatgaagagctccatgcagaacaaatgcgttgcaaggaattagaaaatgcagttgggagctggacagatgacttgacccagttgagcctgctgaaggacaccctctctgcctatatcagtgctgatgatatctccattcttaatgaacgcgtagagcttctgcaaaggcagtgggaagaactatgccaccagctctccttaaggcggcagcaaataggtgaaagattgaatgaatgggcagtcttcagtgaaaagaacaaggaactctgtgagtggttgactcaaatggaaagcaaagtttctcagaatggagacattctcattgaagaaatgatagagaagctcaagaaggattatcaagaggaaattgctattgctcaagagaacaaaatacagctccaacaaatgggagaacgacttgctaaagccagccatgaaagcaaagcatctgagattgaatacaagctgggaaaggtcaacgaccggtggcagcatctcctggacctcattgcagccagggtgaagaagctgaaggagaccctggtagccgtgcagcagcttgataagaacatgagcagcctgaggacctggctcgctcacatcgagtcagagctggccaagccaatagtctacgattcctgtaactcggaagaaatacagagaaagcttaatgagcagcaggagcttcagagagacatagagaagcacagtacaggtgttgcatctgtcctcaacctgtgtgaagtcctgctgcacgactgtgacgcctgtgccactgatgccgagtgtgactctatacagcaggctacgagaaacctggaccggcggtggagaaacatttgtgctatgtccatggaaaggaggctgaaaatcgaagagacgtggcgattgtggcagaaatttctggatgactattcacgttttgaagattggctgaagtcttcagaaaggacagctgcttttcccagctcttctggggtgatctatacagttgccaaggaagaactaaagaaatttgaggctttccagcgacaggtccacgagtgcctgacgcagctggaactgatcaacaagcagtaccgccgcctggccagggagaaccgcactgattcagcatgtagcctcaaacagatggttcacgaaggcaaccagagatgggacaacctgcaaaagcgtgtcacctccatcttgcgcagactcaagcattttattggccagcgtgaggagtttgagactgcgcgggacagcattctggtctggctcacagagatggatctgcagctcactaatattgaacatttttctgagtgtgatgttcaagctaaaataaagcaactcaaggccttccagcaggaaatttcactgaaccacaataagattgagcagataattgcccaaggagaacagctgatagaaaagagtgagcccttggatgcagcgatcatcgaggaggaactagatgagctccgacggtactgccaggaggtcttcgggcgtgtggaaagataccataagaaactgatccgcctgcctctcccagacgatgagcacgacctctcagacagggagctggagctggaagactctgcagctctgtcggacctgcactggcacgaccgctctgcagacagcctgctttctccacagccttcctccaatctctccctctcgctcgctcagcccctccggagcgagcggtcaggacgagacaccccggctagtgtggactccatccccctggagtgggatcacgactatgacctcagtcgggacctggagtctgcaatgtccagagctctgccctctgaggatgaagaaggtcaggatgacaaagatttctacctccggggagctgttggcttatcagatgtaatgatccccgaaagccctgaggcctatgtaaaactcacagaaaatgcaatcaaaaatacctccggggaccacagtgccctagagtcacagatccgacaactgggcaaagccctggatgatagccgttttcagatacagcaaaccgaaaatatcattcgcagcaaaactcccacggggccggagctagacaccagctacaaaggctacatgaaactgctgggcgaatgcagtagcagtatagactccgtgaagagactggagcacaaactgaaggaggaagaggagagccttcctggctttgttaacctgcatagtaccgaaacccaaacggctggtgtgattgaccgatgggagcttctccaggcccaggcattgagcaaggagttgaggatgaagcagaacctccagaagtggcagcagtttaactcagacttgaacagcatctgggcctggctgggggacacggaggaggagttggaacagctccagcgtctggaactcagcactgacatccagaccatcgagctccagatcaaaaagctcaaggagctccagaaagctgtggaccaccgcaaagccatcatcctctccatcaatctctgcagccctgagttcacccaggctgacagcaaggagagccgggacctgcaggatcgcttgtcgcagatgaatgggcgctgggaccgagtgtgctctctgctggaggagtggcggggcctgctgcaggatgccctgatgcagtgccagggtttccatgaaatgagccatggtttgcttcttatgctggagaacattgacagaaggaaaaatgaaattgtccctattgattctaaccttgatgcagagatacttcaggaccatcacaaacagcttatgcaaataaagcatgagctgttggaatcccaactcagagtagcctctttgcaagacatgtcttgccaactactggtgaatgctgaaggaacagactgtttagaagccaaagaaaaagtccatgttattggaaatcggctcaaacttctcttgaaggaggtcagtcgtcatatcaaggaactggagaagttattagacgtgtcaagtagtcagcaggatttgtcttcctggtcttctgctgatgaactggacacctcagggtctgtgagtcccacatcaggaaggagcaccccaaacagacagaaaacgccacgaggcaagtgtagtctctcacagcctggaccctctgtcagcagtccacatagcaggtccacaaaaggtggctccgattcctccctttctgagccagggccaggtcggtccggccgcggcttcctgttcagagtcctccgagcagctcttccccttcagcttctcctgctcctcctcatcgggcttgcctgccttgtaccaatgtcagaggaagactacagctgtgccctctccaacaactttgcccggtcattccaccccatgctcagatacacgaatggccctcctccactctgaactaagcagatgccatctgcagaagtgctggtagcataaggaggatcgggtcataagcaatcccaaactaccaacaagaggaccttgatcttggcgaaagccctcggtgtggcagctttagccctcctccagatcacatgtgtgcaaattatggcttcagaggtggaagataaacagtgacgggggaacaaacagacaacaagaaggtttggaagaaatctggtttgagactctgaaccttagcactaaggagattgagtaaggacctccaaagttccccggactcatgaattctgggcccttggcccattctgtgcacagccaaggacttcagtagaccatctgggcagctttcccatggtgctgctccaaccatcagataaatgaccctcccaagcaccatgtcagtgtcgtacaatctaccaaccaaccagtgctgaagagattttagaaccttgtaacatacaatttttaagagcttatatggcagcttcctttttaccttgttttcctttggggcatgatgttttaacctttgctttagaagcacaagctgtaaatctaaaaggcacttttttttagaggtataaagaaaaactagatgtaataaataagatcatggaaggctttatgtgaaaaaagttgaatgttatagtaaaaaaaaaaagatatttatgtatgtacagtttgctaaagccaagttttgtttgtattgatttctttgcatttattatagatattataaaata

SEQ ID NO: 29628 - DNA, 27601 bp, Homo sapiens
  source 1..27601: mol_type = unassigned DNA
cccgggcagtggaaaccgtgggcaaaagttagctggcaggacagcgcagctcctccaggcagcggaggcagcgcgtcccggctctcagggacatttccttcccacctcgacccccgggaggtggtcccggtataaaggctcgctgagcgggtgggtcacagcacagctttgcagctgcggagaaacgcccaaggccgtgcatctccaggagggcggctgggctcccgcagtcctgcagaccgcgcccgatcccggcgacagggcgggcggacagccgcgcatccccggggtcccgccgagcctgggcgcagagagccgggaggaagcgttcgctcgcttcgccttgctgctgggaaactgaacgaggccgagagagaaggttcttgagttcatgtaagaggacagtcttaaaacggaagaagaaaaagaagcagttcagtctttgggagagctgcctccttgttgagtgctgcaaaggcctggaattcatttatgacagaatagatctagaaaagtccaagcatgttttctagagtggtgtagccctgtgctgcctccagtgaagagtctcttggtgttggcttcgtgcttccggagggaccatggcaacctccagaggggcctcccggtgtcctcgggatatcgccaatgtgatgcagaggctgcaagatgagcaagagatagtacaaaaacgaactttcacaaaatggatcaactctcatctggccaagcggaaacctccaatggtggtggacgatctttttgaagacatgaaagatggtgttaaactgcttgcccttctggaggtcctgtctgggcagaaactgccttgtgaacaaggacgccggatgaagcgaatccatgctgtggctaacattggcacggcactcaagttcctcgaaggaagaaagtccatgcacagaggatcaccgattaaattagtcaacattaactccaccgatatagctgatggccgaccctcaatagttcttggattgatgtggaccattattctatatttccagattgaagagttgaccagcaacctgccccagctccagtctttgtccagcagcgcatcctccgtggacagcatagttagctctgagactcccagcccaccaagtaaacggaaggtgaccaccaagatccaaggaaatgctaagaaggctttattaaagtgggttcagtacacagctggcaagcagactggaatagaagtaaaagattttgggaagagttggagaagcggggttgcctttcattcagttattcatgccattcgaccggaattggtggacttggagacagtgaaaggcagatccaaccgagaaaatttggaggatgctttcactatcgccgaaacagaactggggatcccaagactgctagatcctgaagacgttgatgtggataaaccagatgagaaatctattatgacctatgtagcccagtttctgaaacattatcctgacatccacaatgcaagcactgatgggcaagaggatgatgaaatacttccaggtttcccatcttttgcaaattctgtacaaaattttaagagagaagacagagtaatttttaaggaaatgaaagtttggatagaacaatttgagagagatttgacaagagcacagatggtggaatcaaatttacaggataaatatcagtcatttaagcacttcagagttcaatatgaaatgaagaggaaacagattgaacatttaatacaaccattacacagagacggtaaattgtcacttgaccaagcattggtaaaacaatcttgggatagagtgacctccaggctctttgactggcatatacagcttgataaatctcttcctgcacctctgggcaccataggtgcctggctgtacagagcggaggtggccctgagagaggaaataaccgttcaacaggtccacgaggaaacagcaaacacgatacaacggaaacttgagcaacataaggatctgcttcaaaacacggatgcccacaaaagagcattccatgaaatctaccggaccaggtctgttaacgggattccagtgccacctgatcaattagaggacatggccgagaggtttcattttgtttcctccacatcagagctacacctaatgaaaatggaatttttagaattaaagtaccgtctgctctcactgctggttcttgcagagtcaaagctgaagtcttggatcattaagtacgggaggagagagtcagtggagcagcttctacaaaactacgtgtcttttatagaaaatagcaagttctttgaacaatatgaggtgacataccagatcttgaaacagacagctgagatgtatgtcaaagcagatggttcagtggaagaagctgagaatgtgatgaaattcatgaatgaaaccaccgctcagtggaggaatctctcagtagaagtgaggagtgtgaggagcatgctggaagaagtgatctctaactgggatcgctatggcaatacagtggctagtctgcaagcctggctagaggatgctgaaaaaatgctcaatcaatcagaaaatgccaaaaaggatttttttcgaaatttacctcattggattcagcagcatactgccatgaacgatgctggcaattttctaattgaaacctgtgatgagatggtttcccgtgacctgaagcagcaattactgttgctaaatgggcggtggagggagttgtttatggaagtcaagcaatatgctcaagctgatgagatggacagaatgaagaaggaatacacagactgtgttgttaccctgtctgcttttgcaacggaagcccataagaaactttctgaacccttagaagtctcttttatgaatgtcaagctattaattcaagacttggaggatattgagcagagggtgcctgtgatggatgcccaatacaagataattacaaagacagcacacctcattaccaaagaaagcccccaagaagaaggaaaagaaatgtttgcgaccatgtcaaagctcaaagagcagctaaccaaggtcaaagaatgttactccccactcctttatgagtctcagcagctgttgattccgttggaggaattagaaaagcagatgacgtccttttatgactcacttgggaaaatcaatgaaattatcacagttcttgagcgtgaggcacaatcgagtgccctttttaaacaaaaacatcaggaactgttagcttgtcaagaaaactgtaagaaaaccttgacacttattgagaaaggcagtcaaagtgttcaaaagtttgtgaccttgagcaacgtgttaaagcattttgatcagacgaggctacaaagacagattgcagatattcatgttgcttttcagagtatggtaaagaaaactggagattggaagaagcatgtggaaaccaacagtcgcttgatgaagaagtttgaggagtctcgagcagagttggagaaggtactgcggattgctcaggagggcctggaggaaaagggggatccagaggagctcctgcggagacacactgagtttttcagtcagctggatcagagggtgctcaatgctttcctgaaagcttgtgatgaactcaccgacatccttccagagcaggagcagcaggggctgcaggaagctgttcgaaagctccacaaacaatggaaggatcttcaaggagaagccccttatcatttgcttcatctgaagattgatgtggagaagaataggttcttagcctctgtagaagaatgcagaactgagctggatcgagagaccaagctgatgccccaggaaggcagtgaaaagataattaaagagcacagggttttcttcagtgacaaaggtcctcatcatctctgtgagaaaaggttacagctcatcgaggaactctgtgtgaaactcccagtgcgggacccagtaagggacacacctggaacctgtcacgtgactctcaaagagctcagagctgccattgacagcacctacaggaagctcatggaagacccagacaagtggaaggactacactagcagattctctgagttctcatcttggatatctacaaatgagacacaattaaaggggatcaagggtgaggccatcgatactgccaaccacggagaggttaaacgtgccgttgaagagatcagaaatggtgttaccaaaaggggtgagaccctcagctggctgaaatccaggctgaaagttttgacagaagtttcttctgagaatgaagcccaaaagcagggagatgagctggcaaaattatccagctctttcaaggctcttgtgacgctgctgtcagaggttgaaaagatgctaagcaattttggggactgtgtccagtacaaagaaatagtcaaaaattctctcgaagaattaatttctggctctaaagaagtccaggaacaagctgagaagatcttggatactgaaaatctgtttgaagcacagcagttacttcttcatcaccagcaaaagacaaagcggatctcagcaaagaagagagatgtgcagcagcagatcgcgcaggcgcagcagggagaaggggggctgcctgaccgaggccacgaggagctgcggaagctggagagcacactggatggcctggagcgcagccgggagaggcaggaacgccgcatccaggtcacattaagaaaatgggagcgatttgaaacaaacaaagaaacagtagtaagatacctttttcaaacaggttccagtcatgaacgcttcttgagttttagcagtttggaaagtttatcttcagaactggaacaaacaaaggagttttctaaacggacagaaagtattgcagtccaggctgagaaccttgtaaaggaagcttcagagataccgcttgggccccaaaataagcagctgcttcaacagcaggccaagtcaatcaaagaacaagtcaaaaaattagaagacacgcttgaagaagatattaaaaccatggaaatggtgaaaaccaagtgggatcattttggcagtaattttgagactctgtccgtctggataactgagaaagaaaaagaactcaatgccttggaaacttcgtcatctgccatggacatgcaaatcagccaaattaaggtcacaattcaggaaatagaaagtaagctcagcagcattgtaggattagaagaagaagcccagtcttttgctcagtttgttaccactggagaatctgctcgaattaaagccaagttgacacaaataagaagatacggggaagagcttcgagagcatgcacagtgtctggaaggaacaatcctgggacatttatctcagcagcaaaagtttgaagagaaccttagaaagatccagcaatctgtgtctgaatttgaagataaacttgctgttccaattaaaatatgttcttcagctacagaaacatacaaagttcttcaagaacatatggatctctgccaggccctggagtcactgagcagcgcgatcactgccttctcagccagtgccaggaaggttgtgaacagagattcctgtgttcaggaggctgcggctctacagcagcaatacgaggacatcctaaggagggcgaaggagagacagacggcgctggagaatctgctggcccactggcagaggctagagaaagaactatcatcctttttgacctggttagagcggggtgaagctaaagccagttccccagaaatggacatttctgcagacagagtcaaagtggaaggtgaacttcagttaatacaggcaagttcaaggaagtttgtatcccaggcctcattctatagcaaacttttgcaattgaaggaatcattgttctcagtagcctccaaagatgatgtgaaaatgatgaaactacatttggagcagttggatgagagatggagagatttaccacagatcattaacaaaaggattaattttcttcagtctgtggttgctgaacaccagcaatttgatgagctgctgctttccttttctgtctggattaaactgtttctcagtgaattacaaactacctctgagattagcataatggaccatcaagtagcccttactcggcataaggaccacgcagcagaagtagagagcaaaaagggcgaattgcagagtctgcagggtcacttagcaaagttgggttctctgggccgtgctgaggacctccacctcctgcagggaaaggctgaggactgcttccagctgtttgaggaggccagccaggttgtggagaggcggcagcttgccctgtcccatttggcagaattcctccagagccatgcctctctgtccggcattctccgccagctgaggcaaacagtggaagcaaccaacagtatgaataagaacgagtctgatttgatagaaaaggacctcaatgatgctcttcaaaatgctaaagcattagaatctgctgccgtcagtctggatggcattctttccaaagcccaataccatctgaaaatcgggagctctgagcaaaggacttcctgcagagccacggctgatcagctctgtggagaggtagagaggatccagaaccttctgggaaccaagcagagtgaggcagatgctctggcagtgttgaaaaaagcattccaagaccagaaagaggagcttctgaaaagcattgaggacattgaagaaaggactgacaaagagcgattgaaagaacctacccgccaagctcttcagcagaggttaagagtgtttaatcagctagaagatgaattgaattctcacgagcatgaactatgttggttgaaagacaaagccaagcaaattgcccagaaagatgtagcttttgcacctgaagttgacagggagataaaccgcttagaggtcacctgggatgataccaaaagactaattcatgaaaatcagggtcagtgctgtggacttattgacttaatgagagaatatcagaacctgaaatcagctgtatctaaagtcttagaaaatgccagcagtgtgattgtaaccagaactaccataaaagatcaggaggatcttaaatgggctttttccaagcatgaaactgccaagaacaaaatgaattacaaacagaaagacttggataactttaccagcaaaggaaaacacttgttatctgagctgaagaaaattcacagtagtgatttcagcttggtgaaaacagacatggagagcaccgtggacaaatggctggatgtatcagagaaacttgaagaaaacatggataggctgagagtaagcctgtccatttgggatgatgtactgtcaactagagatgagattgagggatggtcaaacaactgcgttccacagatggcagaaaacatcagcaacctggataaccacctcagagctgaagaactgcttaaagaatttgagtctgaagttaaaaacaaagcattgagattggaagaactgcattccaaagttaatgatctgaaagaattaactaaaaatctagaaacaccgccagaccttcagtttatagaagcagacttaatgcagaaactggagcatgccaaagaaataactgaagtagcaaaaggaaccctgaaggatttcacggctcaaagtacacaagtggagaagtttattaatgacataacaacatggttcacaaaagtggaagaatcgttgatgaactgtgcccaaaatgagacttgtgaagcattgaaaaaagtcaaggatatacaaaaagaacttcaaagtcaacaaagcaacatcagctctacccaagaaaatctcaatagcttgtgccgcaagtaccactcagctgagttggagagcctgggccgtgcaatgactggtctgataaagaaacatgaagccgtgagccagttgtgctccaaaacccaggccagcctgcaggaatctctggaaaaacacttcagtgagtctatgcaggaattccaagaatggtttttgggagcaaaggcagcagcaaaagaatcatcagatcgcaccggtgacagcaaagttctagaagcaaagctccatgatcttcagaacattttggactcagtcagtgatgggcagagcaaacttgatgcagtgactcaagaaggacaaactttgtatgcacatttgtctaaacaaattgtcagtagcattcaagaacaaatcacaaaggccaatgaagagtttcaagcatttctgaaacaatgccttaaagataagcaggctcttcaagactgtgcttcagaacttggaagctttgaagatcagcacagaaaactgaacttatggatccatgaaatggaagaaaggttcaatacggaaaacttgggagagagtaaacagcacattcctgagaagaaaaatgaagttcataaagttgaaatgtttttgggagaactgctggctgcaagagagtctcttgataagctttcccagagagggcagcttctgagtgaagaaggccacggtgctgggcaggagggccgcctgtgttcccagctcctcacaagccaccagaacctacttagaatgaccaaagagaaactccggagctgccaggtggcccttcaggagcacgaagccctggaggaagcactgcaaagcatgtggttctgggtgaaggccattcaggacagactggcctgtgcagagagcactcttgggagcaaagacaccctggagaaacggctgtcacaaatacaggatattctcctgatgaaaggtgaaggggaagttaagttgaatatggccattggcaagggggaacaggccttgagaagtagcaacaaagaaggtcagagggtgattcagactcagttagagacccttaaagaagtgtgggctgacatcatgagctcctccgtccacgctcaaagcactttagagtctgtgattagccaatggaatgactatgtagagaggaaaaaccagttggagcagtggatggaatcagtggatcaaaaaatagaacatcccttacaaccacagccaggtctgaaagagaagttcgtcctgcttgaccacctccagtccatcctgtctgaggcagaagatcacacgagagcccttcaccgtctaattgcgaagtccagggagctctacgaaaagacagaggatgagtctttcaaggacacagctcaagaggagctgaaaacacagtttaatgatataatgactgttgccaaggaaaaaatgaggaaagtggaagagattgtgaaagatcatctaatgtatttagatgcggtccacgagttcacagattggctccattcagcaaaggaagaacttcaccggtggtcagatatgtctggagattcatcagccacccagaaaaagttatcaaaaattaaggagctgatagattccagagagattggtgcaagccgtctcagcagagtggagtcgctggctcccgaagtgaaacagaacacaactgccagtgggtgtgagctcatgcacacggagatgcaggccctgcgtgccgactggaagcagtgggaagacagtgtattccaaacgcagagctgtttggagaacctggtcagccagatggccctttcggagcaggaattctcaggccaagtggctcaactggagcaggccctggaacagttcagtgcccttctgaaaacctgggctcagcagttaaccctcctggaaggcaagaacacggatgaggagatagtggaatgctggcacaaaggacaagagatactggatgctttgcaaaaagcagagcctagaacagaggatctcaagtctcagctgaatgaactttgtcgattttccagagacctgagtacctacagtggaaaagtttctggcttgattaaagagtataattgtctttgtttgcaagcatccaagggctgccagaataaagaacagattttacagcaaagatttcgaaaggccttcagggatttccagcagtggttggttaatgcaaaaatcactaccgccaagtgttttgatatacctcaaaatataagtgaagtttcaactagtcttcagaaaatacaggagtttttgtcagaaagtgaaaatggacagcacaagctaaacatgatgctgtctaaaggggaacttctgagtaccctgctgaccaaagagaaagcgaaagggatccaggccaaagttacagctgcaaaagaagattggaaaaattttcattcaaatctccaccaaaaagaatctgctctagagaatctaaagatccaaatgaaggactttgaagtaagtgctgagcctatccaggactggctgagtaaaactgagaagatggtccatgaaagcagcaatcgcctctatgatctgccagcaaagaggagggagcagcagaagctccagtctgtccttgaggaaatacactgctacgagcctcagctcaacaggctgaaagagaaagctcagcagctgtgggaaggacaagctgccagcaagagctttaggcacagagtgtcgcagctgtcttctcagtatctagcgctaagcaatttaacaaaggagaaagtgtcaagactggatagaatcgttgcagaacacaatcagttctctcttgggattaaagaattacaagactggatgacggatgcgattcacatgctggattcatactgccacccgacatccgacaaaagtgtgctggacagcaggacgctcaagctcgaggctctattatcagtcaaacaggaaaaagagattcagatgaaaatgatagtgaccaggggagaatctgtccttcagaatacttctccagaaggcattcccactattcagcagcagctgcagagtgtgaaggatatgtgggcatcccttttgtctgcagggattcgttgtaaaagccaactcgaaggagctctctccaagtggacaagttatcaggatggcgttcgacagttctccggttggatggatagtatggaagccaacctgaatgaatcagaaaggcagcatgcggagctgcgggataaaacaacgatgctcggaaaagccaagttattaaatgaagaagtgctgagttacagcagcttgctggagaccatcgaagtcaaaggggctggcatgacagaacactatgtcacccagctagaactccaggatctacaggaacgatacagagccatccaagagagggccaaggaagccgtaaccaagtctgaaaaacttgtccgcctgcaccaagagtatcagagagacctaaaggcatttgaagtttggttggggcaagaacaagaaaagctcgaccagtattcagttcttgaaggtgatgcccacactcatgagacaacattgcgtgatcttcaggagctacaggtacactgtgcagaggggcaggccctgttgaactcagtgctgcacaccagagaggatgtgatcccatcaggtatcccacaggcagaggaccgggctttagagtctctccggcaagactggcaggcttaccagcacaggctgtccgagactcgaactcagttcaataacgtggtgaacaaattgaggctaatggagcaaaagtttcagcaagtagatgaatggctcaaaacagcagaggagaaaaagtggcacgaagaagtgactgcatacagagatgaagttgaggaagtgggagctagagctcaggagatactggacgagagccacgtgaacagcagaatgggttgccaggccacccagctgacttccagataccaggccctgcttctccaagtgctggaacaaataaaattcctggaggaggagattcagagtttggaggaatcagaatcatccctcagttcctattctgattggtatggctctactcataaaaacttcaagaatgtggctaccaagattgacaaagtagatacagtaatgatggggaagaaattgaagacgttggaggttttgctcaaagacatggagaaaggtcacagtttgctgaaatcagcccgggagaaaggagagagggctgttaaatacttggaggaaggcgaggcagagaggttaagaaaggagattcatgatcacatggagcagttgaaggaactgaccagcactgtccggaaagaacacatgacgctggaaaaaggtcttcatttagcaaaggaattctcagataaatgcaaagcactgacacagtggatagcagaataccaggaaattctacatgttcctgaagaacccaaaatggaattatatgagaaaaaagctcagttatctaaatacaagtcacttcaacaaacggtgctgtcccatgaaccatcagtaaagtcagtgagagagaagggtgaagctcttttggaactggtgcaggacgtcactttaaaggacaaaatagatcaacttcaaagtgattaccaggacctgtgcagcataggaaaggcaatgatggaagaaattgctggttttgaagaccgtttgaacaatcttcaaatgaaaggtgatactttgattggccaatgtgcagaccacctgcaagcgaaacttaaacaaaacgtgcatgctcatctgcagggcacaaaggacagctactcagcgatctgcagcacagctcagaggatgtaccagagtttggaacacgaacttcagaagcacgtcagccgacaagacaccctgcagcagtgccaggcctggctttctgcagtccagccggatttagagccaagtcctcaaccacctcttagtagggcagaagccattaagcaggtcaaacacttcagagctttgcaagagcaggcaaggacctacctagatctcctttgctccatgtgtgacctgtcaaatgcttcggtgaaaaccacagcaaaagacattcaacaaacagagcaaacgattgaacaaaagcttgtccaggcccagaacttaactcagggctgggaagagatcaagcacctgaagtctgagctctggatttacctgcaagatgctgatcagcaactgcagaacatgaagaggaggcactctgagctggagctgaacattgcacagaacatggtttcacaagttaaggattttgttaagaaactacagagcaaacaggcatccgtgaacaccataatagaaaaggtgaataagttaacaaagaaggaggaatcgcctgaacacaaggaaataaatcatttaaatgatcagtggctcgatttgtgccgtcagtctaacaacctgtgcttgcaaagggaagaggatcttcagagaacaagagattaccatgactgtatgaatgttgttgaagtgttcctagaaaaatttactacagaatgggataacttggccagatctgatgcagagagtacagctgtccacctggaagctttgaaaaagttagcattggcattgcaggagagaaagtatgctattgaagatctgaaagatcaaaagcagaaaatgatagagcatctgaatttagatgacaaggagttagtcaaagaacagacgagtcatttagagcaacgttggtttcagcttgaggacctcattaaaaggaaaatccaagtgtcagtcaccaacttggaggagttaaatgtggtgcagtccagatttcaggagctaatggagtgggcagaagagcaacaacccaacatcgccgaggcccttaagcagagccctcctccagatatggctcagaaccttctcatggatcacctggccatctgcagtgaactggaggccaagcagatgctcctgaaatcgcttataaaggacgcagacagggtcatggcagatcttggtctcaatgagcgacaggtcatccagaaggctctctctgatgcacaaagccacgtgaattgtctcagtgacttagtgggccagcgaagaaagtacttaaacaaagccttgtccgagaaaacccagtttctcatggcagtgttccaggccaccagccaaattcagcaacatgagcgaaagataatgttccgtgaacacatctgtctgttaccagatgatgtgagcaaacaagtcaaaacatgtaagagtgcacaagccagcctcaagacttaccaaaatgaagtcactggactttgggcccagggtcgcgaactaatgaaggaagtcacagagcaggaaaagagtgaagtgctggggaagcttcaggaattgcagagtgtctatgacagtgttttacaaaagtgcagtcaccggttacaagaactagagaagaatttggtttctaggaagcattttaaggaagattttgataaagcttgccactggctaaaacaagcagatattgttacatttcctgaaatcaacctaatgaatgagagttctgagcttcatacacaactggctaaataccaaaacattcttgaacaatctccagaatatgaaaatcttctacttacgctgcagagaactgggcagaccatattaccatcgctgaatgaagtcgatcattcctacctcagtgaaaagctaaatgctttgcctcgacaatttaatgtaattgttgccttggctaaagacaagttctataaagtccaggaagcaattcttgctcggaaggaatatgcttccttgattgagttgacaacccagtctctgagtgaacttgaagcccaattcttgaggatgagcaaagttcccaccgacctggccgttgaggaggctctttctctgcaagatggttgcagagccattctggacgaggtggcgggccttggggaggcggtggatgaactgaaccagaaaaaagaaggttttcgcagcacaggtcagccttggcagccagacaagatgctgcaccttgtcaccttatatcacaggctgaagcgacaaacagaacagagggttagcttattagaagacaccaccagtgcttaccaagaacacgagaagatgtgccaacagctggagagacaactgaagtctgtaaaagaggagcagtccaaagtgaatgaggaaacgctgcctgcagaggagaagctcaaaatgtatcactccctggcaggaagtctccaggactcagggattgtactgaaacgagtaaccatacatcttgaagatcttgccccacaccttgaccccttggcttatgagaaagccaggcatcagatccagtcctggcaaggggagttaaaactgttgacttctgccattggtgagacggtgacagaatgtgagagccgaatggtgcagagtatagacttccagactgagatgagtcgctccctggactggctgaggagagtgaaggcagagctcagtgggccggtgtacctagacctcaacctgcaggacatccaagaggaaatcagaaaaatccaaattcatcaggaagaggtccagtccagcttgagaatcatgaatgcgctgagtcacaaggaaaaggagaagttcacaaaggccaaggagctgatttctgcggatttagaacacagcctcgctgagctctcagagctggatggagacatccaggaagccttacgcaccagacaggctaccttgactgaaatatatagccagtgtcaaaggtattatcaggtatttcaagcagccaatgactggcttgaggatgcccaagaattgttacagctggcaggcaatggcctagacgtggagagcgcagaggaaaatctcaaaagccacatggaatttttcagtacagaggatcagttccatagtaacctggaggagctccacagcctggtagccaccctggacccactcatcaagccaaccggcaaagaagacctagaacagaaagtggcttctctggaactcaggagccagaggatgagccgggactctggtgcccaagtggatctcttgcagagatgcacagctcaatggcacgattaccagaaagcaagggaagaggttattgaattgatgaatgatacagaaaagaaattgtctgagttttctttgttgaagacttcgtctagtcatgaagcggaagaaaaattgtcagaacacaaggctttagtgtcagtggttaactctttccatgagaaaattgtggcccttgaggaaaaagcttcacaactggagaaaaccggaaatgatgccagcaaagccaccctgagcaggtcaatgaccaccgtctggcagcgctggacacgccttcgagctgtggcccaggaccaggagaagatcctggaagatgcagtggatgagtggacgggctttaacaacaaggttaaaaaggccactgaaatgattgatcagctgcaagataagttacctggaagttcagcagagaaagcatcgaaagcagagctcttaactcttcttgaataccacgacacgttcgttctggagctggagcagcagcagtcggccttgggcatgctgcggcagcaaaccctgagcatgctccaggatggagccgccccaacccctggggaagagcctccgctcatgcaggaaatcaccgccatgcaagatcggtgcctgaacatgcaggagaaagtgaagactaatggaaagttggtgaagcaagagctgaaggaccgagaaatggtggagactcagatcaattctgtgaaatgttgggttcaggaaacgaaagaatatttagggaatccaacaatagaaatagatgctcaacttgaagaacttcagattctcctaacagaagccacaaatcaccgacagaacattgaaaaaatggcagaagaacagaaggagaagtacttaggtctttataccatattaccttctgaactctcccttcagttggctgaagtggcgttagatctaaagatccgagatcagatccaagacaaaataaaagaagttgagcagagcaaggccacgagccaggaactcagccggcaaattcagaagttagctaaagacctcacaactattctaactaagctgaaagcgaagacagataatgtagttcaagctaaaactgaccaaaaggtgctgggagaggaattagatggctgtaattcaaagttaatggaattagatgcagcagtacagaaattcttggaacagaatggccaactgggtaagccactggccaagaagataggaaaactgactgaacttcaccagcagaccattagacaagctgagaatcggctctccaagctcaatcaggcagcatcacatttagaagaatacaatgaaatgcttgaattaattttgaagtggattgaaaaagctaaagtcttggctcatggaactattgcatggaattctgcaagccagcttcgggaacaatatattttgcatcagaccctgctagaagaatccaaagaaattgacagtgagctggaagcaatgactgagaaattacagtacctcactagcgtgtactgtacagaaaaaatgtctcagcaagtggcagaactgggacgggagactgaggagttgcgacagatgatcaaaattcgtttgcagaacctccaagatgcagctaaggatatgaaaaaatttgaagcagagttgaaaaagttacaagctgccttggagcaagcccaggcaacactgacttctccagaagttggacgtctcagtctcaaggagcagctctctcatcggcagcatttgttgtctgagatggagtcactgaagccgaaggtgcaagcagtgcagctctgccagagtgccctccggatccccgaggatgtggttgccagcttacctctctgtcatgctgctctgcggctgcaggaagaggccagccggctgcagcacaccgccatccagcagtgtaacatcatgcaggcagctgtggtacaatatgaacaatatgagcaagaaatgaaacatctccagcaactgatagaaggagctcacagagagattgaggataaacctgttgccaccagtaacatacaggagctgcaggctcagatttctcggcatgaggagctggcgcagaaaattaagggctaccaggagcagatcgcttctttgaattccaagtgcaagatgctgacgatgaaagccaagcacgccaccatgctgctgacggtgaccgaggtcgaggggctggcggaagggacagaggacctggatggggagctcctccccacgccttcggcccacccctctgtggtcatgatgactgcaggtcgctgtcacactttgctgtcaccggtcactgaggagtctggggaggagggaaccaacagtgagatttcctctccacctgcctgtcgctccccttcacctgtggctaatacagatgcttctgttaaccaggacattgcatattaccaagccttgtctgctgagaggttgcagacagatgctgcaaaaattcaccccagcacatccgcatcccaggagttctatgaaccgggattggagccatccgctactgccaaactgggtgatttgcagcgttcttgggaaaccttaaagaatgtgatcagtgagaagcagcgcacactctatgaagctttggaacgccagcagaagtaccaggactccctccagtccatctctacgaagatggaggccattgagctgaaactcagtgagagcccagagcctggcaggagtccagaaagccagatggctgaacatcaggcattgatggatgagattctcatgctccaggatgaaatcaatgagctccagtcctctctcgcagaggagctggtatccgagtcttgtgaggccgaccctgcggagcagctggccttgcagtccacgctcactgtcttagccgagcgaatgtccaccatcaggatgaaagcctcggggaaacggcagcttttggaggagaagttgaatgatcagctggaggaacaaaggcaggaacaggccctgcagaggtatcgctgtgaagccgatgagctggacagctggctcttgagtaccaaggccactctggacactgcgctgagtccacccaaggagcccatggacatggaggcccagcttatggactgccagaatatgctggtggaaatagagcagaaggtggtggctttatcagaactgtcagtccacaatgagaacctgctgctggagggcaaagctcacaccaaggacgaggccgagcagctggctggaaagctgagaaggctcaaggggagcctgctggagctgcagagagccctgcatgataagcagctcaacatgcagggaacagcacaggagaaggaggagagcgatgttgacctaacagccacgcagagccccggcgtccaggaatggctggcccaagctcgcaccacatggacccagcagcggcagagcagtctccagcaacaaaaagagttagaacaggaattagccgagcagaagagtctccttcgctcagtagccagtcgtggagaggagattctaattcaacattcggcggcagagacctctggtgatgctggcgaaaaacctgatgtgttatcccaggagttggggatggaaggggagaaatcatccgctgaagaccagatgagaatgaaatgggaaagcctacatcaagaatttagtaccaagcagaaactactacagaatgttctggaacaggaacaagagcaagtgctttatagcaggccaaatcgactcttgtctggtgtgccactgtacaaaggggacgtgccaacccaagataaatctgcagttacatctttgctggatggactgaaccaagccttcgaggaggtttcatcccagagtggaggggcaaagaggcagagtatacacttggagcagaagttgtatgatggagtctcagccacctctacttggttggatgacgttgaagaacgtttatttgttgccacagcacttttaccagaagaaacagagacttgtctcttcaaccaagagattcttgccaaagacattaaggaaatgtctgaagaaatggataagaacaaaaacttgttttcccaagcttttccagagaatggtgataatcgagatgttattgaagatactttgggttgtcttttgggcaggttatccttgctagactcagtagtgaatcaacgatgtcatcagatgaaagaaagacttcagcaaatactaaatttccagaatgatctgaaagtgctgtttacatcactggctgacaacaaatacatcattctgcaaaaactggcaaatgtgtttgaacagcccgtagcagaacaaatagaggcaatacaacaggctgaagatggactcaaagaatttgatgcaggaatcattgaattaaagaggcgtggtgacaagctacaggtcgagcagccgtccatgcaagaactctccaagctccaggacatgtatgatgagctgatgatgatcattggctcccggaggagtggtctgaatcagaaccttacactcaagagtcagtatgagagggccctacaagatctggctgacctgctagaaactggtcaggagaagatggcaggagaccagaaaatcatcgtgtcttccaaagaggaaatccagcaactacttgacaaacataaggaatactttcagggcctggaatctcatatgatcttgactgaaacactcttcagaaagataatcagctttgcagtccaaaaggaaacccagttccatacagagctgatggctcaggcttctgctgtactgaaacgggctcacaagaggggtgtggagctggagtacattctagagacgtggtcccatctggatgaggaccagcaggagctcagcagacagctggaggtggtggaaagcagcatcccaagcgtgggtctggtggaggagaacgaggacaggcttattgaccgcataacactctaccagcatttaaaatctagccttaatgaataccagcccaaattatatcaagtattagatgatgggaaacgacttctgatatccatcagctgctcagatctagaaagccaactaaatcaacttggagagtgctggctaagtaacaccaataaaatgtctaaggaacttcacagactggaaacaatattgaaacactggaccagatatcaaagtgaatctgcagatctaattcactggttacaatctgcaaaagaccggctagaattttggactcagcaatctgtgacagtcccacaagagctggaaatggtccgtgatcatctaaatgctttcctggagttttctaaagaagtggatgcccaatcttccctgaaatcatctgttctgagtactggaaatcagctccttcgactaaaaaaggtggacacagccacgctgcgctctgagctgtcgcgcattgatagccagtggactgacctgctaaccaatatcccagccgtccaggagaagctccaccagctccagatggataaactgccttcccgccatgccatttctgaagtcatgagttggatttctctaatggaaaatgttattcagaaggatgaagataatattaaaaattccataggttacaaggcaattcatgaataccttcagaaatataagggttttaagatagacattaactgtaaacagctgacagtggattttgtgaaccagtccgtgctacaaatcagcagtcaggatgtggaaagtaagcgtagtgataagactgattttgctgagcaacttggagcaatgaataaaagttggcaaattctgcaaggtctagtaactgagaagatccagctgttggaaggcttattggaatcttggtcagaatatgaaaataatgtacaatgtctgaaaacatggtttgaaacccaggaaaagagactaaaacaacagcatcgaattggagatcaggcttctgttcaaaatgcactgaaagactgtcaggatctggaagatttgattaaagcaaaagaaaaagaagtagagaaaattgagcagaatggacttgctttgattcagaacaagaaagaagacgtctctagcattgtcatgagcacactgcgagagctcggccaaacctgggcaaatttagatcacatggttggacaattaaagatactgctgaaatcagtgcttgaccaatggagtagtcacaaagtggcctttgacaagataaacagttacctcatggaggccagatactctctttcccgattccgtctgctgactggctccttagaagctgtgcaagttcaggtggacaatcttcagaatctccaagatgatctggaaaaacaggaaaggagcttacagaaatttggctctatcaccaaccaattattaaaagagtgtcacccacccgtgacagaaactcttaccaatacactgaaagaagtcaacatgagatggaataacttgctggaagagattgctgagcagctacagtccagcaaggccctacttcagctttggcaaagatacaaggactactccaaacagtgtgcttcgacagttcagcagcaggaggatcgaaccaatgagctgttgaaggcagccacaaacaaggacattgccgatgatgaggttgccacatggattcaagattgcaacgacctcctcaaaggactgggcacagttaaagattccctcttttttctccatgagctgggagagcaactgaagcaacaagtggatgcttccgcagcatcagctattcaatcggatcaactctctttgagtcaacacttgtgtgccctggagcaagctctctgcaaacagcagacttcattacaggctggagttcttgattatgaaacctttgccaagagtttagaagctttggaggcctggatagtggaagctgaagaaatactacaagggcaggaccctagccactcatctgacctctccacaatccaggaaaggatggaagaacttaagggacagatgttaaaattcagcagcatggctccagatttagaccgtctaaatgagcttggatataggttacccttgaatgataaggaaatcaaaagaatgcagaatctgaaccgccattggtctctgatctcctctcagactacagaaagattcagcaagttgcagtcatttttgctacaacatcagactttcttggaaaaatgtgaaacatggatggaattcctagttcagacagaacaaaagttagcagtagagatttcaggaaattatcagcaccttttggaacagcagagagcacacgagttgtttcaagccgagatgttcagtcgtcagcagattttgcactcaatcattattgatgggcaacgtcttctagaacaaggtcaagttgatgacagggatgaattcaacctgaaattgacactcctcagtaatcaatggcagggagtgattcgcagggcccagcagaggcgggggatcattgacagccagattcgccagtggcagcgctatagggagatggcagaaaagcttcgtaaatggttggttgaagtgtcctacctccccatgagtggtctcggaagtgttcctataccactgcaacaagcaaggaccctctttgatgaagtgcagttcaaagaaaaagtgtttctgcggcaacaaggcagctacatcctgactgtggaggctggcaagcaactccttctctcggcggacagtggcgctgaggccgccttgcaggccgaactcgctgaaatccaagagaaatggaaatcagccagcatgcggctggaagaacagaagaaaaaactagccttcttgttgaaagactgggaaaaatgtgagaaaggaatagcagattccctggagaaactacgaactttcaaaaagaagctttcgcagtctctcccggatcaccatgaagagctccatgcagaacaaatgcgttgcaaggaattagaaaatgcagttgggagctggacagatgacttgacccagttgagcctgctgaaggacaccctctctgcctatatcagtgctgatgatatctccattcttaatgaacgcgtagagcttctgcaaaggcagtgggaagaactatgccaccagctctccttaaggcggcagcaaataggtgaaagattgaatgaatgggcagtcttcagtgaaaagaacaaggaactctgtgagtggttgactcaaatggaaagcaaagtttctcagaatggagacattctcattgaagaaatgatagagaagctcaagaaggattatcaagaggaaattgctattgctcaagagaacaaaatacagctccaacaaatgggagaacgacttgctaaagccagccatgaaagcaaagcatctgagattgaatacaagctgggaaaggtcaacgaccggtggcagcatctcctggacctcattgcagccagggtgaagaagctgaaggagaccctggtagccgtgcagcagcttgataagaacatgagcagcctgaggacctggctcgctcacatcgagtcagagctggccaagccaatagtctacgattcctgtaactcggaagaaatacagagaaagcttaatgagcagcaggagcttcagagagacatagagaagcacagtacaggtgttgcatctgtcctcaacctgtgtgaagtcctgctgcacgactgtgacgcctgtgccactgatgccgagtgtgactctatacagcaggctacgagaaacctggaccggcggtggagaaacatttgtgctatgtccatggaaaggaggctgaaaatcgaagagacgtggcgattgtggcagaaatttctggatgactattcacgttttgaagattggctgaagtcttcagaaaggacagctgcttttcccagctcttctggggtgatctatacagttgccaaggaagaactaaagaaatttgaggctttccagcgacaggtccacgagtgcctgacgcagctggaactgatcaacaagcagtaccgccgcctggccagggagaaccgcactgattcagcatgtagcctcaaacagatggttcacgaaggcaaccagagatgggacaacctgcaaaagcgtgtcacctccatcttgcgcagactcaagcattttattggccagcgtgaggagtttgagactgcgcgggacagcattctggtctggctcacagagatggatctgcagctcactaatattgaacatttttctgagtgtgatgttcaagctaaaataaagcaactcaaggccttccagcaggaaatttcactgaaccacaataagattgagcagataattgcccaaggagaacagctgatagaaaagagtgagcccttggatgcagcgatcatcgaggaggaactagatgagctccgacggtactgccaggaggtcttcgggcgtgtggaaagataccataagaaactgatccgcctgcctctcccagacgatgagcacgacctctcagacagggagctggagctggaagactctgcagctctgtcggacctgcactggcacgaccgctctgcagacagcctgctttctccacagccttcctccaatctctccctctcgctcgctcagcccctccggagcgagcggtcaggacgagacaccccggctagtgtggactccatccccctggagtgggatcacgactatgacctcagtcgggacctggagtctgcaatgtccagagctctgccctctgaggatgaagaaggtcaggatgacaaagatttctacctccggggagctgttggcttatcagatgtaatgatccccgaaagccctgaggcctatgtaaaactcacagaaaatgcaatcaaaaatacctccggggaccacagtgccctagagtcacagatccgacaactgggcaaagccctggatgatagccgttttcagatacagcaaaccgaaaatatcattcgcagcaaaactcccacggggccggagctagacaccagctacaaaggctacatgaaactgctgggcgaatgcagtagcagtatagactccgtgaagagactggagcacaaactgaaggaggaagaggagagccttcctggctttgttaacctgcatagtaccgaaacccaaacggctggtgtgattgaccgatgggagcttctccaggcccaggcattgagcaaggagttgaggatgaagcagaacctccagaagtggcagcagtttaactcagacttgaacagcatctgggcctggctgggggacacggaggaggagttggaacagctccagcgtctggaactcagcactgacatccagaccatcgagctccagatcaaaaagctcaaggagctccagaaagctgtggaccaccgcaaagccatcatcctctccatcaatctctgcagccctgagttcacccaggctgacagcaaggagagccgggacctgcaggatcgcttgtcgcagatgaatgggcgctgggaccgagtgtgctctctgctggaggagtggcggggcctgctgcaggatgccctgatgcagtgccagggtttccatgaaatgagccatggtttgcttcttatgctggagaacattgacagaaggaaaaatgaaattgtccctattgattctaaccttgatgcagagatacttcaggaccatcacaaacagcttatgcaaataaagcatgagctgttggaatcccaactcagagtagcctctttgcaagacatgtcttgccaactactggtgaatgctgaaggaacagactgtttagaagccaaagaaaaagtccatgttattggaaatcggctcaaacttctcttgaaggaggtcagtcgtcatatcaaggaactggagaagttattagacgtgtcaagtagtcagcaggatttgtcttcctggtcttctgctgatgaactggacacctcagggtctgtgagtcccacatcaggaaggagcaccccaaacagacagaaaacgccacgaggcaagtgtagtctctcacagcctggaccctctgtcagcagtccacatagcaggtccacaaaaggtggctccgattcctccctttctgagccagggccaggtcggtccggccgcggcttcctgttcagagtcctccgagcagctcttccccttcagcttctcctgctcctcctcatcgggcttgcctgccttgtaccaatgtcagaggaagactacagctgtgccctctccaacaactttgcccggtcattccaccccatgctcagatacacgaatggccctcctccactctgaactaagcagatgccatctgcagaagtgctggtagcataaggaggatcgggtcataagcaatcccaaactaccaacaagaggaccttgatcttggcgaaagccctcggtgtggcagctttagccctcctccagatcacatgtgtgcaaattatggcttcagaggtggaagataaacagtgacgggggaacaaacagacaacaagaaggtttggaagaaatctggtttgagactctgaaccttagcactaaggagattgagtaaggacctccaaagttccccggactcatgaattctgggcccttggcccattctgtgcacagccaaggacttcagtagaccatctgggcagctttcccatggtgctgctccaaccatcagataaatgaccctcccaagcaccatgtcagtgtcgtacaatctaccaaccaaccagtgctgaagagattttagaaccttgtaacatacaatttttaagagcttatatggcagcttcctttttaccttgttttcctttggggcatgatgttttaacctttgctttagaagcacaagctgtaaatctaaaaggcacttttttttagaggtataaagaaaaactagatgtaataaataagatcatggaaggctttatgtgaaaaaagttgaatgttatagtaaaaaaaaaaagatatttatgtatgtacagtttgctaaagccaagttttgtttgtattgatttctttgcatttattatagatattataaaata

SEQ ID NO: 29629 - DNA, 3768 bp, Homo sapiens
  source 1..3768: mol_type = unassigned DNA
cttgtcactgcccagtgtcatgttatcgggcagagactaccaacatttgtctacagtgagcattttcatacttctatacacagacaaggggaaactttcatccccacgcaggatatagctttttgctctgcagagtctaacttttgcaagtggaagcttcatggtggtggcggaggacctgagtgccctgaggatggcagaggacagctgtgtggatgcagatctcccagattgtaactgcgatgtcacaagggtgaagaagctgaaggagaccctggtagccgtgcagcagcttgataagaacatgagcagcctgaggacctggctcgctcacatcgagtcagagctggccaagccaatagtctacgattcctgtaactcggaagaaatacagagaaagcttaatgagcagcaggagcttcagagagacatagagaagcacagtacaggtgttgcatctgtcctcaacctgtgtgaagtcctgctgcacgactgtgacgcctgtgccactgatgccgagtgtgactctatacagcaggctacgagaaacctggaccggcggtggagaaacatttgtgctatgtccatggaaaggaggctgaaaatcgaagagacgtggcgattgtggcagaaatttctggatgactattcacgttttgaagattggctgaagtcttcagaaaggacagctgcttttcccagctcttctggggtgatctatacagttgccaaggaagaactaaagaaatttgaggctttccagcgacaggtccacgagtgcctgacgcagctggaactgatcaacaagcagtaccgccgcctggccagggagaaccgcactgattcagcatgtagcctcaaacagatggttcacgaaggcaaccagagatgggacaacctgcaaaagcgtgtcacctccatcttgcgcagactcaagcattttattggccagcgtgaggagtttgagactgcgcgggacagcattctggtctggctcacagagatggatctgcagctcactaatattgaacatttttctgagtgtgatgttcaagctaaaataaagcaactcaaggccttccagcaggaaatttcactgaaccacaataagattgagcagataattgcccaaggagaacagctgatagaaaagagtgagcccttggatgcagcgatcatcgaggaggaactagatgagctccgacggtactgccaggaggtcttcgggcgtgtggaaagataccataagaaactgatccgcctgcctctcccagacgatgagcacgacctctcagacagggagctggagctggaagactctgcagctctgtcggacctgcactggcacgaccgctctgcagacagcctgctttctccacagccttcctccaatctctccctctcgctcgctcagcccctccggagcgagcggtcaggacgagacaccccggctagtgtggactccatccccctggagtgggatcacgactatgacctcagtcgggacctggagtctgcaatgtccagagctctgccctctgaggatgaagaaggtcaggatgacaaagatttctacctccggggagctgttggcttatcaggggaccacagtgccctagagtcacagatccgacaactgggcaaagccctggatgatagccgttttcagatacagcaaaccgaaaatatcattcgcagcaaaactcccacggggccggagctagacaccagctacaaaggctacatgaaactgctgggcgaatgcagtagcagtatagactccgtgaagagactggagcacaaactgaaggaggaagaggagagccttcctggctttgttaacctgcatagtaccgaaacccaaacggctggtgtgattgaccgatgggagcttctccaggcccaggcattgagcaaggagttgaggatgaagcagaacctccagaagtggcagcagtttaactcagacttgaacagcatctgggcctggctgggggacacggaggaggagttggaacagctccagcgtctggaactcagcactgacatccagaccatcgagctccagatcaaaaagctcaaggagctccagaaagctgtggaccaccgcaaagccatcatcctctccatcaatctctgcagccctgagttcacccaggctgacagcaaggagagccgggacctgcaggatcgcttgtcgcagatgaatgggcgctgggaccgagtgtgctctctgctggaggagtggcggggcctgctgcaggatgccctgatgcagtgccagggtttccatgaaatgagccatggtttgcttcttatgctggagaacattgacagaaggaaaaatgaaattgtccctattgattctaaccttgatgcagagatacttcaggaccatcacaaacagcttatgcaaataaagcatgagctgttggaatcccaactcagagtagcctctttgcaagacatgtcttgccaactactggtgaatgctgaaggaacagactgtttagaagccaaagaaaaagtccatgttattggaaatcggctcaaacttctcttgaaggaggtcagtcgtcatatcaaggaactggagaagttattagacgtgtcaagtagtcagcaggatttgtcttcctggtcttctgctgatgaactggacacctcagggtctgtgagtcccacatcaggaaggagcaccccaaacagacagaaaacgccacgaggcaagtgtagtctctcacagcctggaccctctgtcagcagtccacatagcaggtccacaaaaggtggctccgattcctccctttctgagccagggccaggtcggtccggccgcggcttcctgttcagagtcctccgagcagctcttccccttcagcttctcctgctcctcctcatcgggcttgcctgccttgtaccaatgtcagaggaagactacagctgtgccctctccaacaactttgcccggtcattccaccccatgctcagatacacgaatggccctcctccactctgaactaagcagatgccatctgcagaagtgctggtagcataaggaggatcgggtcataagcaatcccaaactaccaacaagaggaccttgatcttggcgaaagccctcggtgtggcagctttagccctcctccagatcacatgtgtgcaaattatggcttcagaggtggaagataaacagtgacgggggaacaaacagacaacaagaaggtttggaagaaatctggtttgagactctgaaccttagcactaaggagattgagtaaggacctccaaagttccccggactcatgaattctgggcccttggcccattctgtgcacagccaaggacttcagtagaccatctgggcagctttcccatggtgctgctccaaccatcagataaatgaccctcccaagcaccatgtcagtgtcgtacaatctaccaaccaaccagtgctgaagagattttagaaccttgtaacatacaatttttaagagcttatatggcagcttcctttttaccttgttttcctttggggcatgatgttttaacctttgctttagaagcacaagctgtaaatctaaaaggcacttttttttagaggtataaagaaaaactagatgtaataaataagatcatggaaggctttatgtgaaaaaagttgaatgttatagtaaaaaaaaaaagatatttatgtatgtacagtttgctaaagccaagttttgtttgtattgatttctttgcatttattatagatattataaaata

SEQ ID NO: 29630 - DNA, 20475 bp, Homo sapiens
  source 1..20475: mol_type = unassigned DNA
atggcatctagtcctgagcttcccaccgaagatgaacagggttcctggggcatcgacgatctccatatttcattgcaagctgaacaggaagacacccagaagaaagccttcacgtgctggataaactcacagttggccaggcacacttctccctcagttatatccgacctattcacagacattaaaaaggggcatgtcctcctggatctgctagaagtactttctgggcaacagttgcctcgggataaaggatctaataccttccagtgtagaatcaatatagaacatgccttgacattcctaagaaaccgatcaattaagctaataaatattcatgttactgatatcattgatggaaacccatccattatccttggcctaatttggacaattatcctgcactttcatattgagaagcttgcccagactctttcttgcaattacaatcagccttccctggatgatgtgagtgtggttgactcatctcctgcctcaagtcctccagctaagaaatgctctaaagtgcaagcaagatggcaaatgtctgcaagaaaggcccttcttttgtgggctcaggaacaatgcgccacctatgagtctgtcaatgtgaccgattttaagtcaagttggagaaatgggatggcttttttggccatcattcatgccttgcgaccagacctaattgacatgaagagtgtgaagcatagatccaacaaagacaatctgagagaggccttcagaattgcagaacaagaattaaaaatccccagattgctggaaccagaagatgtggatgttgttgatcctgatgaaaagtccatcatgacctatgtggcacagtttctgcagtattccaaagatgcccctgggactggagaggaggctcagggaaaggtgaaagatgctatgggctggttaactctgcaaaaggaaaaactacagaagttgctaaaggattcagagaatgatacctactttaaaaagtataatagcctgctgtcctttatggagtcattcaatgaagaaaaaaagtcctttttggatgtcctgtcaataaaacgggatctggatgagctggacaaggatcatttacagttgagagaagcctgggatggcctcgatcaccagattaatgcatggaaaataaagctaaattatgccttgcccccacccctccatcaaactgaagcttggctccaggaggtagaagagcttatggatgaagatttgtcagcctcccaggatcactctcaagccgtgactctgatacaagagaaaatgactttattcaagagcctgatggatagatttgagcatcattcgaacattctccttacctttgaaaataaggatgaaaatcacttgccattggtaccacctaacaaattggaggaaatgaaaagacgaatcaacaacattttggagaaaaaatttattctacttctagaatttcattactacaagtgcttagttcttggtttggtagatgaagtgaaatcaaaattggatatttggaacattaaatatgggagcagagaatctgtggaattattgctggaagactggcataaatttattgaagaaaaagaattcctagctcgacttgatacttcttttcaaaaatgtggagaaatttataagaatttggctggagaatgtcagaatattaataaacagtatatgatggtgaaatctgatgtttgtatgtatagaaaaaatatatataatgtgaagtccactctacaaaaagtgctggcatgttgggctacttatgtggaaaaccttcgcttactaagggcttgctttgaggagacaaagaaggaagaaattaaagaggtaccctttgagacactagcccagtggaatctagaacacgctactttaaatgaagcaggaaatttcttagtcgaagtcagcaatgatgtggttggatcatctatttctaaagaactgagaaggctgaataaaagatggagaaagttggtttcaaaaactcaacttgaaatgaacctgccactgatgataaaaaaacaggatcagcccacttttgacaattctggaaatattctatctaaagaagagaaagcaactgttgagttttcaacagatatgtcagtagaacttcctgaaaattataatcaaaatataaaggctggagagaaacatgaaaaagaaaatgaagaattcacagggcaactaaaagtggctaaagatgttgaaaaactcattggacaagtggaaatctgggaggcagaagccaaatctgttttggatcaagatgatgtggacacctcaatggaagaatctttgaagcatcttattgccaaaggctctatgtttgatgagcttatggcaagaagtgaagatatgttacaaatggatatacaaaatatttcaagccaggagtcctttcaacatgttctcacaactgggcttcaggcaaagattcaagaagctaaagagaaagtccagatcaatgtggtaaaactcattgcagcgttgaagaacttaactgacgtttcaccagatttggacatcaggctgaagatggaagaatcccagaaggaacttgaatcatatatgatgagggctcagcagttactggggcaaagagagagccccggtgaactcatttcaaaacacaaggaagcactaataatttctaatacaaaaagtctggccaagtatttgaaagctgttgaagaactaaaaaataatgtaactgaggacataaagatgtctttagaagaaaagagtagagatgtctgtgccaaatgggagtctcttcatcatgaactgtctttatatgttcaacaactaaaaatagatattgaaaaaggaaagcttagtgacaatattttaaaacttgaaaagcaaataaataaagaaaagaaacttatccgtagaggaaggaccaagggtctcatcaaagaacatgaggcctgcttttctgaggaaggctgcctgtaccagcttaatcaccacatggaagtcctgagggagctgtgtgaagagctgccttcacagaagagtcaacaagaagtgaagagactactcaaagattatgaacaaaagatagaaagacttctgaaatgtgcttccgagattcatatgacactgcagcccacagcgggaggcacgtcgaaaaacgaggggaccatcaccacatctgagaatagaggaggggatccccacagtgaggcaccatttgcaaaatcagataatcagccatcaactgaaaaggcaatggaacccactatgaagtttagcctggcatcagtgttaaggcctctgcaagaagaaagcattatggaaaaggattacagtgcatctataaatagtttactagagaggtatgatacatacagagatattcttgaacaccacctgcaaaacaacaaattcaggattacttctgatttctctagtgaagaggacaggagtagttcttgtctgcaggctaaactgacagatctacaggtcataaaaaatgaaactgatgctcgctggaaagagtttgaaattatttcattgaagttagaaaatcatgtgaatgacataaaaaagccttttgtaattaaggaaagagacacactaaaggaaagagaaagagagcttcagatgactcttaataccagaatggaatctttagagacagcactgcggcttgtgttacctgtagagaaggcatcacttcttctctgtggctcggacctgcctctccataaaatggccatccagggatttcatctcattgatgctgatcgcatctatcaacacctaaggaatatccaagattccatagcaaaacagattgaaatatgtaaccgcttagaagagccaggcaactttgtattaaaggagttacacccatttgatctacacgcaatgcagaatattatactgaaatacaaaacacaatttgaaggaatgaaccacagggtgcagaggagtgaagatactctcaaagctctggaagactttttggcgtctctcagaacagctaaactctctgctgagcccgttacagacctttcagcctcagatacacaggtggcacaagaaaatacgttgacagtaaaaaataaagagggagaaattcatctgatgaaagacaaggccaaacatttggataaatgtttgaagatgctcgatatgagctttaaagatgctgaacggggtgatgacacctcctgtgaaaacctgcttgatgctttttcaataaagttatctgagacacatggctatggggtacaggaggaattcactgaggaaaacaaattactagaggcttgtattttcaaaaataatgaactccttaaaaatattcaagatgtgcagagtcaaatcagtaaaattggtcttaaggatcctactgttccagctgtgaaacatcggaaaaaatcattaatcagactggataaggttctagatgaatatgaagaagagaagagacatttacaagaaatggctaattctcttccacacttcaaagatggcagagaaaaaaccgtgaatcaacagtgccaaaatacagtagtcttgtgggagaataccaaagccttggtcaccgaatgtcttgaacaatgtgggagagttttggagctcttaaaacaatatcagaattttaaaagcatcttgacaactttgattcaaaaagaagagagtgtcatctccctgcaggcttcgtacatgggaaaggagaacctgaagaaaaggatagcagagattgaaattgtcaaagaagaatttaatgagcatttagaagttgtagacaagataaaccaggtctgcaaaaatctacaattttatctaaataaaatgaaaacttttgaagagcccccttttgaaaaagaggctaatattattgtggatagatggcttgatataaatgagaagacagaagattactatgaaaatcttggtcgagctctagctttgtgggacaaactttttaacttaaaaaatgtcattgatgagtggacagaaaaggcccttcaaaaaatggaattacatcaattgactgaagaggacagagaaaggctgaaggaagaattacaagtccatgaacaaaaaacttcagaattttctagaagagtggctgaaatacagtttttgctccaaagcagtgaaatacctcttgaattgcaggtcatggagtcctctattttgaacaagatggaacatgtacagaagtgcttaacaggagaatccaactgccatgcactcagtggcagcactgctgagctaagggaggatctcgaccaagccaagacccagatcgggatgactgaatccctcttaaaagccctgtctccttctgacagcttggagatcttcactaaactagaggagatacaacagcagattctacagcaaaaacacagtatgatattacttgagaatcaaataggttgtctgactcctgaactctctgaattgaaaaagcaatatgaaagtgtcagtgatttatttaataccaaaaaaagtgttttgcaagatcacttttctaagttattgaatgatcaatgcaagaactttaatgactggttcagcaacattaaagtgaaccttaaggagtgttttgaatcatcagaaacaaaaaagagtgtggaacaaaagctacaaaaactttctgatttcttgactcttgaaggaagaaacagtaaaataaagcaggtggacagcgtactgaagcatgtgaagaagcatctgcccaaagcacatgtgaaggagcttatcagttggctcgtgggtcaggaattcgaattagaaaaaatggagtccatatgccaggctcgagcaaaggagcttgaagactccttgcagcagctactgagactccaggatgaccatagaaacctgaggaagtggttgactaatcaagaagagaaatggaaaggaatggaagaaccaggggagaaaactgagctgttctgccaagctttagctagaaagagggaacagtttgaatctgtggcccaattgaacaactctttgaaggaatatgggtttactgaagaagaagaaataataatggaagcaacatgtttgatggatagataccagacattactgagacaactaagtgaaatcgaggaagaggataagttactacccacagaggaccagagctttaatgatcttgcacatgatgtaattcattggataaaagagattaaagagtcccttatggttttgaattcatccgaaggcaaaatgccacttgaggaaagaatccaaaaaatcaaggaaatcattttgctgaagcctgaaggggatgccagaatagagaccatcatgaagcaggctgagagcagcgaggccccgctggttcagaagaccctcactgacatcagcaaccagtgggacaacacactccatttagctagcacctacctaagccatcaagaaaagcttctactagaaggagagaaatatttacaaagtaaggaggatctgagattaatgctcatagaactaaagaagaaacaggaagcaggctttgctctacaacatggtctgcaggagaagaaagctcagttaaagatttataagaaattcctcaagaaagcccaagatttgacatccttgctaaaggagttaaaatctcagggaaactacctcttggagtgcactaaaaatcccagcttcagtgaagagccttggctggaaataaagcatctacacgaaagtcttcttcaacaactgcaggattctgtgcaaaacttggacggtcacgttcgagaacatgattcataccaggtttgcgtcacagacctgaatactacattggacaatttctccaaggaatttgtcagtttttctgataagcctgtggatcaaatagcggttgaggaaaaattgcagaaactgcaggaactagagaatagactcagtttacaagatggcacattaaagaagattttagctttagcaaaatccgtcaagcaaaatacatcttcagtggggcagaagattattaaagatgatataaaatcacttcagtgtaaacaaaaagatttggaaaacaggcttgcatctgctaagcaggagatggaatgttgtctcaacagcattctcaaatcaaaacgctcaacagaaaagaaaggaaagtttactctgccaggcagagagaagcaggccacttctgatgtgcaggagtctactcaggaatcagctgcagtggaaaagttggaggaagactgggaaataaacaagaattttgttgaaaatgtgatggcagtttccaaaaattgccatcatagcatgtatatatttgaatccattgtcaagaatttcatttcagatgaaatgcaggattcagctgtggaaatggctatgtcaaaacaactttctcttaatgctcaagaaagcatgaaaaacactgaagatgagcggaaagtcaatgagctgcaaaatcaacctttagaattagatactatgttaagaaatgaacaattagaagagatagagaaattatatacccagttggaagcaaagaaagcagccattaagccactggaacaaacagaatgtcttaacaaaacagaaactggggccttggttctccacaatataggatattcggcacagcatttggacaatttgcttcaggcacttattactttgaagaaaaacaaagaaagccaatattgtgtcctcagagattttcaggaataccttgctgcagttgaatcttcaatgaaagccttgttgacagacaaggaaagtcttaaagtaggaccactggacagtgtaacgtatctggacaaaattaaaaaattcatagcatccatagaaaaagagaaagattctttaggcaacttgaaaatcaaatgggagaatttatcaaaccacgtgactgacatggataagaaattgttggaaagccagattaagcaacttgaacatggttgggaacaagtggaacagcagattcaaaagaagtattctcagcaggtagtggaatatgatgaatttacaaccctcatgaataaggtacaggacactgagatttctctgcaacagcagcagcaacatctacagttaaggctgaagtctccagaagaacgggcagggaaccaaagcatgattgccttgaccactgacctccaggctaccaagcatggattttctgttttaaaggggcaagctgaacttcagatgaagaggatttggggagaaaaagaaaagaagaatttggaggatggaataaataacttgaagaaacaatgggaaacattggagccattacacttagaagcagaaaatcagattaagaagtgtgacataaggaacaagatgaaagagactatcttatgggccaagaatttgttgggtgaacttaatccctccattccccttctcccagatgacattctttcacagatcagaaagtgcaaagtgacacatgatggcattctagctaggcagcagtctgtggaatcgttggctgaagaggtcaaagataaggttcctagccttacaacctatgagggcagtgatttaaataataccctagaggacttacggaatcaataccaaatgctggttttaaaatcaactcaaagatcacagcaattagaatttaagttggaagaaagaagcaatttttttgctataataaggaagtttcaacttatggttcaagaaagtgaaacactgataattcccagggtggagacagctgccacggaagctgaactaaaacatcaccatgttactttggaggcatctcagaaggaattgcaagaaattgacagtggaatctcaacacatcttcaggagctaacaaacatctatgaggagctgaatgtgtttgaaagattatttctggaagatcagttgaaaaatcttaagattaggaccaacagaatacaaagattcattcagaatacatgtaatgaagtggaacacaagataaagttttgcagacaattccatgaaaaaacatcagcgcttcaggaggaggctgacagtatacagcgcaatgaactattacttaatcaagaagtaaataaaggtgttaaagaggagatctataatcttaaagacagactcaccgctattaagtgttgcatcttacaggtattgaaacttaaaaaagtgtttgactatattggactaaactgggatttttcacaacttgaccaattacaaacccaagtatttgaaaaagaaaaggaacttgaagaaaaaattaagcagttggacacatttgaggaagaacatggcaaatatcaggcattattaagtaaaatgagagctattgatttgcaaattaagaaaatgactgaagtagtactaaaagctcctgatagctctccggaaagcagacggctcaatgcccaaattttaagtcagagaattgagaaagccaagtgtttatgtgatgagataataaagaaattaaatgaaaataagacctttgatgactcattcaaggagaaagaaatactacaaataaagctgaatgcagaagaaaatgataagttatacaaagttctccaaaacatggtattagaactctcaccaaaagaattggatgaaaagaattgtcaggacaaactagaaacttccttacatgttttaaatcagataaaatctcaattacagcagccattacttataaatttggaaattaaacatattcaaaatgaaaaggacaattgtgaagcatttcaggagcaagtttgggcagaaatgtgtagtattaaagctgtgactgctattgagaaacaaagagaagaaaactcttctgaagcgagtgatgtggagacaaaactacgtgagtttgaagatcttcagatgcagcttaacacaagcattgatttgcgcacaaatgtcttgaatgatgcttatgaaaatctaacacgctataaagaagcagtcaccagggcagtggagagcatcacttccctcgaagccatcattataccctacagagtagatgttggtaatccagaagaatctttagagatgcctcttcgaaaacaagaggaattggaatccacagtagcacacatccaggacctcactgagaaactgggaatgatatccagccccgaagccaaactacaacttcagtatactttacaggaactagtttctaagaactcagcaatgaaggaagctttcaaagcacaggaaactgaggcagaaaggtatcttgagaattacaaatgctatagaaaaatggaagaggatatttacactaacctcagcaaaatggagacagttcttggacagtccatgtcctcgttgccactgtcttacagagaagctttagagcgcttggaacagagcaaggccttggtgtcaaatcttatatcaaccaaagaagagttaatgaaactacgacagatccttagactcttgagactcaggtgcacagaaaatgatggcatatgtttgctcaagattgtgtcggctctgtgggagaaatggctgagtttgctggaagctgctaaagagtgggagatgtggtgcgaagaactgaagcaggaatggaaatttgtcagtgaagaaattgaacgagaggcaattattttagataatcttcaggaagaactccctgaaatttccaaaacaaaagaggcagccaccacagaggaactctctgagctgctagactgtttatgccaatatggagagaacgtggagaagcaacagctgttactgactctacttcttcagcgcatcagaagtatccagaatgttcctgaaagctcaggggctgtggaaactgttccagcatttcaagaaattacttctatgaaagaacgatgcaacaagcttcttcagaaagttcagaaaaataaagaattggtgcagactgaaatccaagaaagacattccttcacaaaagagataattgctttgaagaatttctttcaacagaccacaacttcattccaaaatatggcattccaggatcacccagaaaagtcagaacaatttgaggagcttcaaagcatccttaagaaagggaaactaacttttgagaatattatggaaaaactgcgaatcaagtattccgaaatgtacaccatagtccctgcagagattgaatcccaggtggaagaatgcagaaaagctttagaagacatagatgagaagattagcaatgaagtcttaaaaagctcaccatcatatgcaatgaggagaaaaatagaagaaattaacaatgggcttcataatgttgaaaagatgttgcagcagaaaagcaaaaatattgagaaagctcaagaaattcaaaagaaaatgtgggacgagttagatctatggcattccaaactaaatgagctggattctgaagttcaggacattgttgaacaggacccaggacaggctcaagaatggatggataacttgatgattcctttccagcagtatcagcaagtatcacagagagcagagtgtagaacctcacagttgaataaggccacagttaagatggaggaatatagtgaccttctgaagagcactgaggcttggatagaaaataccagtcatttgctggccaatcctgctgactatgactctttgaggacactgagtcaccatgctagcactgtgcagatggctttggaagattcagaacagaagcacaatcttttacattcaatctttatggatctagaagacctgtcaataatttttgaaacagatgaattaacccaatccatacaagagttaagtaatcaagtaacagctttacaacaaaaaataatggaaagccttccacagattcagcgaatggctgatgatgtggttgctattgaatctgaagtaaaatcaatggaaaaaagagtttcaaaaatcaaaactatcctattatcaaaagaaatatttgatttttcacctgaagaacatctcaaacatggggaggtcatacttgaaaatatacgtcccatgaagaaaaccattgctgagatagtgtcttaccaagtggaactgaggttgccccaaacaggaatgaaacctctgcctgtgtttcagcggacaaatcagcttttacaagatataaaactattggaaaatgtgactcaagaacaaaatgagttattaaaggtagtcataaaacagaccaatgaatgggatgaagaaatagaaaatttgaaacagatcttaaataattattcagctcagttctcccttgaacatatgtcaccagaccaagctgacaagctgccacaactacagggagaaatcgaacgtatggagaaacagattctgagtttgaaccagagaaaagaagacctgttggtggacttgaaggccaccgtactaaaccttcaccagcatttgaagcaagaacaagaaggagtagaaagagataggctgccagctgtaacatcagaggaaggtggagtggcagagagggatgcttctgagcggaagttgaacagaagaggctccatgtcttacctggcagcagtcgaggaagaggtggaagaaagttccgtgaagagcgatcatgacaaggacatggaagaagacagagcttcctcatcctctggaacaattgttcaggaagcatatgggaaaataagcacctctgataattccatggcacaaatcctcacaccagactcactaaacactgagcaaggcccagaatgttccctaaggcccaaccaaacagaagagggcaccacacctcctattgaggctgacactctggactcttctgacgcgcaaggaggtttggagcccagggtggagaaaactaggccggagcccacagaagtcctgcatgcctgcaagacccaggtggccgagctggagctgtggctgcaacaagccaacgtggcagttgagccggaaacattaaacgcagacatgcagcaggtgctggaacagcagctggtagggtgccaggctatgctaacagagattgagcacaaggttgcctttctgttagagacttgcaaagatcagggcctgggagataatggagccactcaacatgaggctgaagcgctttccctgaaactgaaaacagtgaagtgcaatttagaaaaagtccagatgatgcttcaggagaagcacagtgaagatcagcatcctaccattctaaagaaatcctcagagccagagcatcaagaagctctccaaccagttaacctttctgaattggaatccattgtaactgaaaggccacaattcagcagacaaaaagatttccagcagcaacaggttctggagttaaaaccaatggaacagaaagatttcatcaaattcatagaatttaatgctaagaaaatgtggccccagtattgccaacatgataacgatacaactcaggaatcatctgcaagatacccaacaactgaagaactgaaaacctataccacccaacttgaagacctgcgccaagaagcaagtaaccttcagacacaggaaaatatgacagaagaagcatatatcaatttggataaaaaattgtttgaactattcctgaccctcagtcagtgcctcagcagtgtggaggagatgctggagatgcccagactttacagggaggatggttctggccagcaggtgcactacgagacgctggctcttgagttgaagaaactttatttagcgctaagtgacaagaagggtgatcttttgaaagccatgacttggcctggcgagaacaccaacttgctccttgaatgttttgacaaccttcaagtctgcctggagcacactcaggctgcagctgtctgtagaagcaagtccctgaaagctggcctcgattacaaccgcagttaccagaaagcagatgcatatacagtggagctggagaacgccgagagccgagtggccaaactaagagatgaaggggagaggcttcatttaccttatgctttactccaggaggtttacaaattagaggatgtacttgacagtatgtggggaatgctaagagccaggtacacagaactcagcagccctttcgtcactgagagccagcaagatgctttgttgcaaggcatggtggaactggtgaagattgggaaggaaaagcttgctcatggccacttaaaacaaaccaaaagtaaagtggcgttacaggctcaaatagaaaatcacaaggtttttttccagaagcttgttgctgacatgttgttgatccaagcatactctgccaaaatacttccttctttattgcaaaacagagagacattttgggcagaacaagtaacagaagttaaaatactagaagaaaagtcacgccaatgtggtatgaagctgcagagtttgttgcagaaatgggaagaatttgatgaaaactatgcatctcttgaaaaggacctggaaattcttatatctacattgccctctgtgagtttggtggaagaaacagaggaaagattagtggaaaggatttcattttaccagcaaataaaaagaaacattggtggaaaacacgcccggctttaccaaactctgaacgaaggcaaacagttggtggcgtctgtgagctgtcctgaattagagggccagatcgcaaaactggaagagcagtggttgtccctgaacaagaaaattgaccatgagctccacaggctgcaagctcttctcaagcatctgctcaggtcagcctttttgggggtttataacagagattcggatcagttaaccaagtggttggaatcttcccagcatactctgaattactggaaagaacagtccctcaatgtgtctcaggacttggatacaatcagaagcaacatcaacaatttttttgagttttcaaaagaagttgatgaaaaatcctccttgaagactgccgttatcagtatcgggaaccagcttcttcacctgaaagaaactgatacagctacactgagagcttctttagcacagtttgaacaaaaatggacaatgctcataactcaacttccagatattcaagaaaaacttcaccagcttcaaatggagaaattgccgtctcgtaaagcaatcacagaaatgattagctggatgaacaatgtggagcatcaaacttcagatgaagactccgtgcattcaccaagttctgcatctcaagttaaacatcttcttcagaagcacaaggagtttagaatggaaatggactataaacagtggatagttgacttcgttaaccagtcattacttcagctaagcacctgtgatgtagaaagcaagcgctatgaaagaacggagtttgcagagcacctgggggagatgaaccgccagtggcaccgtgtacatggaatgctgaatagaaagatacaacatttagaacaacttctagaaagtatcactgagagtgaaaataaaatacagatcttgaacaactggctggaagcacaagaagagagactgaaaactttacaaaaacctgaaagtgtgatctcagtgcagaagctgctcctggactgtcaggatatagaaaatcaacttgcaattaaatccaaagcactagatgagttgaaacaaagttatctgactttggagagtggggcagtgccattgttagaagatacagcatcccgaattgatgagttatttcaaaagagaagcagtgttctcactcaggtcaatcagctcaaaacctccatgcagtcagttttacaggagtggaagatttatgatcaactctatgatgaagtgaatatgatgacaatccgattctggtactgcatggaacacagcaagcctgtggtgttatcattggagaccttgagatgccaggtggagaaccttcagtctctgcaagatgaagctgagagcagtgaagggagttgggagaaactccaggaggttatcggcaaactcaaaggtctctgcccctctgttgctgaaataatcgaagagaaatgccaaaatactcataaaaggtggactcaggtgaaccaagccattgcagaccagttgcagaaggcccagagtctgctccagctctggaaggcctatagcaatgctcatggtgaagctgccgcaaggctgaagcagcaggaagcaaagtttcaacagctcgcaaacatcagcatgtctggaaacaacctggcagagatcctgcccccagccctgcaggacataaaggagctgcagcatgatgtgcagaaaacaaaagaagcctttctccaaaattccagtgtcctggatcgactcccacaacccgcagagtccagcacccacatgctcctcccgggccccctgcactctctccagagggctgcttatttggaaaagatgctgcttgtgaaagcaaatgaatttgagaatcatgtgctggcactgacagcccaatcacctgatattgaacatttgaatgaagtgagcctcaagctcccacttagtgacgtagctgtgaagacgttacaaaatatgaaccggcaatggattcgggccacggccacggcactggagcgctgcagtgagcttcagggaattggattgaatgaaaagtttctttattgctgtgaaaagtggatccaacttttggagaagatagaagaagcactcaaagtggatgtggctaacagccttcctgagctcctggagcagcagaaaacctataagatgttagaagctgaagtttctataaaccagacaattgctgattcctatgtcacccagtccttacaactcctggacacaacagaaatagagaacagaccagaatttattacagaattctcaaagctgacggatcggtggcagaatgctgtccagggtgttcggcagaggaagggtgacgttgatgggctgaacgcccatgtagccaggtgtggtggcgcatctcttaaaaaacaggaccttcgctactctctgcacactgcctgcggagcggccctgctctgcaggagcagtcacggagctaataaagaaattcattttcaaaggaggcgaactacctgtgccctaaccttggaagctggagaaaagttactgctcacaactgacctgaaaactaaagagtctgtgggtaggagaatcagtcaacttcaggacagctggaaagacatggagccccagctggcagagatgattaagcagttccagagcactgtagagacctgggaccagtgtgaaaagaaaatcaaggagttgaaaagcaggctgcaagttttaaaggcacaaagtgaagatcctcttccagagcttcacgaggacctccataacgaaaaagagctgattaaggtggccatacgtaaacaggagattgaagacagactcaatacatgggttgtattcaatgaaaaaaataaagagttgtgtgcctggctggtgcagatggaaaacaaagttctacagacagcggacattagtattgaagaaatgattgaaaagttacagaagagaacagttggaagagaggaggttccagagagatgggagtgtgagaccattgtcagtgggcatggtaccgaggagagttgctttctctccattagaaagtttcaccagggaaggggcttacatatccttacatgtcagctgataccccaagactgcatggaagaaataaacttgtttagtgaaaacaagttacagttaaagcagatgggtgaccagttgatcaaggccagcaacaaatcaagagcagctgagatcgatgacaagctcaacaaaattaacgatcgttggcaacatctttttgatgtcatcggatcaagtatggcagatcagacaaactccaggtggatgttttttcagtggccacgtggcatacagcgaaccgtcacttggccttgggaccacttgtgcagctgtgcttccactggccacacgggtcctttccatagcagtgtgctcagatgttttgaacaacacatagaatttggaatatacaggagaacctataaggtgaataaagaattgggaggtgataaaaacggacagagatgccccataatctacccgcatgggctggttcaatgtatacggctgggtgaacccctcatactgaagcgggtgaagaagctgaaggagacctttgcttttattcagcagttggacaaaaacatgagcaaccttcgcacctggttggctcgaattgagtctgagctttccaagcctgttgtttatgatgtctgcgatgatcaagagatccagaagaggctcgctgagcagcaggatctacagcgagatattgaacaacacagcgcaggggtggagtccgtgtttaacatctgtgacgtcctactgcacgactccgatgcctgtgcaaatgagaccgagtgtgactcgatccagcagaccaccaggagcctggacagacgctggaggaacatttgtgccatgtccatggagcggcgcatgaaaatcgaggagacgtggcgcctgtggcagaagtttttagacgactattctcgctttgaggactggctcaagtcagctgagaggacggcagcctgcccaaattcctcagaggtgttgtacacgagtgccaaagaggaactgaagaggtttgagcggcagattcatgagcggctcactcagctggagctcatcaacaagcagtaccggcggctggcccgggagaaccgcacagacacggccagcaggctgaagcagatggtccacgagggcaaccagcgctgggacaaccttcagaggcgggtcacagccgtcctgcggagactcaggcatttcaccaaccagagggaagaatttgagggcaccagggagagcattctggtgtggctcacagagatggacctgcagctgaccaacgtggagcacttctcagagagtgacgccgatgacaagatgcgccaactgaatggcttccaacaggaaattacattaaataccaacaagattgatcagctcattgtgtttggggagcagctgattcagaagagcgagcccctggatgctgtgctgattgaggatgagctggaggaactccaccgctactgccaggagggcttggaagatgaaaaggaggcctctgagaatgaaacagacatggaagaccccagagaaatccagactgattcttggcgtaaacggggagagagcgaggaaccgtcatctcctcagtccctgtgtcatctagtggccccagggcacgagcggtctggctgcgagacccctgtcagcgtggactccatccccctggagtgggaccacacaggcgacgtggggggctcctcctctcacgaagaggacgaggagggcccatactacagcgcactgtcaggtaaatccatttcggatggccactcgtggcatgttcccgacagcccttcctgtcccgagcatcactacaagcaaatggaaggtgacaggaatgttccacctgttccccctgcgtccagcaccccttataaaccaccctatgtaagtcttaacttcactgggagtacagcctatgtctgtgccttcgacagatgggagatgattcaagcacaggagcttcacaataagctcaaaataaaacaaaatttgcaacagctgaactctgatatcagcgccatcactacttggctgaaaaaaactgaagcagagctggaaatgttaaagatggcaaagcctccctctgatatccaggaaatagaactgagagtgaagagactgcaggagatactgaaagcctttgacacttacaaggcattagtggtctctgtcaacgtgagcagcaaggaatttctgcaaaccgagagccccgaatccacagagctccaaagtagactccgccagctgagcctgctctgggaagcagcacagggcgcagtggacagctggagagggggcttacgacagtcgctcatgcagtgccaggacttccaccagttgagtcaaaatctgctgctgtggttagcgagtgccaagaaccggaggcagaaggctcatgtcaccgatccaaaggcagacccccgggctctcctagagtgtcggagggaactaatgcaactggaaaaggagctggtagaacgtcaacctcaagtggacatgttacaggagatttcaaacagccttctcattaagggacatggagaagactgtattgaagctgaagaaaaggtgcatgttattgagaagaaactcaaacagttacgggagcaagtgtcccaagatttaatggccttgcagggaacccagaacccagcctcacccctgcccagcttcgacgaggtagactcgggggaccagcctcctgcaacatccgtgccagctccccgagcaaagtttctttacccagcagttcagagcagtgagaactacagaaggcgaggaggagacagagagcagggtccccggcagcacacggccacagcgctccttcctctcaagggtggtccgggcagccctacccctgcagctgctcctcctgctgctgctgctcctggcctgcctgctgccctcctccgaagaagactacagctgcactcaggccaacaactttgcccggtccttttaccccatgctgaggtacaccaatgggccaccccccacatagagggcatagctggccacagtgctacaccacctgcctga

SEQ ID NO: 29631 - DNA, 21777 bp, Homo sapiens
  source 1..21777: mol_type = unassigned DNA
gccaaggagcggagcgcgctcagctgcgcccagagccttcggccggacctgaaaaagcgagagggagagcgagcaaaaggcgcgatccagagagccaggcaagcggggcgccgacctcgggcggccccggcccgcgcccttgcccctcggccgggcggacgttcacttcttcaactgagatggacatgatataatctccattgagtcaaagaatggcatctagtcctgagcttcccaccgaagatgaacagggttcctggggcatcgacgatctccatatttcattgcaagctgaacaggaagacacccagaagaaagccttcacgtgctggataaactcacagttggccaggcacacttctccctcagttatatccgacctattcacagacattaaaaaggggcatgtcctcctggatctgctagaagtactttctgggcaacagttgcctcgggataaaggatctaataccttccagtgtagaatcaatatagaacatgccttgacattcctaagaaaccgatcaattaagctaataaatattcatgttactgatatcattgatggaaacccatccattatccttggcctaatttggacaattatcctgcactttcatattgagaagcttgcccagactctttcttgcaattacaatcagccttccctggatgatgtgagtgtggttgactcatctcctgcctcaagtcctccagctaagaaatgctctaaagtgcaagcaagatggcaaatgtctgcaagaaaggcccttcttttgtgggctcaggaacaatgcgccacctatgagtctgtcaatgtgaccgattttaagtcaagttggagaaatgggatggcttttttggccatcattcatgccttgcgaccagacctaattgacatgaagagtgtgaagcatagatccaacaaagacaatctgagagaggccttcagaattgcagaacaagaattaaaaatccccagattgctggaaccagaagatgtggatgttgttgatcctgatgaaaagtccatcatgacctatgtggcacagtttctgcagtattccaaagatgcccctgggactggagaggaggctcagggaaaggtgaaagatgctatgggctggttaactctgcaaaaggaaaaactacagaagttgctaaaggattcagagaatgatacctactttaaaaagtataatagcctgctgtcctttatggagtcattcaatgaagaaaaaaagtcctttttggatgtcctgtcaataaaacgggatctggatgagctggacaaggatcatttacagttgagagaagcctgggatggcctcgatcaccagattaatgcatggaaaataaagctaaattatgccttgcccccacccctccatcaaactgaagcttggctccaggaggtagaagagcttatggatgaagatttgtcagcctcccaggatcactctcaagccgtgactctgatacaagagaaaatgactttattcaagagcctgatggatagatttgagcatcattcgaacattctccttacctttgaaaataaggatgaaaatcacttgccattggtaccacctaacaaattggaggaaatgaaaagacgaatcaacaacattttggagaaaaaatttattctacttctagaatttcattactacaagtgcttagttcttggtttggtagatgaagtgaaatcaaaattggatatttggaacattaaatatgggagcagagaatctgtggaattattgctggaagactggcataaatttattgaagaaaaagaattcctagctcgacttgatacttcttttcaaaaatgtggagaaatttataagaatttggctggagaatgtcagaatattaataaacagtatatgatggtgaaatctgatgtttgtatgtatagaaaaaatatatataatgtgaagtccactctacaaaaagtgctggcatgttgggctacttatgtggaaaaccttcgcttactaagggcttgctttgaggagacaaagaaggaagaaattaaagaggtaccctttgagacactagcccagtggaatctagaacacgctactttaaatgaagcaggaaatttcttagtcgaagtcagcaatgatgtggttggatcatctatttctaaagaactgagaaggctgaataaaagatggagaaagttggtttcaaaaactcaacttgaaatgaacctgccactgatgataaaaaaacaggatcagcccacttttgacaattctggaaatattctatctaaagaagagaaagcaactgttgagttttcaacagatatgtcagtagaacttcctgaaaattataatcaaaatataaaggctggagagaaacatgaaaaagaaaatgaagaattcacagggcaactaaaagtggctaaagatgttgaaaaactcattggacaagtggaaatctgggaggcagaagccaaatctgttttggatcaagatgatgtggacacctcaatggaagaatctttgaagcatcttattgccaaaggctctatgtttgatgagcttatggcaagaagtgaagatatgttacaaatggatatacaaaatatttcaagccaggagtcctttcaacatgttctcacaactgggcttcaggcaaagattcaagaagctaaagagaaagtccagatcaatgtggtaaaactcattgcagcgttgaagaacttaactgacgtttcaccagatttggacatcaggctgaagatggaagaatcccagaaggaacttgaatcatatatgatgagggctcagcagttactggggcaaagagagagccccggtgaactcatttcaaaacacaaggaagcactaataatttctaatacaaaaagtctggccaagtatttgaaagctgttgaagaactaaaaaataatgtaactgaggacataaagatgtctttagaagaaaagagtagagatgtctgtgccaaatgggagtctcttcatcatgaactgtctttatatgttcaacaactaaaaatagatattgaaaaaggaaagcttagtgacaatattttaaaacttgaaaagcaaataaataaagaaaagaaacttatccgtagaggaaggaccaagggtctcatcaaagaacatgaggcctgcttttctgaggaaggctgcctgtaccagcttaatcaccacatggaagtcctgagggagctgtgtgaagagctgccttcacagaagagtcaacaagaagtgaagagactactcaaagattatgaacaaaagatagaaagacttctgaaatgtgcttccgagattcatatgacactgcagcccacagcgggaggcacgtcgaaaaacgaggggaccatcaccacatctgagaatagaggaggggatccccacagtgaggcaccatttgcaaaatcagataatcagccatcaactgaaaaggcaatggaacccactatgaagtttagcctggcatcagtgttaaggcctctgcaagaagaaagcattatggaaaaggattacagtgcatctataaatagtttactagagaggtatgatacatacagagatattcttgaacaccacctgcaaaacaacaaattcaggattacttctgatttctctagtgaagaggacaggagtagttcttgtctgcaggctaaactgacagatctacaggtcataaaaaatgaaactgatgctcgctggaaagagtttgaaattatttcattgaagttagaaaatcatgtgaatgacataaaaaagccttttgtaattaaggaaagagacacactaaaggaaagagaaagagagcttcagatgactcttaataccagaatggaatctttagagacagcactgcggcttgtgttacctgtagagaaggcatcacttcttctctgtggctcggacctgcctctccataaaatggccatccagggatttcatctcattgatgctgatcgcatctatcaacacctaaggaatatccaagattccatagcaaaacagattgaaatatgtaaccgcttagaagagccaggcaactttgtattaaaggagttacacccatttgatctacacgcaatgcagaatattatactgaaatacaaaacacaatttgaaggaatgaaccacagggtgcagaggagtgaagatactctcaaagctctggaagactttttggcgtctctcagaacagctaaactctctgctgagcccgttacagacctttcagcctcagatacacaggtggcacaagaaaatacgttgacagtaaaaaataaagagggagaaattcatctgatgaaagacaaggccaaacatttggataaatgtttgaagatgctcgatatgagctttaaagatgctgaacggggtgatgacacctcctgtgaaaacctgcttgatgctttttcaataaagttatctgagacacatggctatggggtacaggaggaattcactgaggaaaacaaattactagaggcttgtattttcaaaaataatgaactccttaaaaatattcaagatgtgcagagtcaaatcagtaaaattggtcttaaggatcctactgttccagctgtgaaacatcggaaaaaatcattaatcagactggataaggttctagatgaatatgaagaagagaagagacatttacaagaaatggctaattctcttccacacttcaaagatggcagagaaaaaaccgtgaatcaacagtgccaaaatacagtagtcttgtgggagaataccaaagccttggtcaccgaatgtcttgaacaatgtgggagagttttggagctcttaaaacaatatcagaattttaaaagcatcttgacaactttgattcaaaaagaagagagtgtcatctccctgcaggcttcgtacatgggaaaggagaacctgaagaaaaggatagcagagattgaaattgtcaaagaagaatttaatgagcatttagaagttgtagacaagataaaccaggtctgcaaaaatctacaattttatctaaataaaatgaaaacttttgaagagcccccttttgaaaaagaggctaatattattgtggatagatggcttgatataaatgagaagacagaagattactatgaaaatcttggtcgagctctagctttgtgggacaaactttttaacttaaaaaatgtcattgatgagtggacagaaaaggcccttcaaaaaatggaattacatcaattgactgaagaggacagagaaaggctgaaggaagaattacaagtccatgaacaaaaaacttcagaattttctagaagagtggctgaaatacagtttttgctccaaagcagtgaaatacctcttgaattgcaggtcatggagtcctctattttgaacaagatggaacatgtacagaagtgcttaacaggagaatccaactgccatgcactcagtggcagcactgctgagctaagggaggatctcgaccaagccaagacccagatcgggatgactgaatccctcttaaaagccctgtctccttctgacagcttggagatcttcactaaactagaggagatacaacagcagattctacagcaaaaacacagtatgatattacttgagaatcaaataggttgtctgactcctgaactctctgaattgaaaaagcaatatgaaagtgtcagtgatttatttaataccaaaaaaagtgttttgcaagatcacttttctaagttattgaatgatcaatgcaagaactttaatgactggttcagcaacattaaagtgaaccttaaggagtgttttgaatcatcagaaacaaaaaagagtgtggaacaaaagctacaaaaactttctgatttcttgactcttgaaggaagaaacagtaaaataaagcaggtggacagcgtactgaagcatgtgaagaagcatctgcccaaagcacatgtgaaggagcttatcagttggctcgtgggtcaggaattcgaattagaaaaaatggagtccatatgccaggctcgagcaaaggagcttgaagactccttgcagcagctactgagactccaggatgaccatagaaacctgaggaagtggttgactaatcaagaagagaaatggaaaggaatggaagaaccaggggagaaaactgagctgttctgccaagctttagctagaaagagggaacagtttgaatctgtggcccaattgaacaactctttgaaggaatatgggtttactgaagaagaagaaataataatggaagcaacatgtttgatggatagataccagacattactgagacaactaagtgaaatcgaggaagaggataagttactacccacagaggaccagagctttaatgatcttgcacatgatgtaattcattggataaaagagattaaagagtcccttatggttttgaattcatccgaaggcaaaatgccacttgaggaaagaatccaaaaaatcaaggaaatcattttgctgaagcctgaaggggatgccagaatagagaccatcatgaagcaggctgagagcagcgaggccccgctggttcagaagaccctcactgacatcagcaaccagtgggacaacacactccatttagctagcacctacctaagccatcaagaaaagcttctactagaaggagagaaatatttacaaagtaaggaggatctgagattaatgctcatagaactaaagaagaaacaggaagcaggctttgctctacaacatggtctgcaggagaagaaagctcagttaaagatttataagaaattcctcaagaaagcccaagatttgacatccttgctaaaggagttaaaatctcagggaaactacctcttggagtgcactaaaaatcccagcttcagtgaagagccttggctggaaataaagcatctacacgaaagtcttcttcaacaactgcaggattctgtgcaaaacttggacggtcacgttcgagaacatgattcataccaggtttgcgtcacagacctgaatactacattggacaatttctccaaggaatttgtcagtttttctgataagcctgtggatcaaatagcggttgaggaaaaattgcagaaactgcaggaactagagaatagactcagtttacaagatggcacattaaagaagattttagctttagcaaaatccgtcaagcaaaatacatcttcagtggggcagaagattattaaagatgatataaaatcacttcagtgtaaacaaaaagatttggaaaacaggcttgcatctgctaagcaggagatggaatgttgtctcaacagcattctcaaatcaaaacgctcaacagaaaagaaaggaaagtttactctgccaggcagagagaagcaggccacttctgatgtgcaggagtctactcaggaatcagctgcagtggaaaagttggaggaagactgggaaataaacaaggattcagctgtggaaatggctatgtcaaaacaactttctcttaatgctcaagaaagcatgaaaaacactgaagatgagcggaaagtcaatgagctgcaaaatcaacctttagaattagatactatgttaagaaatgaacaattagaagagatagagaaattatatacccagttggaagcaaagaaagcagccattaagccactggaacaaacagaatgtcttaacaaaacagaaactggggccttggttctccacaatataggatattcggcacagcatttggacaatttgcttcaggcacttattactttgaagaaaaacaaagaaagccaatattgtgtcctcagagattttcaggaataccttgctgcagttgaatcttcaatgaaagccttgttgacagacaaggaaagtcttaaagtaggaccactggacagtgtaacgtatctggacaaaattaaaaaattcatagcatccatagaaaaagagaaagattctttaggcaacttgaaaatcaaatgggagaatttatcaaaccacgtgactgacatggataagaaattgttggaaagccagattaagcaacttgaacatggttgggaacaagtggaacagcagattcaaaagaagtattctcagcaggtagtggaatatgatgaatttacaaccctcatgaataaggtacaggacactgagatttctctgcaacagcagcagcaacatctacagttaaggctgaagtctccagaagaacgggcagggaaccaaagcatgattgccttgaccactgacctccaggctaccaagcatggattttctgttttaaaggggcaagctgaacttcagatgaagaggatttggggagaaaaagaaaagaagaatttggaggatggaataaataacttgaagaaacaatgggaaacattggagccattacacttagaagcagaaaatcagattaagaagtgtgacataaggaacaagatgaaagagactatcttatgggccaagaatttgttgggtgaacttaatccctccattccccttctcccagatgacattctttcacagatcagaaagtgcaaagtgacacatgatggcattctagctaggcagcagtctgtggaatcgttggctgaagaggtcaaagataaggttcctagccttacaacctatgagggcagtgatttaaataataccctagaggacttacggaatcaataccaaatgctggttttaaaatcaactcaaagatcacagcaattagaatttaagttggaagaaagaagcaatttttttgctataataaggaagtttcaacttatggttcaagaaagtgaaacactgataattcccagggtggagacagctgccacggaagctgaactaaaacatcaccatgttactttggaggcatctcagaaggaattgcaagaaattgacagtggaatctcaacacatcttcaggagctaacaaacatctatgaggagctgaatgtgtttgaaagattatttctggaagatcagttgaaaaatcttaagattaggaccaacagaatacaaagattcattcagaatacatgtaatgaagtggaacacaagataaagttttgcagacaattccatgaaaaaacatcagcgcttcaggaggaggctgacagtatacagcgcaatgaactattacttaatcaagaagtaaataaaggtgttaaagaggagatctataatcttaaagacagactcaccgctattaagtgttgcatcttacaggtattgaaacttaaaaaagtgtttgactatattggactaaactgggatttttcacaacttgaccaattacaaacccaagtatttgaaaaagaaaaggaacttgaagaaaaaattaagcagttggacacatttgaggaagaacatggcaaatatcaggcattattaagtaaaatgagagctattgatttgcaaattaagaaaatgactgaagtagtactaaaagctcctgatagctctccggaaagcagacggctcaatgcccaaattttaagtcagagaattgagaaagccaagtgtttatgtgatgagataataaagaaattaaatgaaaataagacctttgatgactcattcaaggagaaagaaatactacaaataaagctgaatgcagaagaaaatgataagttatacaaagttctccaaaacatggtattagaactctcaccaaaagaattggatgaaaagaattgtcaggacaaactagaaacttccttacatgttttaaatcagataaaatctcaattacagcagccattacttataaatttggaaattaaacatattcaaaatgaaaaggacaattgtgaagcatttcaggagcaagtttgggcagaaatgtgtagtattaaagctgtgactgctattgagaaacaaagagaagaaaactcttctgaagcgagtgatgtggagacaaaactacgtgagtttgaagatcttcagatgcagcttaacacaagcattgatttgcgcacaaatgtcttgaatgatgcttatgaaaatctaacacgctataaagaagcagtcaccagggcagtggagagcatcacttccctcgaagccatcattataccctacagagtagatgttggtaatccagaagaatctttagagatgcctcttcgaaaacaagaggaattggaatccacagtagcacacatccaggacctcactgagaaactgggaatgatatccagccccgaagccaaactacaacttcagtatactttacaggaactagtttctaagaactcagcaatgaaggaagctttcaaagcacaggaaactgaggcagaaaggtatcttgagaattacaaatgctatagaaaaatggaagaggatatttacactaacctcagcaaaatggagacagttcttggacagtccatgtcctcgttgccactgtcttacagagaagctttagagcgcttggaacagagcaaggccttggtgtcaaatcttatatcaaccaaagaagagttaatgaaactacgacagatccttagactcttgagactcaggtgcacagaaaatgatggcatatgtttgctcaagattgtgtcggctctgtgggagaaatggctgagtttgctggaagctgctaaagagtgggagatgtggtgcgaagaactgaagcaggaatggaaatttgtcagtgaagaaattgaacgagaggcaattattttagataatcttcaggaagaactccctgaaatttccaaaacaaaagaggcagccaccacagaggaactctctgagctgctagactgtttatgccaatatggagagaacgtggagaagcaacagctgttactgactctacttcttcagcgcatcagaagtatccagaatgttcctgaaagctcaggggctgtggaaactgttccagcatttcaagaaattacttctatgaaagaacgatgcaacaagcttcttcagaaagttcagaaaaataaagaattggtgcagactgaaatccaagaaagacattccttcacaaaagagataattgctttgaagaatttctttcaacagaccacaacttcattccaaaatatggcattccaggatcacccagaaaagtcagaacaatttgaggagcttcaaagcatccttaagaaagggaaactaacttttgagaatattatggaaaaactgcgaatcaagtattccgaaatgtacaccatagtccctgcagagattgaatcccaggtggaagaatgcagaaaagctttagaagacatagatgagaagattagcaatgaagtcttaaaaagctcaccatcatatgcaatgaggagaaaaatagaagaaattaacaatgggcttcataatgttgaaaagatgttgcagcagaaaagcaaaaatattgagaaagctcaagaaattcaaaagaaaatgtgggacgagttagatctatggcattccaaactaaatgagctggattctgaagttcaggacattgttgaacaggacccaggacaggctcaagaatggatggataacttgatgattcctttccagcagtatcagcaagtatcacagagagcagagtgtagaacctcacagttgaataaggccacagttaagatggaggaatatagtgaccttctgaagagcactgaggcttggatagaaaataccagtcatttgctggccaatcctgctgactatgactctttgaggacactgagtcaccatgctagcactgtgcagatggctttggaagattcagaacagaagcacaatcttttacattcaatctttatggatctagaagacctgtcaataatttttgaaacagatgaattaacccaatccatacaagagttaagtaatcaagtaacagctttacaacaaaaaataatggaaagccttccacagattcagcgaatggctgatgatgtggttgctattgaatctgaagtaaaatcaatggaaaaaagagtttcaaaaatcaaaactatcctattatcaaaagaaatatttgatttttcacctgaagaacatctcaaacatggggaggtcatacttgaaaatatacgtcccatgaagaaaaccattgctgagatagtgtcttaccaagtggaactgaggttgccccaaacaggaatgaaacctctgcctgtgtttcagcggacaaatcagcttttacaagatataaaactattggaaaatgtgactcaagaacaaaatgagttattaaaggtagtcataaaacagaccaatgaatgggatgaagaaatagaaaatttgaaacagatcttaaataattattcagctcagttctcccttgaacatatgtcaccagaccaagctgacaagctgccacaactacagggagaaatcgaacgtatggagaaacagattctgagtttgaaccagagaaaagaagacctgttggtggacttgaaggccaccgtactaaaccttcaccagcatttgaagcaagaacaagaaggagtagaaagagataggctgccagctgtaacatcagaggaaggtggagtggcagagagggatgcttctgagcggaagttgaacagaagaggctccatgtcttacctggcagcagtcgaggaagaggtggaagaaagttccgtgaagagcgataatggagatgagaaggcagagccatcgcctcagtcttggtcttcactttggaagcatgacaaggacatggaagaagacagagcttcctcatcctctggaacaattgttcaggaagcatatgggaaaataagcacctctgataattccatggcacaaatcctcacaccagactcactaaacactgagcaaggcccagaatgttccctaaggcccaaccaaacagaagagggcaccacacctcctattgaggctgacactctggactcttctgacgcgcaaggaggtttggagcccagggtggagaaaactaggccggagcccacagaagtcctgcatgcctgcaagacccaggtggccgagctggagctgtggctgcaacaagccaacgtggcagttgagccggaaacattaaacgcagacatgcagcaggtgctggaacagcagctggtagggtgccaggctatgctaacagagattgagcacaaggttgcctttctgttagagacttgcaaagatcagggcctgggagataatggagccactcaacatgaggctgaagcgctttccctgaaactgaaaacagtgaagtgcaatttagaaaaagtccagatgatgcttcaggagaagcacagtgaagatcagcatcctaccattctaaagaaatcctcagagccagagcatcaagaagctctccaaccagttaacctttctgaattggaatccattgtaactgaaaggccacaattcagcagacaaaaagatttccagcagcaacaggttctggagttaaaaccaatggaacagaaagatttcatcaaattcatagaatttaatgctaagaaaatgtggccccagtattgccaacatgataacgatacaactcaggaatcatctgcaagcaaccaggcatccagccctgaaaatgacgttccagactcgatcttgtcaccccagggccaaaatggagataagtggcaatatctgcatcatgaactctcatcaaaaataaagctcccactccctcagcttgtggagcctcaggtttccacaaatatgggtattctacccagcgtgactatgtataactttagatacccaacaactgaagaactgaaaacctataccacccaacttgaagacctgcgccaagaagcaagtaaccttcagacacaggaaaatatgacagaagaagcatatatcaatttggataaaaaattgtttgaactattcctgaccctcagtcagtgcctcagcagtgtggaggagatgctggagatgcccagactttacagggaggatggttctggccagcaggtgcactacgagacgctggctcttgagttgaagaaactttatttagcgctaagtgacaagaagggtgatcttttgaaagccatgacttggcctggcgagaacaccaacttgctccttgaatgttttgacaaccttcaagtctgcctggagcacactcaggctgcagctgtctgtagaagcaagtccctgaaagctggcctcgattacaaccgcagttaccagaatgaaataaagagattatatcatcagctcattaagagtaagacatctttacaacagtctttgaatgaaatcagtgggcagagtgttgctgaacagcttcagaaagcagatgcatatacagtggagctggagaacgccgagagccgagtggccaaactaagagatgaaggggagaggcttcatttaccttatgctttactccaggaggtttacaaattagaggatgtacttgacagtatgtggggaatgctaagagccaggtacacagaactcagcagccctttcgtcactgagagccagcaagatgctttgttgcaaggcatggtggaactggtgaagattgggaaggaaaagcttgctcatggccacttaaaacaaaccaaaagtaaagtggcgttacaggctcaaatagaaaatcacaaggtttttttccagaagcttgttgctgacatgttgttgatccaagcatactctgccaaaatacttccttctttattgcaaaacagagagacattttgggcagaacaagtaacagaagttaaaatactagaagaaaagtcacgccaatgtggtatgaagctgcagagtttgttgcagaaatgggaagaatttgatgaaaactatgcatctcttgaaaaggacctggaaattcttatatctacattgccctctgtgagtttggtggaagaaacagaggaaagattagtggaaaggatttcattttaccagcaaataaaaagaaacattggtggaaaacacgcccggctttaccaaactctgaacgaaggcaaacagttggtggcgtctgtgagctgtcctgaattagagggccagatcgcaaaactggaagagcagtggttgtccctgaacaagaaaattgaccatgagctccacaggctgcaagctcttctcaagcatctgctcagttataacagagattcggatcagttaaccaagtggttggaatcttcccagcatactctgaattactggaaagaacagtccctcaatgtgtctcaggacttggatacaatcagaagcaacatcaacaatttttttgagttttcaaaagaagttgatgaaaaatcctccttgaagactgccgttatcagtatcgggaaccagcttcttcacctgaaagaaactgatacagctacactgagagcttctttagcacagtttgaacaaaaatggacaatgctcataactcaacttccagatattcaagaaaaacttcaccagcttcaaatggagaaattgccgtctcgtaaagcaatcacagaaatgattagctggatgaacaatgtggagcatcaaacttcagatgaagactccgtgcattcaccaagttctgcatctcaagttaaacatcttcttcagaagcacaaggagtttagaatggaaatggactataaacagtggatagttgacttcgttaaccagtcattacttcagctaagcacctgtgatgtagaaagcaagcgctatgaaagaacggagtttgcagagcacctgggggagatgaaccgccagtggcaccgtgtacatggaatgctgaatagaaagatacaacatttagaacaacttctagaaagtatcactgagagtgaaaataaaatacagatcttgaacaactggctggaagcacaagaagagagactgaaaactttacaaaaacctgaaagtgtgatctcagtgcagaagctgctcctggactgtcaggatatagaaaatcaacttgcaattaaatccaaagcactagatgagttgaaacaaagttatctgactttggagagtggggcagtgccattgttagaagatacagcatcccgaattgatgagttatttcaaaagagaagcagtgttctcactcaggtcaatcagctcaaaacctccatgcagtcagttttacaggagtggaagatttatgatcaactctatgatgaagtgaatatgatgacaatccgattctggtactgcatggaacacagcaagcctgtggtgttatcattggagaccttgagatgccaggtggagaaccttcagtctctgcaagatgaagctgagagcagtgaagggagttgggagaaactccaggaggttatcggcaaactcaaaggtctctgcccctctgttgctgaaataatcgaagagaaatgccaaaatactcataaaaggtggactcaggtgaaccaagccattgcagaccagttgcagaaggcccagagtctgctccagctctggaaggcctatagcaatgctcatggtgaagctgccgcaaggctgaagcagcaggaagcaaagtttcaacagctcgcaaacatcagcatgtctggaaacaacctggcagagatcctgcccccagccctgcaggacataaaggagctgcagcatgatgtgcagaaaacaaaagaagcctttctccaaaattccagtgtcctggatcgactcccacaacccgcagagtccagcacccacatgctcctcccgggccccctgcactctctccagagggctgcttatttggaaaagatgctgcttgtgaaagcaaatgaatttgagtttgttctctcacagtttaaggattttggagtccggctggaatctttaaaaggtcttattatgcatgaagaagagaatttggatagacttcaccaacaggaaaaagaaaatcctgactcattcctgaatcatgtgctggcactgacagcccaatcacctgatattgaacatttgaatgaagtgagcctcaagctcccacttagtgacgtagctgtgaagacgttacaaaatatgaaccggcaatggattcgggccacggccacggcactggagcgctgcagtgagcttcagggaattggattgaatgaaaagtttctttattgctgtgaaaagtggatccaacttttggagaagatagaagaagcactcaaagtggatgtggctaacagccttcctgagctcctggagcagcagaaaacctataagatgttagaagctgaagtttctataaaccagacaattgctgattcctatgtcacccagtccttacaactcctggacacaacagaaatagagaacagaccagaatttattacagaattctcaaagctgacggatcggtggcagaatgctgtccagggtgttcggcagaggaagggtgacgttgatgggctggtgaggcagtggcaagatttcactacttctgtggagaacttgtttcgcttcctcactgacaccagccacctgctatctgcagtgaagggccaggagcgcttcagcctctaccaaaccagaagtctgatccatgagctgaagaataaagaaattcattttcaaaggaggcgaactacctgtgccctaaccttggaagctggagaaaagttactgctcacaactgacctgaaaactaaagagtctgtgggtaggagaatcagtcaacttcaggacagctggaaagacatggagccccagctggcagagatgattaagcagttccagagcactgtagagacctgggaccagtgtgaaaagaaaatcaaggagttgaaaagcaggctgcaagttttaaaggcacaaagtgaagatcctcttccagagcttcacgaggacctccataacgaaaaagagctgattaaggaactagaacagtctttggctagctggactcagaacttgaaagaacttcaaactatgaaggcggacttaacccggcacgttctcgtggaagatgtgatggttttgaaggagcaaatagagcatttgcacagacaatgggaggacctctgcttaagggtggccatacgtaaacaggagattgaagacagactcaatacatgggttgtattcaatgaaaaaaataaagagttgtgtgcctggctggtgcagatggaaaacaaagttctacagacagcggacattagtattgaagaaatgattgaaaagttacagaaggactgcatggaagaaataaacttgtttagtgaaaacaagttacagttaaagcagatgggtgaccagttgatcaaggccagcaacaaatcaagagcagctgagatcgatgacaagctcaacaaaattaacgatcgttggcaacatctttttgatgtcatcggatcaagggtgaagaagctgaaggagacctttgcttttattcagcagttggacaaaaacatgagcaaccttcgcacctggttggctcgaattgagtctgagctttccaagcctgttgtttatgatgtctgcgatgatcaagagatccagaagaggctcgctgagcagcaggatctacagcgagatattgaacaacacagcgcaggggtggagtccgtgtttaacatctgtgacgtcctactgcacgactccgatgcctgtgcaaatgagaccgagtgtgactcgatccagcagaccaccaggagcctggacagacgctggaggaacatttgtgccatgtccatggagcggcgcatgaaaatcgaggagacgtggcgcctgtggcagaagtttttagacgactattctcgctttgaggactggctcaagtcagctgagaggacggcagcctgcccaaattcctcagaggtgttgtacacgagtgccaaagaggaactgaagaggtttgaggcctttcagcggcagattcatgagcggctcactcagctggagctcatcaacaagcagtaccggcggctggcccgggagaaccgcacagacacggccagcaggctgaagcagatggtccacgagggcaaccagcgctgggacaaccttcagaggcgggtcacagccgtcctgcggagactcaggcatttcaccaaccagagggaagaatttgagggcaccagggagagcattctggtgtggctcacagagatggacctgcagctgaccaacgtggagcacttctcagagagtgacgccgatgacaagatgcgccaactgaatggcttccaacaggaaattacattaaataccaacaagattgatcagctcattgtgtttggggagcagctgattcagaagagcgagcccctggatgctgtgctgattgaggatgagctggaggaactccaccgctactgccaggaggtgtttggaagggtctcccggttccaccggcggctcacctcctgcactccgggcttggaagatgaaaaggaggcctctgagaatgaaacagacatggaagaccccagagaaatccagactgattcttggcgtaaacggggagagagcgaggaaccgtcatctcctcagtccctgtgtcatctagtggccccagggcacgagcggtctggctgcgagacccctgtcagcgtggactccatccccctggagtgggaccacacaggcgacgtggggggctcctcctctcacgaagaggacgaggagggcccatactacagcgcactgtcaggtaaatccatttcggatggccactcgtggcatgttcccgacagcccttcctgtcccgagcatcactacaagcaaatggaaggtgacaggaatgttccacctgttccccctgcgtccagcaccccttataaaccaccctatggaaagctactattacctccaggcacggatggtggcaaagaaggcccgcgagtcctgaatggcaacccacagcaggaagacgggggactggccggtatcacagagcagcagtcaggtgccttcgacagatgggagatgattcaagcacaggagcttcacaataagctcaaaataaaacaaaatttgcaacagctgaactctgatatcagcgccatcactacttggctgaaaaaaactgaagcagagctggaaatgttaaagatggcaaagcctccctctgatatccaggaaatagaactgagagtgaagagactgcaggagatactgaaagcctttgacacttacaaggcattagtggtctctgtcaacgtgagcagcaaggaatttctgcaaaccgagagccccgaatccacagagctccaaagtagactccgccagctgagcctgctctgggaagcagcacagggcgcagtggacagctggagagggggcttacgacagtcgctcatgcagtgccaggacttccaccagttgagtcaaaatctgctgctgtggttagcgagtgccaagaaccggaggcagaaggctcatgtcaccgatccaaaggcagacccccgggctctcctagagtgtcggagggaactaatgcaactggaaaaggagctggtagaacgtcaacctcaagtggacatgttacaggagatttcaaacagccttctcattaagggacatggagaagactgtattgaagctgaagaaaaggtgcatgttattgagaagaaactcaaacagttacgggagcaagtgtcccaagatttaatggccttgcagggaacccagaacccagcctcacccctgcccagcttcgacgaggtagactcgggggaccagcctcctgcaacatccgtgccagctccccgagcaaagcagttcagagcagtgagaactacagaaggcgaggaggagacagagagcagggtccccggcagcacacggccacagcgctccttcctctcaagggtggtccgggcagccctacccctgcagctgctcctcctgctgctgctgctcctggcctgcctgctgccctcctccgaagaagactacagctgcactcaggccaacaactttgcccggtccttttaccccatgctgaggtacaccaatgggccaccccccacatagagggcatagctggccacagtgctacaccacctgcctgattgccaagggtgcccagcacgtggccccagaccaatctgagtgacttagtgttggcaaggtcccgggacctgtgcagacttcttctgggcttacccagcacgggctccctggagcccagggcagctttcagattgtgttcctccccaggagcagggaacctgtgtggcaggtgccccgggtattttggcagaactagttgattagtttagggatctctggaaatgtcagtttcctgaagagccaagcactttgtgaattctggtttgtttgtaaaacagcattattataatgtaggtatggtcaatgagcagtggtgtccatcacatatattatagaagcaagcgaggacattccaccctagaaatggttcagaaactcataggcacccttagctgatggaaacaatcaatcatatttaatacgcttagaatcagttttactccaatcagctggcaattttgagctgccggttatacaccaaaatgttctgttcagtacctagctctgctcttttatattgctttaaatttttaaagaaattgtattgcatggatgtggttatttgtgcatattttttaacaatgcccaatctgtatgaataatgtaaacttcgatttttttttaaaaaaattagattttagctggagcttttgactaatgtaaagtaaatgccaaactaccgacttgatagggatgtttttgtaagttaattttctaagactttttcacatccaaagtgatgctttgctttgggttttaactgtttggccacggcgggggtgggggcggggggttggtacagaaacttgaagctgtttgtgatatgtacaactcagatgtttctcattaaaaaacaaaattagccaga

SEQ ID NO: 29632 - DNA, 985 bp, Homo sapiens
  source 1..985: mol_type = unassigned DNA
agagccttcggccggacctgaaaaagcgagagggagagcgagcaaaaggcgcgatccagagagccaggcaagcggggcgccgacctcgggcggccccggcccgcgcccttgcccctcggccgggcggacgttcacttcttcaactgagatggacatgatataatctccattgagtcaaagaatggcatctagtcctgagcttcccaccgaagatgaacagggttcctggggcatcgacgatctccatatttcattgcaagctgaacaggaagacacccagaagaaagccttcacgtgctggataaactcacagttggccaggcacacttctccctcagttatatccgacctattcacagacattaaaaaggggcatgtcctcctggatctgctagaagtactttctgggcaacagttgcctcgggataaaggatctaataccttccagtgtagaatcaatatagaacatgccttgacattcctaagaaaccgatcaattaagctaataaatattcatgttactgatatcattgatggaaacccatccattatccttggcctaatttggacaattatcctgcactttcatattgagaagcttgcccagactctttcttgcaattacaatcagccttccctggatgatgtgagtgtggttgactcatctcctgcctcaagtcctccagctaagaaatgctctaaagtgcaagcaagatggcaaatgtctgcaagaaaggcccttcttttgtgggctcaggaacaatgcgccacctatgagtctgtcaatgtgaccgattttaagtcaagttggagaaatgggatggcttttttggccatcattcatgccttgcgaccagacctaattgacatgaagagtgtgaagcatagatccaacaaagacaatctgagagaggccttcagaattgcagaacaagaattaaaaatccccagattgctggaaccagaagcttacaaaaacttctga

SEQ ID NO: 29633 - DNA, 21878 bp, Homo sapiens
  source 1..21878: mol_type = unassigned DNA
gtttgccgctttccgagcgccaaggagcggagcgcgctcagctgcgcccagagccttcggccggacctgaaaaagcgagagggagagcgagcaaaaggcgcgatccagagagccaggcaagcggggcgccgacctcgggcggccccggcccgcgcccttgcccctcggccgggcggacgttcacttcttcaactgagatggacatgatataatctccattgagtcaaagaatggcatctagtcctgagcttcccaccgaagatgaacagggttcctggggcatcgacgatctccatatttcattgcaagctgaacaggaagacacccagaagaaagccttcacgtgctggataaactcacagttggccaggcacacttctccctcagttatatccgacctattcacagacattaaaaaggggcatgtcctcctggatctgctagaagtactttctgggcaacagttgcctcgggataaaggatctaataccttccagtgtagaatcaatatagaacatgccttgacattcctaagaaaccgatcaattaagctaataaatattcatgttactgatatcattgatggaaacccatccattatccttggcctaatttggacaattatcctgcactttcatattgagaagcttgcccagactctttcttgcaattacaatcagccttccctggatgatgtgagtgtggttgactcatctcctgcctcaagtcctccagctaagaaatgctctaaagtgcaagcaagatggcaaatgtctgcaagaaaggcccttcttttgtgggctcaggaacaatgcgccacctatgagtctgtcaatgtgaccgattttaagtcaagttggagaaatgggatggcttttttggccatcattcatgccttgcgaccagacctaattgacatgaagagtgtgaagcatagatccaacaaagacaatctgagagaggccttcagaattgcagaacaagaattaaaaatccccagattgctggaaccagaagatgtggatgttgttgatcctgatgaaaagtccatcatgacctatgtggcacagtttctgcagtattccaaagatgcccctgggactggagaggaggctcagggaaaggtgaaagatgctatgggctggttaactctgcaaaaggaaaaactacagaagttgctaaaggattcagagaatgatacctactttaaaaagtataatagcctgctgtcctttatggagtcattcaatgaagaaaaaaagtcctttttggatgtcctgtcaataaaacgggatctggatgagctggacaaggatcatttacagttgagagaagcctgggatggcctcgatcaccagattaatgcatggaaaataaagctaaattatgccttgcccccacccctccatcaaactgaagcttggctccaggaggtagaagagcttatggatgaagatttgtcagcctcccaggatcactctcaagccgtgactctgatacaagagaaaatgactttattcaagagcctgatggatagatttgagcatcattcgaacattctccttacctttgaaaataaggatgaaaatcacttgccattggtaccacctaacaaattggaggaaatgaaaagacgaatcaacaacattttggagaaaaaatttattctacttctagaatttcattactacaagtgcttagttcttggtttggtagatgaagtgaaatcaaaattggatatttggaacattaaatatgggagcagagaatctgtggaattattgctggaagactggcataaatttattgaagaaaaagaattcctagctcgacttgatacttcttttcaaaaatgtggagaaatttataagaatttggctggagaatgtcagaatattaataaacagtatatgatggtgaaatctgatgtttgtatgtatagaaaaaatatatataatgtgaagtccactctacaaaaagtgctggcatgttgggctacttatgtggaaaaccttcgcttactaagggcttgctttgaggagacaaagaaggaagaaattaaagaggtaccctttgagacactagcccagtggaatctagaacacgctactttaaatgaagcaggaaatttcttagtcgaagtcagcaatgatgtggttggatcatctatttctaaagaactgagaaggctgaataaaagatggagaaagttggtttcaaaaactcaacttgaaatgaacctgccactgatgataaaaaaacaggatcagcccacttttgacaattctggaaatattctatctaaagaagagaaagcaactgttgagttttcaacagatatgtcagtagaacttcctgaaaattataatcaaaatataaaggctggagagaaacatgaaaaagaaaatgaagaattcacagggcaactaaaagtggctaaagatgttgaaaaactcattggacaagtggaaatctgggaggcagaagccaaatctgttttggatcaagatgatgtggacacctcaatggaagaatctttgaagcatcttattgccaaaggctctatgtttgatgagcttatggcaagaagtgaagatatgttacaaatggatatacaaaatatttcaagccaggagtcctttcaacatgttctcacaactgggcttcaggcaaagattcaagaagctaaagagaaagtccagatcaatgtggtaaaactcattgcagcgttgaagaacttaactgacgtttcaccagatttggacatcaggctgaagatggaagaatcccagaaggaacttgaatcatatatgatgagggctcagcagttactggggcaaagagagagccccggtgaactcatttcaaaacacaaggaagcactaataatttctaatacaaaaagtctggccaagtatttgaaagctgttgaagaactaaaaaataatgtaactgaggacataaagatgtctttagaagaaaagagtagagatgtctgtgccaaatgggagtctcttcatcatgaactgtctttatatgttcaacaactaaaaatagatattgaaaaaggaaagcttagtgacaatattttaaaacttgaaaagcaaataaataaagaaaagaaacttatccgtagaggaaggaccaagggtctcatcaaagaacatgaggcctgcttttctgaggaaggctgcctgtaccagcttaatcaccacatggaagtcctgagggagctgtgtgaagagctgccttcacagaagagtcaacaagaagtgaagagactactcaaagattatgaacaaaagatagaaagacttctgaaatgtgcttccgagattcatatgacactgcagcccacagcgggaggcacgtcgaaaaacgaggggaccatcaccacatctgagaatagaggaggggatccccacagtgaggcaccatttgcaaaatcagataatcagccatcaactgaaaaggcaatggaacccactatgaagtttagcctggcatcagtgttaaggcctctgcaagaagaaagcattatggaaaaggattacagtgcatctataaatagtttactagagaggtatgatacatacagagatattcttgaacaccacctgcaaaacaacaaattcaggattacttctgatttctctagtgaagaggacaggagtagttcttgtctgcaggctaaactgacagatctacaggtcataaaaaatgaaactgatgctcgctggaaagagtttgaaattatttcattgaagttagaaaatcatgtgaatgacataaaaaagccttttgtaattaaggaaagagacacactaaaggaaagagaaagagagcttcagatgactcttaataccagaatggaatctttagagacagcactgcggcttgtgttacctgtagagaaggcatcacttcttctctgtggctcggacctgcctctccataaaatggccatccagggatttcatctcattgatgctgatcgcatctatcaacacctaaggaatatccaagattccatagcaaaacagattgaaatatgtaaccgcttagaagagccaggcaactttgtattaaaggagttacacccatttgatctacacgcaatgcagaatattatactgaaatacaaaacacaatttgaaggaatgaaccacagggtgcagaggagtgaagatactctcaaagctctggaagactttttggcgtctctcagaacagctaaactctctgctgagcccgttacagacctttcagcctcagatacacaggtggcacaagaaaatacgttgacagtaaaaaataaagagggagaaattcatctgatgaaagacaaggccaaacatttggataaatgtttgaagatgctcgatatgagctttaaagatgctgaacggggtgatgacacctcctgtgaaaacctgcttgatgctttttcaataaagttatctgagacacatggctatggggtacaggaggaattcactgaggaaaacaaattactagaggcttgtattttcaaaaataatgaactccttaaaaatattcaagatgtgcagagtcaaatcagtaaaattggtcttaaggatcctactgttccagctgtgaaacatcggaaaaaatcattaatcagactggataaggttctagatgaatatgaagaagagaagagacatttacaagaaatggctaattctcttccacacttcaaagatggcagagaaaaaaccgtgaatcaacagtgccaaaatacagtagtcttgtgggagaataccaaagccttggtcaccgaatgtcttgaacaatgtgggagagttttggagctcttaaaacaatatcagaattttaaaagcatcttgacaactttgattcaaaaagaagagagtgtcatctccctgcaggcttcgtacatgggaaaggagaacctgaagaaaaggatagcagagattgaaattgtcaaagaagaatttaatgagcatttagaagttgtagacaagataaaccaggtctgcaaaaatctacaattttatctaaataaaatgaaaacttttgaagagcccccttttgaaaaagaggctaatattattgtggatagatggcttgatataaatgagaagacagaagattactatgaaaatcttggtcgagctctagctttgtgggacaaactttttaacttaaaaaatgtcattgatgagtggacagaaaaggcccttcaaaaaatggaattacatcaattgactgaagaggacagagaaaggctgaaggaagaattacaagtccatgaacaaaaaacttcagaattttctagaagagtggctgaaatacagtttttgctccaaagcagtgaaatacctcttgaattgcaggtcatggagtcctctattttgaacaagatggaacatgtacagaagtgcttaacaggagaatccaactgccatgcactcagtggcagcactgctgagctaagggaggatctcgaccaagccaagacccagatcgggatgactgaatccctcttaaaagccctgtctccttctgacagcttggagatcttcactaaactagaggagatacaacagcagattctacagcaaaaacacagtatgatattacttgagaatcaaataggttgtctgactcctgaactctctgaattgaaaaagcaatatgaaagtgtcagtgatttatttaataccaaaaaaagtgttttgcaagatcacttttctaagttattgaatgatcaatgcaagaactttaatgactggttcagcaacattaaagtgaaccttaaggagtgttttgaatcatcagaaacaaaaaagagtgtggaacaaaagctacaaaaactttctgatttcttgactcttgaaggaagaaacagtaaaataaagcaggtggacagcgtactgaagcatgtgaagaagcatctgcccaaagcacatgtgaaggagcttatcagttggctcgtgggtcaggaattcgaattagaaaaaatggagtccatatgccaggctcgagcaaaggagcttgaagactccttgcagcagctactgagactccaggatgaccatagaaacctgaggaagtggttgactaatcaagaagagaaatggaaaggaatggaagaaccaggggagaaaactgagctgttctgccaagctttagctagaaagagggaacagtttgaatctgtggcccaattgaacaactctttgaaggaatatgggtttactgaagaagaagaaataataatggaagcaacatgtttgatggatagataccagacattactgagacaactaagtgaaatcgaggaagaggataagttactacccacagaggaccagagctttaatgatcttgcacatgatgtaattcattggataaaagagattaaagagtcccttatggttttgaattcatccgaaggcaaaatgccacttgaggaaagaatccaaaaaatcaaggaaatcattttgctgaagcctgaaggggatgccagaatagagaccatcatgaagcaggctgagagcagcgaggccccgctggttcagaagaccctcactgacatcagcaaccagtgggacaacacactccatttagctagcacctacctaagccatcaagaaaagcttctactagaaggagagaaatatttacaaagtaaggaggatctgagattaatgctcatagaactaaagaagaaacaggaagcaggctttgctctacaacatggtctgcaggagaagaaagctcagttaaagatttataagaaattcctcaagaaagcccaagatttgacatccttgctaaaggagttaaaatctcagggaaactacctcttggagtgcactaaaaatcccagcttcagtgaagagccttggctggaaataaagcatctacacgaaagtcttcttcaacaactgcaggattctgtgcaaaacttggacggtcacgttcgagaacatgattcataccaggtttgcgtcacagacctgaatactacattggacaatttctccaaggaatttgtcagtttttctgataagcctgtggatcaaatagcggttgaggaaaaattgcagaaactgcaggaactagagaatagactcagtttacaagatggcacattaaagaagattttagctttagcaaaatccgtcaagcaaaatacatcttcagtggggcagaagattattaaagatgatataaaatcacttcagtgtaaacaaaaagatttggaaaacaggcttgcatctgctaagcaggagatggaatgttgtctcaacagcattctcaaatcaaaacgctcaacagaaaagaaaggaaagtttactctgccaggcagagagaagcaggccacttctgatgtgcaggagtctactcaggaatcagctgcagtggaaaagttggaggaagactgggaaataaacaaggattcagctgtggaaatggctatgtcaaaacaactttctcttaatgctcaagaaagcatgaaaaacactgaagatgagcggaaagtcaatgagctgcaaaatcaacctttagaattagatactatgttaagaaatgaacaattagaagagatagagaaattatatacccagttggaagcaaagaaagcagccattaagccactggaacaaacagaatgtcttaacaaaacagaaactggggccttggttctccacaatataggatattcggcacagcatttggacaatttgcttcaggcacttattactttgaagaaaaacaaagaaagccaatattgtgtcctcagagattttcaggaataccttgctgcagttgaatcttcaatgaaagccttgttgacagacaaggaaagtcttaaagtaggaccactggacagtgtaacgtatctggacaaaattaaaaaattcatagcatccatagaaaaagagaaagattctttaggcaacttgaaaatcaaatgggagaatttatcaaaccacgtgactgacatggataagaaattgttggaaagccagattaagcaacttgaacatggttgggaacaagtggaacagcagattcaaaagaagtattctcagcaggtagtggaatatgatgaatttacaaccctcatgaataaggtacaggacactgagatttctctgcaacagcagcagcaacatctacagttaaggctgaagtctccagaagaacgggcagggaaccaaagcatgattgccttgaccactgacctccaggctaccaagcatggattttctgttttaaaggggcaagctgaacttcagatgaagaggatttggggagaaaaagaaaagaagaatttggaggatggaataaataacttgaagaaacaatgggaaacattggagccattacacttagaagcagaaaatcagattaagaagtgtgacataaggaacaagatgaaagagactatcttatgggccaagaatttgttgggtgaacttaatccctccattccccttctcccagatgacattctttcacagatcagaaagtgcaaagtgacacatgatggcattctagctaggcagcagtctgtggaatcgttggctgaagaggtcaaagataaggttcctagccttacaacctatgagggcagtgatttaaataataccctagaggacttacggaatcaataccaaatgctggttttaaaatcaactcaaagatcacagcaattagaatttaagttggaagaaagaagcaatttttttgctataataaggaagtttcaacttatggttcaagaaagtgaaacactgataattcccagggtggagacagctgccacggaagctgaactaaaacatcaccatgttactttggaggcatctcagaaggaattgcaagaaattgacagtggaatctcaacacatcttcaggagctaacaaacatctatgaggagctgaatgtgtttgaaagattatttctggaagatcagttgaaaaatcttaagattaggaccaacagaatacaaagattcattcagaatacatgtaatgaagtggaacacaagataaagttttgcagacaattccatgaaaaaacatcagcgcttcaggaggaggctgacagtatacagcgcaatgaactattacttaatcaagaagtaaataaaggtgttaaagaggagatctataatcttaaagacagactcaccgctattaagtgttgcatcttacaggtattgaaacttaaaaaagtgtttgactatattggactaaactgggatttttcacaacttgaccaattacaaacccaagtatttgaaaaagaaaaggaacttgaagaaaaaattaagcagttggacacatttgaggaagaacatggcaaatatcaggcattattaagtaaaatgagagctattgatttgcaaattaagaaaatgactgaagtagtactaaaagctcctgatagctctccggaaagcagacggctcaatgcccaaattttaagtcagagaattgagaaagccaagtgtttatgtgatgagataataaagaaattaaatgaaaataagacctttgatgactcattcaaggagaaagaaatactacaaataaagctgaatgcagaagaaaatgataagttatacaaagttctccaaaacatggtattagaactctcaccaaaagaattggatgaaaagaattgtcaggacaaactagaaacttccttacatgttttaaatcagataaaatctcaattacagcagccattacttataaatttggaaattaaacatattcaaaatgaaaaggacaattgtgaagcatttcaggagcaagtttgggcagaaatgtgtagtattaaagctgtgactgctattgagaaacaaagagaagaaaactcttctgaagcgagtgatgtggagacaaaactacgtgagtttgaagatcttcagatgcagcttaacacaagcattgatttgcgcacaaatgtcttgaatgatgcttatgaaaatctaacacgctataaagaagcagtcaccagggcagtggagagcatcacttccctcgaagccatcattataccctacagagtagatgttggtaatccagaagaatctttagagatgcctcttcgaaaacaagaggaattggaatccacagtagcacacatccaggacctcactgagaaactgggaatgatatccagccccgaagccaaactacaacttcagtatactttacaggaactagtttctaagaactcagcaatgaaggaagctttcaaagcacaggaaactgaggcagaaaggtatcttgagaattacaaatgctatagaaaaatggaagaggatatttacactaacctcagcaaaatggagacagttcttggacagtccatgtcctcgttgccactgtcttacagagaagctttagagcgcttggaacagagcaaggccttggtgtcaaatcttatatcaaccaaagaagagttaatgaaactacgacagatccttagactcttgagactcaggtgcacagaaaatgatggcatatgtttgctcaagattgtgtcggctctgtgggagaaatggctgagtttgctggaagctgctaaagagtgggagatgtggtgcgaagaactgaagcaggaatggaaatttgtcagtgaagaaattgaacgagaggcaattattttagataatcttcaggaagaactccctgaaatttccaaaacaaaagaggcagccaccacagaggaactctctgagctgctagactgtttatgccaatatggagagaacgtggagaagcaacagctgttactgactctacttcttcagcgcatcagaagtatccagaatgttcctgaaagctcaggggctgtggaaactgttccagcatttcaagaaattacttctatgaaagaacgatgcaacaagcttcttcagaaagttcagaaaaataaagaattggtgcagactgaaatccaagaaagacattccttcacaaaagagataattgctttgaagaatttctttcaacagaccacaacttcattccaaaatatggcattccaggatcacccagaaaagtcagaacaatttgaggagcttcaaagcatccttaagaaagggaaactaacttttgagaatattatggaaaaactgcgaatcaagtattccgaaatgtacaccatagtccctgcagagattgaatcccaggtggaagaatgcagaaaagctttagaagacatagatgagaagattagcaatgaagtcttaaaaagctcaccatcatatgcaatgaggagaaaaatagaagaaattaacaatgggcttcataatgttgaaaagatgttgcagcagaaaagcaaaaatattgagaaagctcaagaaattcaaaagaaaatgtgggacgagttagatctatggcattccaaactaaatgagctggattctgaagttcaggacattgttgaacaggacccaggacaggctcaagaatggatggataacttgatgattcctttccagcagtatcagcaagtatcacagagagcagagtgtagaacctcacagttgaataaggccacagttaagatggaggaatatagtgaccttctgaagagcactgaggcttggatagaaaataccagtcatttgctggccaatcctgctgactatgactctttgaggacactgagtcaccatgctagcactgtgcaggattccaagtgttttagaagtggaccaagaccaaatatttatgtttcttattatgttacagttatacagatggctttggaagattcagaacagaagcacaatcttttacattcaatctttatggatctagaagacctgtcaataatttttgaaacagatgaattaacccaatccatacaagagttaagtaatcaagtaacagctttacaacaaaaaataatggaaagccttccacagattcagcgaatggctgatgatgtggttgctattgaatctgaagtaaaatcaatggaaaaaagagtttcaaaaatcaaaactatcctattatcaaaagaaatatttgatttttcacctgaagaacatctcaaacatggggaggtcatacttgaaaatatacgtcccatgaagaaaaccattgctgagatagtgtcttaccaagtggaactgaggttgccccaaacaggaatgaaacctctgcctgtgtttcagcggacaaatcagcttttacaagatataaaactattggaaaatgtgactcaagaacaaaatgagttattaaaggtagtcataaaacagaccaatgaatgggatgaagaaatagaaaatttgaaacagatcttaaataattattcagctcagttctcccttgaacatatgtcaccagaccaagctgacaagctgccacaactacagggagaaatcgaacgtatggagaaacagattctgagtttgaaccagagaaaagaagacctgttggtggacttgaaggccaccgtactaaaccttcaccagcatttgaagcaagaacaagaaggagtagaaagagataggctgccagctgtaacatcagaggaaggtggagtggcagagagggatgcttctgagcggaagttgaacagaagaggctccatgtcttacctggcagcagtcgaggaagaggtggaagaaagttccgtgaagagcgataatggagatgagaaggcagagccatcgcctcagtcttggtcttcactttggaagcatgacaaggacatggaagaagacagagcttcctcatcctctggaacaattgttcaggaagcatatgggaaaataagcacctctgataattccatggcacaaatcctcacaccagactcactaaacactgagcaaggcccagaatgttccctaaggcccaaccaaacagaagagggcaccacacctcctattgaggctgacactctggactcttctgacgcgcaaggaggtttggagcccagggtggagaaaactaggccggagcccacagaagtcctgcatgcctgcaagacccaggtggccgagctggagctgtggctgcaacaagccaacgtggcagttgagccggaaacattaaacgcagacatgcagcaggtgctggaacagcagctggtagggtgccaggctatgctaacagagattgagcacaaggttgcctttctgttagagacttgcaaagatcagggcctgggagataatggagccactcaacatgaggctgaagcgctttccctgaaactgaaaacagtgaagtgcaatttagaaaaagtccagatgatgcttcaggagaagcacagtgaagatcagcatcctaccattctaaagaaatcctcagagccagagcatcaagaagctctccaaccagttaacctttctgaattggaatccattgtaactgaaaggccacaattcagcagacaaaaagatttccagcagcaacaggttctggagttaaaaccaatggaacagaaagatttcatcaaattcatagaatttaatgctaagaaaatgtggccccagtattgccaacatgataacgatacaactcaggaatcatctgcaagcaaccaggcatccagccctgaaaatgacgttccagactcgatcttgtcaccccagggccaaaatggagataagtggcaatatctgcatcatgaactctcatcaaaaataaagctcccactccctcagcttgtggagcctcaggtttccacaaatatgggtattctacccagcgtgactatgtataactttagatacccaacaactgaagaactgaaaacctataccacccaacttgaagacctgcgccaagaagcaagtaaccttcagacacaggaaaatatgacagaagaagcatatatcaatttggataaaaaattgtttgaactattcctgaccctcagtcagtgcctcagcagtgtggaggagatgctggagatgcccagactttacagggaggatggttctggccagcaggtgcactacgagacgctggctcttgagttgaagaaactttatttagcgctaagtgacaagaagggtgatcttttgaaagccatgacttggcctggcgagaacaccaacttgctccttgaatgttttgacaaccttcaagtctgcctggagcacactcaggctgcagctgtctgtagaagcaagtccctgaaagctggcctcgattacaaccgcagttaccagaatgaaataaagagattatatcatcagctcattaagagtaagacatctttacaacagtctttgaatgaaatcagtgggcagagtgttgctgaacagcttcagaaagcagatgcatatacagtggagctggagaacgccgagagccgagtggccaaactaagagatgaaggggagaggcttcatttaccttatgctttactccaggaggtttacaaattagaggatgtacttgacagtatgtggggaatgctaagagccaggtacacagaactcagcagccctttcgtcactgagagccagcaagatgctttgttgcaaggcatggtggaactggtgaagattgggaaggaaaagcttgctcatggccacttaaaacaaaccaaaagtaaagtggcgttacaggctcaaatagaaaatcacaaggtttttttccagaagcttgttgctgacatgttgttgatccaagcatactctgccaaaatacttccttctttattgcaaaacagagagacattttgggcagaacaagtaacagaagttaaaatactagaagaaaagtcacgccaatgtggtatgaagctgcagagtttgttgcagaaatgggaagaatttgatgaaaactatgcatctcttgaaaaggacctggaaattcttatatctacattgccctctgtgagtttggtggaagaaacagaggaaagattagtggaaaggatttcattttaccagcaaataaaaagaaacattggtggaaaacacgcccggctttaccaaactctgaacgaaggcaaacagttggtggcgtctgtgagctgtcctgaattagagggccagatcgcaaaactggaagagcagtggttgtccctgaacaagaaaattgaccatgagctccacaggctgcaagctcttctcaagcatctgctcagttataacagagattcggatcagttaaccaagtggttggaatcttcccagcatactctgaattactggaaagaacagtccctcaatgtgtctcaggacttggatacaatcagaagcaacatcaacaatttttttgagttttcaaaagaagttgatgaaaaatcctccttgaagactgccgttatcagtatcgggaaccagcttcttcacctgaaagaaactgatacagctacactgagagcttctttagcacagtttgaacaaaaatggacaatgctcataactcaacttccagatattcaagaaaaacttcaccagcttcaaatggagaaattgccgtctcgtaaagcaatcacagaaatgattagctggatgaacaatgtggagcatcaaacttcagatgaagactccgtgcattcaccaagttctgcatctcaagttaaacatcttcttcagaagcacaaggagtttagaatggaaatggactataaacagtggatagttgacttcgttaaccagtcattacttcagctaagcacctgtgatgtagaaagcaagcgctatgaaagaacggagtttgcagagcacctgggggagatgaaccgccagtggcaccgtgtacatggaatgctgaatagaaagatacaacatttagaacaacttctagaaagtatcactgagagtgaaaataaaatacagatcttgaacaactggctggaagcacaagaagagagactgaaaactttacaaaaacctgaaagtgtgatctcagtgcagaagctgctcctggactgtcaggatatagaaaatcaacttgcaattaaatccaaagcactagatgagttgaaacaaagttatctgactttggagagtggggcagtgccattgttagaagatacagcatcccgaattgatgagttatttcaaaagagaagcagtgttctcactcaggtcaatcagctcaaaacctccatgcagtcagttttacaggagtggaagatttatgatcaactctatgatgaagtgaatatgatgacaatccgattctggtactgcatggaacacagcaagcctgtggtgttatcattggagaccttgagatgccaggtggagaaccttcagtctctgcaagatgaagctgagagcagtgaagggagttgggagaaactccaggaggttatcggcaaactcaaaggtctctgcccctctgttgctgaaataatcgaagagaaatgccaaaatactcataaaaggtggactcaggtgaaccaagccattgcagaccagttgcagaaggcccagagtctgctccagctctggaaggcctatagcaatgctcatggtgaagctgccgcaaggctgaagcagcaggaagcaaagtttcaacagctcgcaaacatcagcatgtctggaaacaacctggcagagatcctgcccccagccctgcaggacataaaggagctgcagcatgatgtgcagaaaacaaaagaagcctttctccaaaattccagtgtcctggatcgactcccacaacccgcagagtccagcacccacatgctcctcccgggccccctgcactctctccagagggctgcttatttggaaaagatgctgcttgtgaaagcaaatgaatttgagtttgttctctcacagtttaaggattttggagtccggctggaatctttaaaaggtcttattatgcatgaagaagagaatttggatagacttcaccaacaggaaaaagaaaatcctgactcattcctgaatcatgtgctggcactgacagcccaatcacctgatattgaacatttgaatgaagtgagcctcaagctcccacttagtgacgtagctgtgaagacgttacaaaatatgaaccggcaatggattcgggccacggccacggcactggagcgctgcagtgagcttcagggaattggattgaatgaaaagtttctttattgctgtgaaaagtggatccaacttttggagaagatagaagaagcactcaaagtggatgtggctaacagccttcctgagctcctggagcagcagaaaacctataagatgttagaagctgaagtttctataaaccagacaattgctgattcctatgtcacccagtccttacaactcctggacacaacagaaatagagaacagaccagaatttattacagaattctcaaagctgacggatcggtggcagaatgctgtccagggtgttcggcagaggaagggtgacgttgatgggctggtgaggcagtggcaagatttcactacttctgtggagaacttgtttcgcttcctcactgacaccagccacctgctatctgcagtgaagggccaggagcgcttcagcctctaccaaaccagaagtctgatccatgagctgaagaataaagaaattcattttcaaaggaggcgaactacctgtgccctaaccttggaagctggagaaaagttactgctcacaactgacctgaaaactaaagagtctgtgggtaggagaatcagtcaacttcaggacagctggaaagacatggagccccagctggcagagatgattaagcagttccagagcactgtagagacctgggaccagtgtgaaaagaaaatcaaggagttgaaaagcaggctgcaagttttaaaggcacaaagtgaagatcctcttccagagcttcacgaggacctccataacgaaaaagagctgattaaggaactagaacagtctttggctagctggactcagaacttgaaagaacttcaaactatgaaggcggacttaacccggcacgttctcgtggaagatgtgatggttttgaaggagcaaatagagcatttgcacagacaatgggaggacctctgcttaagggtggccatacgtaaacaggagattgaagacagactcaatacatgggttgtattcaatgaaaaaaataaagagttgtgtgcctggctggtgcagatggaaaacaaagttctacagacagcggacattagtattgaagaaatgattgaaaagttacagaaggactgcatggaagaaataaacttgtttagtgaaaacaagttacagttaaagcagatgggtgaccagttgatcaaggccagcaacaaatcaagagcagctgagatcgatgacaagctcaacaaaattaacgatcgttggcaacatctttttgatgtcatcggatcaagggtgaagaagctgaaggagacctttgcttttattcagcagttggacaaaaacatgagcaaccttcgcacctggttggctcgaattgagtctgagctttccaagcctgttgtttatgatgtctgcgatgatcaagagatccagaagaggctcgctgagcagcaggatctacagcgagatattgaacaacacagcgcaggggtggagtccgtgtttaacatctgtgacgtcctactgcacgactccgatgcctgtgcaaatgagaccgagtgtgactcgatccagcagaccaccaggagcctggacagacgctggaggaacatttgtgccatgtccatggagcggcgcatgaaaatcgaggagacgtggcgcctgtggcagaagtttttagacgactattctcgctttgaggactggctcaagtcagctgagaggacggcagcctgcccaaattcctcagaggtgttgtacacgagtgccaaagaggaactgaagaggtttgaggcctttcagcggcagattcatgagcggctcactcagctggagctcatcaacaagcagtaccggcggctggcccgggagaaccgcacagacacggccagcaggctgaagcagatggtccacgagggcaaccagcgctgggacaaccttcagaggcgggtcacagccgtcctgcggagactcaggcatttcaccaaccagagggaagaatttgagggcaccagggagagcattctggtgtggctcacagagatggacctgcagctgaccaacgtggagcacttctcagagagtgacgccgatgacaagatgcgccaactgaatggcttccaacaggaaattacattaaataccaacaagattgatcagctcattgtgtttggggagcagctgattcagaagagcgagcccctggatgctgtgctgattgaggatgagctggaggaactccaccgctactgccaggaggtgtttggaagggtctcccggttccaccggcggctcacctcctgcactccgggcttggaagatgaaaaggaggcctctgagaatgaaacagacatggaagaccccagagaaatccagactgattcttggcgtaaacggggagagagcgaggaaccgtcatctcctcagtccctgtgtcatctagtggccccagggcacgagcggtctggctgcgagacccctgtcagcgtggactccatccccctggagtgggaccacacaggcgacgtggggggctcctcctctcacgaagaggacgaggagggcccatactacagcgcactgtcaggtaaatccatttcggatggccactcgtggcatgttcccgacagcccttcctgtcccgagcatcactacaagcaaatggaaggtgacaggaatgttccacctgttccccctgcgtccagcaccccttataaaccaccctatggaaagctactattacctccaggcacggatggtggcaaagaaggcccgcgagtcctgaatggcaacccacagcaggaagacgggggactggccggtatcacagagcagcagtcaggtgccttcgacagatgggagatgattcaagcacaggagcttcacaataagctcaaaataaaacaaaatttgcaacagctgaactctgatatcagcgccatcactacttggctgaaaaaaactgaagcagagctggaaatgttaaagatggcaaagcctccctctgatatccaggaaatagaactgagagtgaagagactgcaggagatactgaaagcctttgacacttacaaggcattagtggtctctgtcaacgtgagcagcaaggaatttctgcaaaccgagagccccgaatccacagagctccaaagtagactccgccagctgagcctgctctgggaagcagcacagggcgcagtggacagctggagagggggcttacgacagtcgctcatgcagtgccaggacttccaccagttgagtcaaaatctgctgctgtggttagcgagtgccaagaaccggaggcagaaggctcatgtcaccgatccaaaggcagacccccgggctctcctagagtgtcggagggaactaatgcaactggaaaaggagctggtagaacgtcaacctcaagtggacatgttacaggagatttcaaacagccttctcattaagggacatggagaagactgtattgaagctgaagaaaaggtgcatgttattgagaagaaactcaaacagttacgggagcaagtgtcccaagatttaatggccttgcagggaacccagaacccagcctcacccctgcccagcttcgacgaggtagactcgggggaccagcctcctgcaacatccgtgccagctccccgagcaaagcagttcagagcagtgagaactacagaaggcgaggaggagacagagagcagggtccccggcagcacacggccacagcgctccttcctctcaagggtggtccgggcagccctacccctgcagctgctcctcctgctgctgctgctcctggcctgcctgctgccctcctccgaagaagactacagctgcactcaggccaacaactttgcccggtccttttaccccatgctgaggtacaccaatgggccaccccccacatagagggcatagctggccacagtgctacaccacctgcctgattgccaagggtgcccagcacgtggccccagaccaatctgagtgacttagtgttggcaaggtcccgggacctgtgcagacttcttctgggcttacccagcacgggctccctggagcccagggcagctttcagattgtgttcctccccaggagcagggaacctgtgtggcaggtgccccgggtattttggcagaactagttgattagtttagggatctctggaaatgtcagtttcctgaagagccaagcactttgtgaattctggtttgtttgtaaaacagcattattataatgtaggtatggtcaatgagcagtggtgtccatcacatatattatagaagcaagcgaggacattccaccctagaaatggttcagaaactcataggcacccttagctgatggaaacaatcaatcatatttaatacgcttagaatcagttttactccaatcagctggcaattttgagctgccggttatacaccaaaatgttctgttcagtacctagctctgctcttttatattgctttaaatttttaaagaaattgtattgcatggatgtggttatttgtgcatattttttaacaatgcccaatctgtatgaataatgtaaacttcgatttttttttaaaaaaattagattttagctggagcttttgactaatgtaaagtaaatgccaaactaccgacttgatagggatgtttttgtaagttaattttctaagactttttcacatccaaagtgatgctttgctttgggttttaactgtttggccacggcgggggtgggggcggggggttggtacagaaacttgaagctgtttgtgatatgtacaactcagatgtttctcattaaaaaacaaaattagccagacttctgttgtactg

SEQ ID NO: 29634 - DNA, 21875 bp, Homo sapiens
  source 1..21875: mol_type = unassigned DNA
gtttgccgctttccgagcgccaaggagcggagcgcgctcagctgcgcccagagccttcggccggacctgaaaaagcgagagggagagcgagcaaaaggcgcgatccagagagccaggcaagcggggcgccgacctcgggcggccccggcccgcgcccttgcccctcggccgggcggacgttcacttcttcaactgagatggacatgatataatctccattgagtcaaagaatggcatctagtcctgagcttcccaccgaagatgaacagggttcctggggcatcgacgatctccatatttcattgcaagctgaacaggaagacacccagaagaaagccttcacgtgctggataaactcacagttggccaggcacacttctccctcagttatatccgacctattcacagacattaaaaaggggcatgtcctcctggatctgctagaagtactttctgggcaacagttgcctcgggataaaggatctaataccttccagtgtagaatcaatatagaacatgccttgacattcctaagaaaccgatcaattaagctaataaatattcatgttactgatatcattgatggaaacccatccattatccttggcctaatttggacaattatcctgcactttcatattgagaagcttgcccagactctttcttgcaattacaatcagccttccctggatgatgtgagtgtggttgactcatctcctgcctcaagtcctccagctaagaaatgctctaaagtgcaagcaagatggcaaatgtctgcaagaaaggcccttcttttgtgggctcaggaacaatgcgccacctatgagtctgtcaatgtgaccgattttaagtcaagttggagaaatgggatggcttttttggccatcattcatgccttgcgaccagacctaattgacatgaagagtgtgaagcatagatccaacaaagacaatctgagagaggccttcagaattgcagaacaagaattaaaaatccccagattgctggaaccagaagatgtggatgttgttgatcctgatgaaaagtccatcatgacctatgtggcacagtttctgcagtattccaaagatgcccctgggactggagaggaggctcagggaaaggtgaaagatgctatgggctggttaactctgcaaaaggaaaaactacagaagttgctaaaggattcagagaatgatacctactttaaaaagtataatagcctgctgtcctttatggagtcattcaatgaagaaaaaaagtcctttttggatgtcctgtcaataaaacgggatctggatgagctggacaaggatcatttacagttgagagaagcctgggatggcctcgatcaccagattaatgcatggaaaataaagctaaattatgccttgcccccacccctccatcaaactgaagcttggctccaggaggtagaagagcttatggatgaagatttgtcagcctcccaggatcactctcaagccgtgactctgatacaagagaaaatgactttattcaagagcctgatggatagatttgagcatcattcgaacattctccttacctttgaaaataaggatgaaaatcacttgccattggtaccacctaacaaattggaggaaatgaaaagacgaatcaacaacattttggagaaaaaatttattctacttctagaatttcattactacaagtgcttagttcttggtttggtagatgaagtgaaatcaaaattggatatttggaacattaaatatgggagcagagaatctgtggaattattgctggaagactggcataaatttattgaagaaaaagaattcctagctcgacttgatacttcttttcaaaaatgtggagaaatttataagaatttggctggagaatgtcagaatattaataaacagtatatgatggtgaaatctgatgtttgtatgtatagaaaaaatatatataatgtgaagtccactctacaaaaagtgctggcatgttgggctacttatgtggaaaaccttcgcttactaagggcttgctttgaggagacaaagaaggaagaaattaaagaggtaccctttgagacactagcccagtggaatctagaacacgctactttaaatgaagcaggaaatttcttagtcgaagtcagcaatgatgtggttggatcatctatttctaaagaactgagaaggctgaataaaagatggagaaagttggtttcaaaaactcaacttgaaatgaacctgccactgatgataaaaaaacaggatcagcccacttttgacaattctggaaatattctatctaaagaagagaaagcaactgttgagttttcaacagatatgtcagtagaacttcctgaaaattataatcaaaatataaaggctggagagaaacatgaaaaagaaaatgaagaattcacagggcaactaaaagtggctaaagatgttgaaaaactcattggacaagtggaaatctgggaggcagaagccaaatctgttttggatcaagatgatgtggacacctcaatggaagaatctttgaagcatcttattgccaaaggctctatgtttgatgagcttatggcaagaagtgaagatatgttacaaatggatatacaaaatatttcaagccaggagtcctttcaacatgttctcacaactgggcttcaggcaaagattcaagaagctaaagagaaagtccagatcaatgtggtaaaactcattgcagcgttgaagaacttaactgacgtttcaccagatttggacatcaggctgaagatggaagaatcccagaaggaacttgaatcatatatgatgagggctcagcagttactggggcaaagagagagccccggtgaactcatttcaaaacacaaggaagcactaataatttctaatacaaaaagtctggccaagtatttgaaagctgttgaagaactaaaaaataatgtaactgaggacataaagatgtctttagaagaaaagagtagagatgtctgtgccaaatgggagtctcttcatcatgaactgtctttatatgttcaacaactaaaaatagatattgaaaaaggaaagcttagtgacaatattttaaaacttgaaaagcaaataaataaagaaaagaaacttatccgtagaggaaggaccaagggtctcatcaaagaacatgaggcctgcttttctgaggaaggctgcctgtaccagcttaatcaccacatggaagtcctgagggagctgtgtgaagagctgccttcacagaagagtcaacaagaagtgaagagactactcaaagattatgaacaaaagatagaaagacttctgaaatgtgcttccgagattcatatgacactgcagcccacagcgggaggcacgtcgaaaaacgaggggaccatcaccacatctgagaatagaggaggggatccccacagtgaggcaccatttgcaaaatcagataatcagccatcaactgaaaaggcaatggaacccactatgaagtttagcctggcatcagtgttaaggcctctgcaagaagaaagcattatggaaaaggattacagtgcatctataaatagtttactagagaggtatgatacatacagagatattcttgaacaccacctgcaaaacaacaaattcaggattacttctgatttctctagtgaagaggacaggagtagttcttgtctgcaggctaaactgacagatctacaggtcataaaaaatgaaactgatgctcgctggaaagagtttgaaattatttcattgaagttagaaaatcatgtgaatgacataaaaaagccttttgtaattaaggaaagagacacactaaaggaaagagaaagagagcttcagatgactcttaataccagaatggaatctttagagacagcactgcggcttgtgttacctgtagagaaggcatcacttcttctctgtggctcggacctgcctctccataaaatggccatccagggatttcatctcattgatgctgatcgcatctatcaacacctaaggaatatccaagattccatagcaaaacagattgaaatatgtaaccgcttagaagagccaggcaactttgtattaaaggagttacacccatttgatctacacgcaatgcagaatattatactgaaatacaaaacacaatttgaaggaatgaaccacagggtgcagaggagtgaagatactctcaaagctctggaagactttttggcgtctctcagaacagctaaactctctgctgagcccgttacagacctttcagcctcagatacacaggtggcacaagaaaatacgttgacagtaaaaaataaagagggagaaattcatctgatgaaagacaaggccaaacatttggataaatgtttgaagatgctcgatatgagctttaaagatgctgaacggggtgatgacacctcctgtgaaaacctgcttgatgctttttcaataaagttatctgagacacatggctatggggtacaggaggaattcactgaggaaaacaaattactagaggcttgtattttcaaaaataatgaactccttaaaaatattcaagatgtgcagagtcaaatcagtaaaattggtcttaaggatcctactgttccagctgtgaaacatcggaaaaaatcattaatcagactggataaggttctagatgaatatgaagaagagaagagacatttacaagaaatggctaattctcttccacacttcaaagatggcagagaaaaaaccgtgaatcaacagtgccaaaatacagtagtcttgtgggagaataccaaagccttggtcaccgaatgtcttgaacaatgtgggagagttttggagctcttaaaacaatatcagaattttaaaagcatcttgacaactttgattcaaaaagaagagagtgtcatctccctgcaggcttcgtacatgggaaaggagaacctgaagaaaaggatagcagagattgaaattgtcaaagaagaatttaatgagcatttagaagttgtagacaagataaaccaggtctgcaaaaatctacaattttatctaaataaaatgaaaacttttgaagagcccccttttgaaaaagaggctaatattattgtggatagatggcttgatataaatgagaagacagaagattactatgaaaatcttggtcgagctctagctttgtgggacaaactttttaacttaaaaaatgtcattgatgagtggacagaaaaggcccttcaaaaaatggaattacatcaattgactgaagaggacagagaaaggctgaaggaagaattacaagtccatgaacaaaaaacttcagaattttctagaagagtggctgaaatacagtttttgctccaaagcagtgaaatacctcttgaattgcaggtcatggagtcctctattttgaacaagatggaacatgtacagaagtgcttaacaggagaatccaactgccatgcactcagtggcagcactgctgagctaagggaggatctcgaccaagccaagacccagatcgggatgactgaatccctcttaaaagccctgtctccttctgacagcttggagatcttcactaaactagaggagatacaacagcagattctacagcaaaaacacagtatgatattacttgagaatcaaataggttgtctgactcctgaactctctgaattgaaaaagcaatatgaaagtgtcagtgatttatttaataccaaaaaaagtgttttgcaagatcacttttctaagttattgaatgatcaatgcaagaactttaatgactggttcagcaacattaaagtgaaccttaaggagtgttttgaatcatcagaaacaaaaaagagtgtggaacaaaagctacaaaaactttctgatttcttgactcttgaaggaagaaacagtaaaataaagcaggtggacagcgtactgaagcatgtgaagaagcatctgcccaaagcacatgtgaaggagcttatcagttggctcgtgggtcaggaattcgaattagaaaaaatggagtccatatgccaggctcgagcaaaggagcttgaagactccttgcagcagctactgagactccaggatgaccatagaaacctgaggaagtggttgactaatcaagaagagaaatggaaaggaatggaagaaccaggggagaaaactgagctgttctgccaagctttagctagaaagagggaacagtttgaatctgtggcccaattgaacaactctttgaaggaatatgggtttactgaagaagaagaaataataatggaagcaacatgtttgatggatagataccagacattactgagacaactaagtgaaatcgaggaagaggataagttactacccacagaggaccagagctttaatgatcttgcacatgatgtaattcattggataaaagagattaaagagtcccttatggttttgaattcatccgaaggcaaaatgccacttgaggaaagaatccaaaaaatcaaggaaatcattttgctgaagcctgaaggggatgccagaatagagaccatcatgaagcaggctgagagcagcgaggccccgctggttcagaagaccctcactgacatcagcaaccagtgggacaacacactccatttagctagcacctacctaagccatcaagaaaagcttctactagaaggagagaaatatttacaaagtaaggaggatctgagattaatgctcatagaactaaagaagaaacaggaagcaggctttgctctacaacatggtctgcaggagaagaaagctcagttaaagatttataagaaattcctcaagaaagcccaagatttgacatccttgctaaaggagttaaaatctcagggaaactacctcttggagtgcactaaaaatcccagcttcagtgaagagccttggctggaaataaagcatctacacgaaagtcttcttcaacaactgcaggattctgtgcaaaacttggacggtcacgttcgagaacatgattcataccaggtttgcgtcacagacctgaatactacattggacaatttctccaaggaatttgtcagtttttctgataagcctgtggatcaaatagcggttgaggaaaaattgcagaaactgcaggaactagagaatagactcagtttacaagatggcacattaaagaagattttagctttagcaaaatccgtcaagcaaaatacatcttcagtggggcagaagattattaaagatgatataaaatcacttcagtgtaaacaaaaagatttggaaaacaggcttgcatctgctaagcaggagatggaatgttgtctcaacagcattctcaaatcaaaacgctcaacagaaaagaaaggaaagtttactctgccaggcagagagaagcaggccacttctgatgtgcaggagtctactcaggaatcagctgcagtggaaaagttggaggaagactgggaaataaacaaggattcagctgtggaaatggctatgtcaaaacaactttctcttaatgctcaagaaagcatgaaaaacactgaagatgagcggaaagtcaatgagctgcaaaatcaacctttagaattagatactatgttaagaaatgaacaattagaagagatagagaaattatatacccagttggaagcaaagaaagcagccattaagccactggaacaaacagaatgtcttaacaaaacagaaactggggccttggttctccacaatataggatattcggcacagcatttggacaatttgcttcaggcacttattactttgaagaaaaacaaagaaagccaatattgtgtcctcagagattttcaggaataccttgctgcagttgaatcttcaatgaaagccttgttgacagacaaggaaagtcttaaagtaggaccactggacagtgtaacgtatctggacaaaattaaaaaattcatagcatccatagaaaaagagaaagattctttaggcaacttgaaaatcaaatgggagaatttatcaaaccacgtgactgacatggataagaaattgttggaaagccagattaagcaacttgaacatggttgggaacaagtggaacagcagattcaaaagaagtattctcagcaggtagtggaatatgatgaatttacaaccctcatgaataaggtacaggacactgagatttctctgcaacagcagcagcaacatctacagttaaggctgaagtctccagaagaacgggcagggaaccaaagcatgattgccttgaccactgacctccaggctaccaagcatggattttctgttttaaaggggcaagctgaacttcagatgaagaggatttggggagaaaaagaaaagaagaatttggaggatggaataaataacttgaagaaacaatgggaaacattggagccattacacttagaagcagaaaatcagattaagaagtgtgacataaggaacaagatgaaagagactatcttatgggccaagaatttgttgggtgaacttaatccctccattccccttctcccagatgacattctttcacagatcagaaagtgcaaagtgacacatgatggcattctagctaggcagcagtctgtggaatcgttggctgaagaggtcaaagataaggttcctagccttacaacctatgagggcagtgatttaaataataccctagaggacttacggaatcaataccaaatgctggttttaaaatcaactcaaagatcacagcaattagaatttaagttggaagaaagaagcaatttttttgctataataaggaagtttcaacttatggttcaagaaagtgaaacactgataattcccagggtggagacagctgccacggaagctgaactaaaacatcaccatgttactttggaggcatctcagaaggaattgcaagaaattgacagtggaatctcaacacatcttcaggagctaacaaacatctatgaggagctgaatgtgtttgaaagattatttctggaagatcagttgaaaaatcttaagattaggaccaacagaatacaaagattcattcagaatacatgtaatgaagtggaacacaagataaagttttgcagacaattccatgaaaaaacatcagcgcttcaggaggaggctgacagtatacagcgcaatgaactattacttaatcaagaagtaaataaaggtgttaaagaggagatctataatcttaaagacagactcaccgctattaagtgttgcatcttacaggtattgaaacttaaaaaagtgtttgactatattggactaaactgggatttttcacaacttgaccaattacaaacccaagtatttgaaaaagaaaaggaacttgaagaaaaaattaagcagttggacacatttgaggaagaacatggcaaatatcaggcattattaagtaaaatgagagctattgatttgcaaattaagaaaatgactgaagtagtactaaaagctcctgatagctctccggaaagcagacggctcaatgcccaaattttaagtcagagaattgagaaagccaagtgtttatgtgatgagataataaagaaattaaatgaaaataagacctttgatgactcattcaaggagaaagaaatactacaaataaagctgaatgcagaagaaaatgataagttatacaaagttctccaaaacatggtattagaactctcaccaaaagaattggatgaaaagaattgtcaggacaaactagaaacttccttacatgttttaaatcagataaaatctcaattacagcagccattacttataaatttggaaattaaacatattcaaaatgaaaaggacaattgtgaagcatttcaggagcaagtttgggcagaaatgtgtagtattaaagctgtgactgctattgagaaacaaagagaagaaaactcttctgaagcgagtgatgtggagacaaaactacgtgagtttgaagatcttcagatgcagcttaacacaagcattgatttgcgcacaaatgtcttgaatgatgcttatgaaaatctaacacgctataaagaagcagtcaccagggcagtggagagcatcacttccctcgaagccatcattataccctacagagtagatgttggtaatccagaagaatctttagagatgcctcttcgaaaacaagaggaattggaatccacagtagcacacatccaggacctcactgagaaactgggaatgatatccagccccgaagccaaactacaacttcagtatactttacaggaactagtttctaagaactcagcaatgaaggaagctttcaaagcacaggaaactgaggcagaaaggtatcttgagaattacaaatgctatagaaaaatggaagaggatatttacactaacctcagcaaaatggagacagttcttggacagtccatgtcctcgttgccactgtcttacagagaagctttagagcgcttggaacagagcaaggccttggtgtcaaatcttatatcaaccaaagaagagttaatgaaactacgacagatccttagactcttgagactcaggtgcacagaaaatgatggcatatgtttgctcaagattgtgtcggctctgtgggagaaatggctgagtttgctggaagctgctaaagagtgggagatgtggtgcgaagaactgaagcaggaatggaaatttgtcagtgaagaaattgaacgagaggcaattattttagataatcttcaggaagaactccctgaaatttccaaaacaaaagaggcagccaccacagaggaactctctgagctgctagactgtttatgccaatatggagagaacgtggagaagcaacagctgttactgactctacttcttcagcgcatcagaagtatccagaatgttcctgaaagctcaggggctgtggaaactgttccagcatttcaagaaattacttctatgaaagaacgatgcaacaagcttcttcagaaagttcagaaaaataaagaattggtgcagactgaaatccaagaaagacattccttcacaaaagagataattgctttgaagaatttctttcaacagaccacaacttcattccaaaatatggcattccaggatcacccagaaaagtcagaacaatttgaggagcttcaaagcatccttaagaaagggaaactaacttttgagaatattatggaaaaactgcgaatcaagtattccgaaatgtacaccatagtccctgcagagattgaatcccaggtggaagaatgcagaaaagctttagaagacatagatgagaagattagcaatgaagtcttaaaaagctcaccatcatatgcaatgaggagaaaaatagaagaaattaacaatgggcttcataatgttgaaaagatgttgcagcagaaaagcaaaaatattgagaaagctcaagaaattcaaaagaaaatgtgggacgagttagatctatggcattccaaactaaatgagctggattctgaagttcaggacattgttgaacaggacccaggacaggctcaagaatggatggataacttgatgattcctttccagcagtatcagcaagtatcacagagagcagagtgtagaacctcacagttgaataaggccacagttaagatggaggaatatagtgaccttctgaagagcactgaggcttggatagaaaataccagtcatttgctggccaatcctgctgactatgactctttgaggacactgagtcaccatgctagcactgtgcagatggctttggaagattcagaacagaagcacaatcttttacattcaatctttatggatctagaagacctgtcaataatttttgaaacagatgaattaacccaatccatacaagagttaagtaatcaagtaacagctttacaacaaaaaataatggaaagccttccacagattcagcgaatggctgatgatgtggttgctattgaatctgaagtaaaatcaatggaaaaaagagtttcaaaaatcaaaactatcctattatcaaaagaaatatttgatttttcacctgaagaacatctcaaacatggggaggtcatacttgaaaatatacgtcccatgaagaaaaccattgctgagatagtgtcttaccaagtggaactgaggttgccccaaacaggaatgaaacctctgcctgtgtttcagcggacaaatcagcttttacaagatataaaactattggaaaatgtgactcaagaacaaaatgagttattaaaggtagtcataaaacagaccaatgaatgggatgaagaaatagaaaatttgaaacagatcttaaataattattcagctcagttctcccttgaacatatgtcaccagaccaagctgacaagctgccacaactacagggagaaatcgaacgtatggagaaacagattctgagtttgaaccagagaaaagaagacctgttggtggacttgaaggccaccgtactaaaccttcaccagcatttgaagcaagaacaagaaggagtagaaagagataggctgccagctgtaacatcagaggaaggtggagtggcagagagggatgcttctgagcggaagttgaacagaagaggctccatgtcttacctggcagcagtcgaggaagaggtggaagaaagttccgtgaagagcgataatggagatgagaaggcagagccatcgcctcagtcttggtcttcactttggaagcatgacaaggacatggaagaagacagagcttcctcatcctctggaacaattgttcaggaagcatatgggaaaataagcacctctgataattccatggcacaaatcctcacaccagactcactaaacactgagcaaggcccagaatgttccctaaggcccaaccaaacagaagagggcaccacacctcctattgaggctgacactctggactcttctgacgcgcaaggaggtttggagcccagggtggagaaaactaggccggagcccacagaagtcctgcatgcctgcaagacccaggtggccgagctggagctgtggctgcaacaagccaacgtggcagttgagccggaaacattaaacgcagacatgcagcaggtgctggaacagcagctggtagggtgccaggctatgctaacagagattgagcacaaggttgcctttctgttagagacttgcaaagatcagggcctgggagataatggagccactcaacatgaggctgaagcgctttccctgaaactgaaaacagtgaagtgcaatttagaaaaagtccagatgatgcttcaggagaagcacagtgaagatcagcatcctaccattctaaagaaatcctcagagccagagcatcaagaagctctccaaccagttaacctttctgaattggaatccattgtaactgaaaggccacaattcagcagacaaaaagatttccagcagcaacaggttctggagttaaaaccaatggaacagaaagatttcatcaaattcatagaatttaatgctaagaaaatgtggccccagtattgccaacatgataacgatacaactcaggaatcatctgcaagcaaccaggcatccagccctgaaaatgacgttccagactcgatcttgtcaccccagggccaaaatggagataagtggcaatatctgcatcatgaactctcatcaaaaataaagctcccactccctcagcttgtggagcctcaggtttccacaaatatgggtattctacccagcgtgactatgtataactttagatacccaacaactgaagaactgaaaacctataccacccaacttgaagacctgcgccaagaagcaagtaaccttcagacacaggaaaatatgacagaagaagcatatatcaatttggataaaaaattgtttgaactattcctgaccctcagtcagtgcctcagcagtgtggaggagatgctggagatgcccagactttacagggaggatggttctggccagcaggtgcactacgagacgctggctcttgagttgaagaaactttatttagcgctaagtgacaagaagggtgatcttttgaaagccatgacttggcctggcgagaacaccaacttgctccttgaatgttttgacaaccttcaagtctgcctggagcacactcaggctgcagctgtctgtagaagcaagtccctgaaagctggcctcgattacaaccgcagttaccagaatgaaataaagagattatatcatcagctcattaagagtaagacatctttacaacagtctttgaatgaaatcagtgggcagagtgttgctgaacagcttcagaaagcagatgcatatacagtggagctggagaacgccgagagccgagtggccaaactaagagatgaaggggagaggcttcatttaccttatgctttactccaggaggtttacaaattagaggatgtacttgacagtatgtggggaatgctaagagccaggtacacagaactcagcagccctttcgtcactgagagccagcaagatgctttgttgcaaggcatggtggaactggtgaagattgggaaggaaaagcttgctcatggccacttaaaacaaaccaaaagtaaagtggcgttacaggctcaaatagaaaatcacaaggtttttttccagaagcttgttgctgacatgttgttgatccaagcatactctgccaaaatacttccttctttattgcaaaacagagagacattttgggcagaacaagtaacagaagttaaaatactagaagaaaagtcacgccaatgtggtatgaagctgcagagtttgttgcagaaatgggaagaatttgatgaaaactatgcatctcttgaaaaggacctggaaattcttatatctacattgccctctgtgagtttggtggaagaaacagaggaaagattagtggaaaggatttcattttaccagcaaataaaaagaaacattggtggaaaacacgcccggctttaccaaactctgaacgaaggcaaacagttggtggcgtctgtgagctgtcctgaattagagggccagatcgcaaaactggaagagcagtggttgtccctgaacaagaaaattgaccatgagctccacaggctgcaagctcttctcaagcatctgctcagttataacagagattcggatcagttaaccaagtggttggaatcttcccagcatactctgaattactggaaagaacagtccctcaatgtgtctcaggacttggatacaatcagaagcaacatcaacaatttttttgagttttcaaaagaagttgatgaaaaatcctccttgaagactgccgttatcagtatcgggaaccagcttcttcacctgaaagaaactgatacagctacactgagagcttctttagcacagtttgaacaaaaatggacaatgctcataactcaacttccagatattcaagaaaaacttcaccagcttcaaatggagaaattgccgtctcgtaaagcaatcacagaaatgattagctggatgaacaatgtggagcatcaaacttcagatgaagactccgtgcattcaccaagttctgcatctcaagttaaacatcttcttcagaagcacaaggagtttagaatggaaatggactataaacagtggatagttgacttcgttaaccagtcattacttcagctaagcacctgtgatgtagaaagcaagcgctatgaaagaacggagtttgcagagcacctgggggagatgaaccgccagtggcaccgtgtacatggaatgctgaatagaaagatacaacatttagaacaacttctagaaagtatcactgagagtgaaaataaaatacagatcttgaacaactggctggaagcacaagaagagagactgaaaactttacaaaaacctgaaagtgtgatctcagtgcagaagctgctcctggactgtcaggatatagaaaatcaacttgcaattaaatccaaagcactagatgagttgaaacaaagttatctgactttggagagtggggcagtgccattgttagaagatacagcatcccgaattgatgagttatttcaaaagagaagcagtgttctcactcaggtcaatcagctcaaaacctccatgcagtcagttttacaggagtggaagatttatgatcaactctatgatgaagtgaatatgatgacaatccgattctggtactgcatggaacacagcaagcctgtggtgttatcattggagaccttgagatgccaggtggagaaccttcagtctctgcaagatgaagctgagagcagtgaagggagttgggagaaactccaggaggttatcggcaaactcaaaggtctctgcccctctgttgctgaaataatcgaagagaaatgccaaaatactcataaaaggtggactcaggtgaaccaagccattgcagaccagttgcagaaggcccagagtctgctccagctctggaaggcctatagcaatgctcatggtgaagctgccgcaaggctgaagcagcaggaagcaaagtttcaacagctcgcaaacatcagcatgtctggaaacaacctggcagagatcctgcccccagccctgcaggacataaaggagctgcagcatgatgtgcagaaaacaaaagaagcctttctccaaaattccagtgtcctggatcgactcccacaacccgcagagtccagcacccacatgctcctcccgggccccctgcactctctccagagggctgcttatttggaaaagatgctgcttgtgaaagcaaatgaatttgagtttgttctctcacagtttaaggattttggagtccggctggaatctttaaaaggtcttattatgcatgaagaagagaatttggatagacttcaccaacaggaaaaagaaaatcctgactcattcctgaatcatgtgctggcactgacagcccaatcacctgatattgaacatttgaatgaagtgagcctcaagctcccacttagtgacgtagctgtgaagacgttacaaaatatgaaccggcaatggattcgggccacggccacggcactggagcgctgcagtgagcttcagggaattggattgaatgaaaagtttctttattgctgtgaaaagtggatccaacttttggagaagatagaagaagcactcaaagtggatgtggctaacagccttcctgagctcctggagcagcagaaaacctataagatgttagaagctgaagtttctataaaccagacaattgctgattcctatgtcacccagtccttacaactcctggacacaacagaaatagagaacagaccagaatttattacagaattctcaaagctgacggatcggtggcagaatgctgtccagggtgttcggcagaggaagggtgacgttgatgggctggtgaggcagtggcaagatttcactacttctgtggagaacttgtttcgcttcctcactgacaccagccacctgctatctgcagtgaagggccaggagcgcttcagcctctaccaaaccagaagtctgatccatgagctgaagaataaagaaattcattttcaaaggaggcgaactacctgtgccctaaccttggaagctggagaaaagttactgctcacaactgacctgaaaactaaagagtctgtgggtaggagaatcagtcaacttcaggacagctggaaagacatggagccccagctggcagagatgattaagcagttccagagcactgtagagacctgggaccagtgtgaaaagaaaatcaaggagttgaaaagcaggctgcaagttttaaaggcacaaagtgaagatcctcttccagagcttcacgaggacctccataacgaaaaagagctgattaaggaactagaacagtctttggctagctggactcagaacttgaaagaacttcaaactatgaaggcggacttaacccggcacgttctcgtggaagatgtgatggttttgaaggagcaaatagagcatttgcacagacaatgggaggacctctgcttaagggtggccatacgtaaacaggagattgaagacagactcaatacatgggttgtattcaatgaaaaaaataaagagttgtgtgcctggctggtgcagatggaaaacaaagttctacagacagcggacattagtattgaagaaatgattgaaaagttacagaaggactgcatggaagaaataaacttgtttagtgaaaacaagttacagttaaagcagatgggtgaccagttgatcaaggccagcaacaaatcaagagcagctgagatcgatgacaagctcaacaaaattaacgatcgttggcaacatctttttgatgtcatcggatcaagggtgaagaagctgaaggagacctttgcttttattcagcagttggacaaaaacatgagcaaccttcgcacctggttggctcgaattgagtctgagctttccaagcctgttgtttatgatgtctgcgatgatcaagagatccagaagaggctcgctgagcagcaggatctacagcgagatattgaacaacacagcgcaggggtggagtccgtgtttaacatctgtgacgtcctactgcacgactccgatgcctgtgcaaatgagaccgagtgtgactcgatccagcagaccaccaggagcctggacagacgctggaggaacatttgtgccatgtccatggagcggcgcatgaaaatcgaggagacgtggcgcctgtggcagaagtttttagacgactattctcgctttgaggactggctcaagtcagctgagaggacggcagcctgcccaaattcctcagaggtgttgtacacgagtgccaaagaggaactgaagaggtttgaggcctttcagcggcagattcatgagcggctcactcagctggagctcatcaacaagcagtaccggcggctggcccgggagaaccgcacagacacggccagcaggctgaagcagatggtccacgagggcaaccagcgctgggacaaccttcagaggcgggtcacagccgtcctgcggagactcaggcatttcaccaaccagagggaagaatttgagggcaccagggagagcattctggtgtggctcacagagatggacctgcagctgaccaacgtggagcacttctcagagagtgacgccgatgacaagatgcgccaactgaatggcttccaacaggaaattacattaaataccaacaagattgatcagctcattgtgtttggggagcagctgattcagaagagcgagcccctggatgctgtgctgattgaggatgagctggaggaactccaccgctactgccaggaggtgtttggaagggtctcccggttccaccggcggctcacctcctgcactccgggcttggaagatgaaaaggaggcctctgagaatgaaacagacatggaagaccccagagaaatccagactgattcttggcgtaaacggggagagagcgaggaaccgtcatctcctcagtccctgtgtcatctagtggccccagggcacgagcggtctggctgcgagacccctgtcagcgtggactccatccccctggagtgggaccacacaggcgacgtggggggctcctcctctcacgaagaggacgaggagggcccatactacagcgcactgtcagatgtagaaatccctgaaaatcctgaggcatatcttaaaatgaccacaaaaactttgaaagcgtcttctggtaaatccatttcggatggccactcgtggcatgttcccgacagcccttcctgtcccgagcatcactacaagcaaatggaaggtgacaggaatgttccacctgttccccctgcgtccagcaccccttataaaccaccctatggaaagctactattacctccaggcacggatggtggcaaagaaggcccgcgagtcctgaatggcaacccacagcaggaagacgggggactggccggtatcacagagcagcagtcaggtgccttcgacagatgggagatgattcaagcacaggagcttcacaataagctcaaaataaaacaaaatttgcaacagctgaactctgatatcagcgccatcactacttggctgaaaaaaactgaagcagagctggaaatgttaaagatggcaaagcctccctctgatatccaggaaatagaactgagagtgaagagactgcaggagatactgaaagcctttgacacttacaaggcattagtggtctctgtcaacgtgagcagcaaggaatttctgcaaaccgagagccccgaatccacagagctccaaagtagactccgccagctgagcctgctctgggaagcagcacagggcgcagtggacagctggagagggggcttacgacagtcgctcatgcagtgccaggacttccaccagttgagtcaaaatctgctgctgtggttagcgagtgccaagaaccggaggcagaaggctcatgtcaccgatccaaaggcagacccccgggctctcctagagtgtcggagggaactaatgcaactggaaaaggagctggtagaacgtcaacctcaagtggacatgttacaggagatttcaaacagccttctcattaagggacatggagaagactgtattgaagctgaagaaaaggtgcatgttattgagaagaaactcaaacagttacgggagcaagtgtcccaagatttaatggccttgcagggaacccagaacccagcctcacccctgcccagcttcgacgaggtagactcgggggaccagcctcctgcaacatccgtgccagctccccgagcaaagttcagagcagtgagaactacagaaggcgaggaggagacagagagcagggtccccggcagcacacggccacagcgctccttcctctcaagggtggtccgggcagccctacccctgcagctgctcctcctgctgctgctgctcctggcctgcctgctgccctcctccgaagaagactacagctgcactcaggccaacaactttgcccggtccttttaccccatgctgaggtacaccaatgggccaccccccacatagagggcatagctggccacagtgctacaccacctgcctgattgccaagggtgcccagcacgtggccccagaccaatctgagtgacttagtgttggcaaggtcccgggacctgtgcagacttcttctgggcttacccagcacgggctccctggagcccagggcagctttcagattgtgttcctccccaggagcagggaacctgtgtggcaggtgccccgggtattttggcagaactagttgattagtttagggatctctggaaatgtcagtttcctgaagagccaagcactttgtgaattctggtttgtttgtaaaacagcattattataatgtaggtatggtcaatgagcagtggtgtccatcacatatattatagaagcaagcgaggacattccaccctagaaatggttcagaaactcataggcacccttagctgatggaaacaatcaatcatatttaatacgcttagaatcagttttactccaatcagctggcaattttgagctgccggttatacaccaaaatgttctgttcagtacctagctctgctcttttatattgctttaaatttttaaagaaattgtattgcatggatgtggttatttgtgcatattttttaacaatgcccaatctgtatgaataatgtaaacttcgatttttttttaaaaaaattagattttagctggagcttttgactaatgtaaagtaaatgccaaactaccgacttgatagggatgtttttgtaagttaattttctaagactttttcacatccaaagtgatgctttgctttgggttttaactgtttggccacggcgggggtgggggcggggggttggtacagaaacttgaagctgtttgtgatatgtacaactcagatgtttctcattaaaaaacaaaattagccagacttctgttgtactg

SEQ ID NO: 29635 - DNA, 11095 bp, Homo sapiens
  source 1..11095: mol_type = unassigned DNA
tgctgcttgcagctttttagatcaggactgcaatggagatacaattaaatcctaaaggtactttagaagcagggggtgttgtaatgtcttttctagataatggtgtgacactatgaagagatatcaagtttaattcttacaaattagaaagcatcatctgactaaactgagtgtctctggggcttaatcagcttgtatcactagtggggttttgtcatgcaaactgcactcctttaaatcataaggatgtgctggaaggctgctttcactttttagaattaaacttttcccccagtctcgtgagtattgcaactctcttaatgcttttaggagcttcaaagcatccttaagaaagggaaactaacttttgagaatattatggaaaaactgcgaatcaagtattccgaaatgtacaccatagtccctgcagagattgaatcccaggtggaagaatgcagaaaagctttagaagacatagatgagaagattagcaatgaagtcttaaaaagctcaccatcatatgcaatgaggagaaaaatagaagaaattaacaatgggcttcataatgttgaaaagatgttgcagcagaaaagcaaaaatattgagaaagctcaagaaattcaaaagaaaatgtgggacgagttagatctatggcattccaaactaaatgagctggattctgaagttcaggacattgttgaacaggacccaggacaggctcaagaatggatggataacttgatgattcctttccagcagtatcagcaagtatcacagagagcagagtgtagaacctcacagttgaataaggccacagttaagatggaggaatatagtgaccttctgaagagcactgaggcttggatagaaaataccagtcatttgctggccaatcctgctgactatgactctttgaggacactgagtcaccatgctagcactgtgcaggattccaagtgttttagaagtggaccaagaccaaatatttatgtttcttattatgttacagttatacagatggctttggaagattcagaacagaagcacaatcttttacattcaatctttatggatctagaagacctgtcaataatttttgaaacagatgaattaacccaatccatacaagagttaagtaatcaagtaacagctttacaacaaaaaataatggaaagccttccacagattcagcgaatggctgatgatgtggttgctattgaatctgaagtaaaatcaatggaaaaaagagtttcaaaaatcaaaactatcctattatcaaaagaaatatttgatttttcacctgaagaacatctcaaacatggggaggtcatacttgaaaatatacgtcccatgaagaaaaccattgctgagatagtgtcttaccaagtggaactgaggttgccccaaacaggaatgaaacctctgcctgtgtttcagcggacaaatcagcttttacaagatataaaactattggaaaatgtgactcaagaacaaaatgagttattaaaggtagtcataaaacagaccaatgaatgggatgaagaaatagaaaatttgaaacagatcttaaataattattcagctcagttctcccttgaacatatgtcaccagaccaagctgacaagctgccacaactacagggagaaatcgaacgtatggagaaacagattctgagtttgaaccagagaaaagaagacctgttggtggacttgaaggccaccgtactaaaccttcaccagcatttgaagcaagaacaagaaggagtagaaagagataggctgccagctgtaacatcagaggaaggtggagtggcagagagggatgcttctgagcggaagttgaacagaagaggctccatgtcttacctggcagcagtcgaggaagaggtggaagaaagttccgtgaagagcgataatggagatgagaaggcagagccatcgcctcagtcttggtcttcactttggaagcatgacaaggacatggaagaagacagagcttcctcatcctctggaacaattgttcaggaagcatatgggaaaataagcacctctgataattccatggcacaaatcctcacaccagactcactaaacactgagcaaggcccagaatgttccctaaggcccaaccaaacagaagagggcaccacacctcctattgaggctgacactctggactcttctgacgcgcaaggaggtttggagcccagggtggagaaaactaggccggagcccacagaagtcctgcatgcctgcaagacccaggtggccgagctggagctgtggctgcaacaagccaacgtggcagttgagccggaaacattaaacgcagacatgcagcaggtgctggaacagcagctggtagggtgccaggctatgctaacagagattgagcacaaggttgcctttctgttagagacttgcaaagatcagggcctgggagataatggagccactcaacatgaggctgaagcgctttccctgaaactgaaaacagtgaagtgcaatttagaaaaagtccagatgatgcttcaggagaagcacagtgaagatcagcatcctaccattctaaagaaatcctcagagccagagcatcaagaagctctccaaccagttaacctttctgaattggaatccattgtaactgaaaggccacaattcagcagacaaaaagatttccagcagcaacaggttctggagttaaaaccaatggaacagaaagatttcatcaaattcatagaatttaatgctaagaaaatgtggccccagtattgccaacatgataacgatacaactcaggaatcatctgcaagcaaccaggcatccagccctgaaaatgacgttccagactcgatcttgtcaccccagggccaaaatggagataagtggcaatatctgcatcatgaactctcatcaaaaataaagctcccactccctcagcttgtggagcctcaggtttccacaaatatgggtattctacccagcgtgactatgtataactttagatacccaacaactgaagaactgaaaacctataccacccaacttgaagacctgcgccaagaagcaagtaaccttcagacacaggaaaatatgacagaagaagcatatatcaatttggataaaaaattgtttgaactattcctgaccctcagtcagtgcctcagcagtgtggaggagatgctggagatgcccagactttacagggaggatggttctggccagcaggtgcactacgagacgctggctcttgagttgaagaaactttatttagcgctaagtgacaagaagggtgatcttttgaaagccatgacttggcctggcgagaacaccaacttgctccttgaatgttttgacaaccttcaagtctgcctggagcacactcaggctgcagctgtctgtagaagcaagtccctgaaagctggcctcgattacaaccgcagttaccagaatgaaataaagagattatatcatcagctcattaagagtaagacatctttacaacagtctttgaatgaaatcagtgggcagagtgttgctgaacagcttcagaaagcagatgcatatacagtggagctggagaacgccgagagccgagtggccaaactaagagatgaaggggagaggcttcatttaccttatgctttactccaggaggtttacaaattagaggatgtacttgacagtatgtggggaatgctaagagccaggtacacagaactcagcagccctttcgtcactgagagccagcaagatgctttgttgcaaggcatggtggaactggtgaagattgggaaggaaaagcttgctcatggccacttaaaacaaaccaaaagtaaagtggcgttacaggctcaaatagaaaatcacaaggtttttttccagaagcttgttgctgacatgttgttgatccaagcatactctgccaaaatacttccttctttattgcaaaacagagagacattttgggcagaacaagtaacagaagttaaaatactagaagaaaagtcacgccaatgtggtatgaagctgcagagtttgttgcagaaatgggaagaatttgatgaaaactatgcatctcttgaaaaggacctggaaattcttatatctacattgccctctgtgagtttggtggaagaaacagaggaaagattagtggaaaggatttcattttaccagcaaataaaaagaaacattggtggaaaacacgcccggctttaccaaactctgaacgaaggcaaacagttggtggcgtctgtgagctgtcctgaattagagggccagatcgcaaaactggaagagcagtggttgtccctgaacaagaaaattgaccatgagctccacaggctgcaagctcttctcaagcatctgctcagttataacagagattcggatcagttaaccaagtggttggaatcttcccagcatactctgaattactggaaagaacagtccctcaatgtgtctcaggacttggatacaatcagaagcaacatcaacaatttttttgagttttcaaaagaagttgatgaaaaatcctccttgaagactgccgttatcagtatcgggaaccagcttcttcacctgaaagaaactgatacagctacactgagagcttctttagcacagtttgaacaaaaatggacaatgctcataactcaacttccagatattcaagaaaaacttcaccagcttcaaatggagaaattgccgtctcgtaaagcaatcacagaaatgattagctggatgaacaatgtggagcatcaaacttcagatgaagactccgtgcattcaccaagttctgcatctcaagttaaacatcttcttcagaagcacaaggagtttagaatggaaatggactataaacagtggatagttgacttcgttaaccagtcattacttcagctaagcacctgtgatgtagaaagcaagcgctatgaaagaacggagtttgcagagcacctgggggagatgaaccgccagtggcaccgtgtacatggaatgctgaatagaaagatacaacatttagaacaacttctagaaagtatcactgagagtgaaaataaaatacagatcttgaacaactggctggaagcacaagaagagagactgaaaactttacaaaaacctgaaagtgtgatctcagtgcagaagctgctcctggactgtcaggatatagaaaatcaacttgcaattaaatccaaagcactagatgagttgaaacaaagttatctgactttggagagtggggcagtgccattgttagaagatacagcatcccgaattgatgagttatttcaaaagagaagcagtgttctcactcaggtcaatcagctcaaaacctccatgcagtcagttttacaggagtggaagatttatgatcaactctatgatgaagtgaatatgatgacaatccgattctggtactgcatggaacacagcaagcctgtggtgttatcattggagaccttgagatgccaggtggagaaccttcagtctctgcaagatgaagctgagagcagtgaagggagttgggagaaactccaggaggttatcggcaaactcaaaggtctctgcccctctgttgctgaaataatcgaagagaaatgccaaaatactcataaaaggtggactcaggtgaaccaagccattgcagaccagttgcagaaggcccagagtctgctccagctctggaaggcctatagcaatgctcatggtgaagctgccgcaaggctgaagcagcaggaagcaaagtttcaacagctcgcaaacatcagcatgtctggaaacaacctggcagagatcctgcccccagccctgcaggacataaaggagctgcagcatgatgtgcagaaaacaaaagaagcctttctccaaaattccagtgtcctggatcgactcccacaacccgcagagtccagcacccacatgctcctcccgggccccctgcactctctccagagggctgcttatttggaaaagatgctgcttgtgaaagcaaatgaatttgagtttgttctctcacagtttaaggattttggagtccggctggaatctttaaaaggtcttattatgcatgaagaagagaatttggatagacttcaccaacaggaaaaagaaaatcctgactcattcctgaatcatgtgctggcactgacagcccaatcacctgatattgaacatttgaatgaagtgagcctcaagctcccacttagtgacgtagctgtgaagacgttacaaaatatgaaccggcaatggattcgggccacggccacggcactggagcgctgcagtgagcttcagggaattggattgaatgaaaagtttctttattgctgtgaaaagtggatccaacttttggagaagatagaagaagcactcaaagtggatgtggctaacagccttcctgagctcctggagcagcagaaaacctataagatgttagaagctgaagtttctataaaccagacaattgctgattcctatgtcacccagtccttacaactcctggacacaacagaaatagagaacagaccagaatttattacagaattctcaaagctgacggatcggtggcagaatgctgtccagggtgttcggcagaggaagggtgacgttgatgggctggtgaggcagtggcaagatttcactacttctgtggagaacttgtttcgcttcctcactgacaccagccacctgctatctgcagtgaagggccaggagcgcttcagcctctaccaaaccagaagtctgatccatgagctgaagaataaagaaattcattttcaaaggaggcgaactacctgtgccctaaccttggaagctggagaaaagttactgctcacaactgacctgaaaactaaagagtctgtgggtaggagaatcagtcaacttcaggacagctggaaagacatggagccccagctggcagagatgattaagcagttccagagcactgtagagacctgggaccagtgtgaaaagaaaatcaaggagttgaaaagcaggctgcaagttttaaaggcacaaagtgaagatcctcttccagagcttcacgaggacctccataacgaaaaagagctgattaaggaactagaacagtctttggctagctggactcagaacttgaaagaacttcaaactatgaaggcggacttaacccggcacgttctcgtggaagatgtgatggttttgaaggagcaaatagagcatttgcacagacaatgggaggacctctgcttaagggtggccatacgtaaacaggagattgaagacagactcaatacatgggttgtattcaatgaaaaaaataaagagttgtgtgcctggctggtgcagatggaaaacaaagttctacagacagcggacattagtattgaagaaatgattgaaaagttacagaaggactgcatggaagaaataaacttgtttagtgaaaacaagttacagttaaagcagatgggtgaccagttgatcaaggccagcaacaaatcaagagcagctgagatcgatgacaagctcaacaaaattaacgatcgttggcaacatctttttgatgtcatcggatcaagggtgaagaagctgaaggagacctttgcttttattcagcagttggacaaaaacatgagcaaccttcgcacctggttggctcgaattgagtctgagctttccaagcctgttgtttatgatgtctgcgatgatcaagagatccagaagaggctcgctgagcagcaggatctacagcgagatattgaacaacacagcgcaggggtggagtccgtgtttaacatctgtgacgtcctactgcacgactccgatgcctgtgcaaatgagaccgagtgtgactcgatccagcagaccaccaggagcctggacagacgctggaggaacatttgtgccatgtccatggagcggcgcatgaaaatcgaggagacgtggcgcctgtggcagaagtttttagacgactattctcgctttgaggactggctcaagtcagctgagaggacggcagcctgcccaaattcctcagaggtgttgtacacgagtgccaaagaggaactgaagaggtttgaggcctttcagcggcagattcatgagcggctcactcagctggagctcatcaacaagcagtaccggcggctggcccgggagaaccgcacagacacggccagcaggctgaagcagatggtccacgagggcaaccagcgctgggacaaccttcagaggcgggtcacagccgtcctgcggagactcaggcatttcaccaaccagagggaagaatttgagggcaccagggagagcattctggtgtggctcacagagatggacctgcagctgaccaacgtggagcacttctcagagagtgacgccgatgacaagatgcgccaactgaatggcttccaacaggaaattacattaaataccaacaagattgatcagctcattgtgtttggggagcagctgattcagaagagcgagcccctggatgctgtgctgattgaggatgagctggaggaactccaccgctactgccaggaggtgtttggaagggtctcccggttccaccggcggctcacctcctgcactccgggcttggaagatgaaaaggaggcctctgagaatgaaacagacatggaagaccccagagaaatccagactgattcttggcgtaaacggggagagagcgaggaaccgtcatctcctcagtccctgtgtcatctagtggccccagggcacgagcggtctggctgcgagacccctgtcagcgtggactccatccccctggagtgggaccacacaggcgacgtggggggctcctcctctcacgaagaggacgaggagggcccatactacagcgcactgtcaggtaaatccatttcggatggccactcgtggcatgttcccgacagcccttcctgtcccgagcatcactacaagcaaatggaaggtgacaggaatgttccacctgttccccctgcgtccagcaccccttataaaccaccctatggaaagctactattacctccaggcacggatggtggcaaagaaggcccgcgagtcctgaatggcaacccacagcaggaagacgggggactggccggtatcacagagcagcagtcaggtgccttcgacagatgggagatgattcaagcacaggagcttcacaataagctcaaaataaaacaaaatttgcaacagctgaactctgatatcagcgccatcactacttggctgaaaaaaactgaagcagagctggaaatgttaaagatggcaaagcctccctctgatatccaggaaatagaactgagagtgaagagactgcaggagatactgaaagcctttgacacttacaaggcattagtggtctctgtcaacgtgagcagcaaggaatttctgcaaaccgagagccccgaatccacagagctccaaagtagactccgccagctgagcctgctctgggaagcagcacagggcgcagtggacagctggagagggggcttacgacagtcgctcatgcagtgccaggacttccaccagttgagtcaaaatctgctgctgtggttagcgagtgccaagaaccggaggcagaaggctcatgtcaccgatccaaaggcagacccccgggctctcctagagtgtcggagggaactaatgcaactggaaaaggagctggtagaacgtcaacctcaagtggacatgttacaggagatttcaaacagccttctcattaagggacatggagaagactgtattgaagctgaagaaaaggtgcatgttattgagaagaaactcaaacagttacgggagcaagtgtcccaagatttaatggccttgcagggaacccagaacccagcctcacccctgcccagcttcgacgaggtagactcgggggaccagcctcctgcaacatccgtgccagctccccgagcaaagcagttcagagcagtgagaactacagaaggcgaggaggagacagagagcagggtccccggcagcacacggccacagcgctccttcctctcaagggtggtccgggcagccctacccctgcagctgctcctcctgctgctgctgctcctggcctgcctgctgccctcctccgaagaagactacagctgcactcaggccaacaactttgcccggtccttttaccccatgctgaggtacaccaatgggccaccccccacatagagggcatagctggccacagtgctacaccacctgcctgattgccaagggtgcccagcacgtggccccagaccaatctgagtgacttagtgttggcaaggtcccgggacctgtgcagacttcttctgggcttacccagcacgggctccctggagcccagggcagctttcagattgtgttcctccccaggagcagggaacctgtgtggcaggtgccccgggtattttggcagaactagttgattagtttagggatctctggaaatgtcagtttcctgaagagccaagcactttgtgaattctggtttgtttgtaaaacagcattattataatgtaggtatggtcaatgagcagtggtgtccatcacatatattatagaagcaagcgaggacattccaccctagaaatggttcagaaactcataggcacccttagctgatggaaacaatcaatcatatttaatacgcttagaatcagttttactccaatcagctggcaattttgagctgccggttatacaccaaaatgttctgttcagtacctagctctgctcttttatattgctttaaatttttaaagaaattgtattgcatggatgtggttatttgtgcatattttttaacaatgcccaatctgtatgaataatgtaaacttcgatttttttttaaaaaaattagattttagctggagcttttgactaatgtaaagtaaatgccaaactaccgacttgatagggatgtttttgtaagttaattttctaagactttttcacatccaaagtgatgctttgctttgggttttaactgtttggccacggcgggggtgggggcggggggttggtacagaaacttgaagctgtttgtgatatgtacaactcagatgtttctcattaaaaaacaaaattagcc

SEQ ID NO: 29636 - DNA, 3084 bp, Homo sapiens
  source 1..3084: mol_type = unassigned DNA
cgtgtctacctctgccttctgtggacaccatgcgccttggtccttgtgtcatggtgtatttacactgccgtactcacccataactgcgtgctccttacaaaaccccatccaagccagagccgtctcgatgccaaccccctctcctcccttcaggcctgtgcagagggaatttttcatggtgcctgttttgatgatttttttctccatctaactgaagtcctttggcatgggccaagctttcttcatggtggcttggtttggaactgtttccttgctttactgggatcccctggtggaaaggggtggggggttggggcggtaaagggtgctgatgatttgccacaggagggaaaaaaccttcctttccttgatttgcagctctaatcctcatccttagccccatccctatctgccatggtgggtcggggagagccctgaggagccttttggttcccaagtccatcttgatgttcactcttcccctcactcctgagaggccttctgccatcttggtccccagacccggccttgccactcagtgtccctaccactcgagaccctggctccaaaacgccactcatcccacagcaaatcatgttggtcgtgctccgttgtgtacccatctagtgaaggcacagtgttgctgagttgcatgactcatctcattctcttctgggacatactgacattttgcaaacatgcatgctttgcaaggaaagctgcagaactcattttcatactgtaacctgatgccatgtcacccgtgacccgttcagtaggagagaatagactgtcgcttgctgtctttcgtttcaggtaaatccatttcggatggccactcgtggcatgttcccgacagcccttcctgtcccgagcatcactacaagcaaatggaaggtgacaggaatgttccacctgttccccctgcgtccagcaccccttataaaccaccctatggaaagctactattacctccaggcacggatggtggcaaagaaggcccgcgagtcctgaatggcaacccacagcaggaagacgggggactggccggtatcacagagcagcagtcaggtgccttcgacagatgggagatgattcaagcacaggagcttcacaataagctcaaaataaaacaaaatttgcaacagctgaactctgatatcagcgccatcactacttggctgaaaaaaactgaagcagagctggaaatgttaaagatggcaaagcctccctctgatatccaggaaatagaactgagagtgaagagactgcaggagatactgaaagcctttgacacttacaaggcattagtggtctctgtcaacgtgagcagcaaggaatttctgcaaaccgagagccccgaatccacagagctccaaagtagactccgccagctgagcctgctctgggaagcagcacagggcgcagtggacagctggagagggggcttacgacagtcgctcatgcagtgccagggctctaagacacggccgcgctctgatgtgttgttttttaaggacttccaccagttgagtcaaaatctgctgctgtggttagcgagtgccaagaaccggaggcagaaggctcatgtcaccgatccaaaggcagacccccgggctctcctagagtgtcggagggaactaatgcaactggaaaaggagctggtagaacgtcaacctcaagtggacatgttacaggagatttcaaacagccttctcattaagggacatggagaagactgtattgaagctgaagaaaaggtgcatgttattgagaagaaactcaaacagttacgggagcaagtgtcccaagatttaatggccttgcagggaacccagaacccagcctcacccctgcccagcttcgacgaggtagactcgggggaccagcctcctgcaacatccgtgccagctccccgagcaaagttcagagcagtgagaactacagaaggcgaggaggagacagagagcagggtccccggcagcacacggccacagcgctccttcctctcaagggtggtccgggcagccctacccctgcagctgctcctcctgctgctgctgctcctggcctgcctgctgccctcctccgaagaagactacagctgcactcaggccaacaactttgcccggtccttttaccccatgctgaggtacaccaatgggccaccccccacatagagggcatagctggccacagtgctacaccacctgcctgattgccaagggtgcccagcacgtggccccagaccaatctgagtgacttagtgttggcaaggtcccgggacctgtgcagacttcttctgggcttacccagcacgggctccctggagcccagggcagctttcagattgtgttcctccccaggagcagggaacctgtgtggcaggtgccccgggtattttggcagaactagttgattagtttagggatctctggaaatgtcagtttcctgaagagccaagcactttgtgaattctggtttgtttgtaaaacagcattattataatgtaggtatggtcaatgagcagtggtgtccatcacatatattatagaagcaagcgaggacattccaccctagaaatggttcagaaactcataggcacccttagctgatggaaacaatcaatcatatttaatacgcttagaatcagttttactccaatcagctggcaattttgagctgccggttatacaccaaaatgttctgttcagtacctagctctgctcttttatattgctttaaatttttaaagaaattgtattgcatggatgtggttatttgtgcatattttttaacaatgcccaatctgtatgaataatgtaaacttcgatttttttttaaaaaaattagattttagctggagcttttgactaatgtaaagtaaatgccaaactaccgacttgatagggatgtttttgtaagttaattttctaagactttttcacatccaaagtgatgctttgctttgggttttaactgtttggccacggcgggggtgggggcggggggttggtacagaaacttgaagctgtttgtgatatgtacaactcagatgtttctcattaaaaaacaaaattagcc

SEQ ID NO: 29637 - DNA, 2669 bp, Homo sapiens
  source 1..2669: mol_type = unassigned DNA
gcagaagcctatgagttgattaattctaacaactggatactgtggtttagggcttggaagatgaaaaggaggcctctgagaatgaaacagacatggaagaccccagagaaatccagactgattcttggcgtaaacggggagagagcgaggaaccgtcatctcctcagtccctgtgtcatctagtggccccagggcacgagcggtctggctgcgagacccctgtcagcgtggactccatccccctggagtgggaccacacaggcgacgtggggggctcctcctctcacgaagaggacgaggagggcccatactacagcgcactgtcagatgtagaaatccctgaaaatcctgaggcatatcttaaaatgaccacaaaaactttgaaagcgtcttctggtaaatccatttcggatggccactcgtggcatgttcccgacagcccttcctgtcccgagcatcactacaagcaaatggaaggtgacaggaatgttccacctgttccccctgcgtccagcaccccttataaaccaccctatggaaagctactattacctccaggcacggatggtggcaaagaaggcccgcgagtcctgaatggcaacccacagcaggaagacgggggactggccggtatcacagagcagcagtcaggtgccttcgacagatgggagatgattcaagcacaggagcttcacaataagctcaaaataaaacaaaatttgcaacagctgaactctgatatcagcgccatcactacttggctgaaaaaaactgaagcagagctggaaatgttaaagatggcaaagcctccctctgatatccaggaaatagaactgagagtgaagagactgcaggagatactgaaagcctttgacacttacaaggcattagtggtctctgtcaacgtgagcagcaaggaatttctgcaaaccgagagccccgaatccacagagctccaaagtagactccgccagctgagcctgctctgggaagcagcacagggcgcagtggacagctggagagggggcttacgacagtcgctcatgcagtgccagggctctaagacacggccgcgctctgatgtgttgttttttaaggacttccaccagttgagtcaaaatctgctgctgtggttagcgagtgccaagaaccggaggcagaaggctcatgtcaccgatccaaaggcagacccccgggctctcctagagtgtcggagggaactaatgcaactggaaaaggagctggtagaacgtcaacctcaagtggacatgttacaggagatttcaaacagccttctcattaagggacatggagaagactgtattgaagctgaagaaaaggtgcatgttattgagaagaaactcaaacagttacgggagcaagtgtcccaagatttaatggccttgcagggaacccagaacccagcctcacccctgcccagcttcgacgaggtagactcgggggaccagcctcctgcaacatccgtgccagctccccgagcaaagcagttcagagcagtgagaactacagaaggcgaggaggagacagagagcagggtccccggcagcacacggccacagcgctccttcctctcaagggtggtccgggcagccctacccctgcagctgctcctcctgctgctgctgctcctggcctgcctgctgccctcctccgaagaagactacagctgcactcaggccaacaactttgcccggtccttttaccccatgctgaggtacaccaatgggccaccccccacatagagggcatagctggccacagtgctacaccacctgcctgattgccaagggtgcccagcacgtggccccagaccaatctgagtgacttagtgttggcaaggtcccgggacctgtgcagacttcttctgggcttacccagcacgggctccctggagcccagggcagctttcagattgtgttcctccccaggagcagggaacctgtgtggcaggtgccccgggtattttggcagaactagttgattagtttagggatctctggaaatgtcagtttcctgaagagccaagcactttgtgaattctggtttgtttgtaaaacagcattattataatgtaggtatggtcaatgagcagtggtgtccatcacatatattatagaagcaagcgaggacattccaccctagaaatggttcagaaactcataggcacccttagctgatggaaacaatcaatcatatttaatacgcttagaatcagttttactccaatcagctggcaattttgagctgccggttatacaccaaaatgttctgttcagtacctagctctgctcttttatattgctttaaatttttaaagaaattgtattgcatggatgtggttatttgtgcatattttttaacaatgcccaatctgtatgaataatgtaaacttcgatttttttttaaaaaaattagattttagctggagcttttgactaatgtaaagtaaatgccaaactaccgacttgatagggatgtttttgtaagttaattttctaagactttttcacatccaaagtgatgctttgctttgggttttaactgtttggccacggcgggggtgggggcggggggttggtacagaaacttgaagctgtttgtgatatgtacaactcagatgtttctcattaaaaaacaaaattagccag

SEQ ID NO: 29638 - DNA, 3277 bp, Homo sapiens
  source 1..3277: mol_type = unassigned DNA
cagggtctcccccactaaaccgtgcgggtgtcaggggataaaagaagtgcaaaagcacaggcttggaggggatggcttgtgttaagttgctttgctcccatcagaatcgaggagacgtggcgcctgtggcagaagtttttagacgactattctcgctttgaggactggctcaagtcagctgagaggacggcagcctgcccaaattcctcagaggtgttgtacacgagtgccaaagaggaactgaagaggtttgaggcctttcagcggcagattcatgagcggctcactcagctggagctcatcaacaagcagtaccggcggctggcccgggagaaccgcacagacacggccagcaggctgaagcagatggtccacgagggcaaccagcgctgggacaaccttcagaggcgggtcacagccgtcctgcggagactcaggcatttcaccaaccagagggaagaatttgagggcaccagggagagcattctggtgtggctcacagagatggacctgcagctgaccaacgtggagcacttctcagagagtgacgccgatgacaagatgcgccaactgaatggcttccaacaggaaattacattaaataccaacaagattgatcagctcattgtgtttggggagcagctgattcagaagagcgagcccctggatgctgtgctgattgaggatgagctggaggaactccaccgctactgccaggaggtgtttggaagggtctcccggttccaccggcggctcacctcctgcactccgggcttggaagatgaaaaggaggcctctgagaatgaaacagacatggaagaccccagagaaatccagactgattcttggcgtaaacggggagagagcgaggaaccgtcatctcctcagtccctgtgtcatctagtggccccagggcacgagcggtctggctgcgagacccctgtcagcgtggactccatccccctggagtgggaccacacaggcgacgtggggggctcctcctctcacgaagaggacgaggagggcccatactacagcgcactgtcaggtaaatccatttcggatggccactcgtggcatgttcccgacagcccttcctgtcccgagcatcactacaagcaaatggaaggtgacaggaatgttccacctgttccccctgcgtccagcaccccttataaaccaccctatggaaagctactattacctccaggcacggatggtggcaaagaaggcccgcgagtcctgaatggcaacccacagcaggaagacgggggactggccggtatcacagagcagcagtcaggtgccttcgacagatgggagatgattcaagcacaggagcttcacaataagctcaaaataaaacaaaatttgcaacagctgaactctgatatcagcgccatcactacttggctgaaaaaaactgaagcagagctggaaatgttaaagatggcaaagcctccctctgatatccaggaaatagaactgagagtgaagagactgcaggagatactgaaagcctttgacacttacaaggcattagtggtctctgtcaacgtgagcagcaaggaatttctgcaaaccgagagccccgaatccacagagctccaaagtagactccgccagctgagcctgctctgggaagcagcacagggcgcagtggacagctggagagggggcttacgacagtcgctcatgcagtgccaggacttccaccagttgagtcaaaatctgctgctgtggttagcgagtgccaagaaccggaggcagaaggctcatgtcaccgatccaaaggcagacccccgggctctcctagagtgtcggagggaactaatgcaactggaaaaggagctggtagaacgtcaacctcaagtggacatgttacaggagatttcaaacagccttctcattaagggacatggagaagactgtattgaagctgaagaaaaggtgcatgttattgagaagaaactcaaacagttacgggagcaagtgtcccaagatttaatggccttgcagggaacccagaacccagcctcacccctgcccagcttcgacgaggtagactcgggggaccagcctcctgcaacatccgtgccagctccccgagcaaagcagttcagagcagtgagaactacagaaggcgaggaggagacagagagcagggtccccggcagcacacggccacagcgctccttcctctcaagggtggtccgggcagccctacccctgcagctgctcctcctgctgctgctgctcctggcctgcctgctgccctcctccgaagaagactacagctgcactcaggccaacaactttgcccggtccttttaccccatgctgaggtacaccaatgggccaccccccacatagagggcatagctggccacagtgctacaccacctgcctgattgccaagggtgcccagcacgtggccccagaccaatctgagtgacttagtgttggcaaggtcccgggacctgtgcagacttcttctgggcttacccagcacgggctccctggagcccagggcagctttcagattgtgttcctccccaggagcagggaacctgtgtggcaggtgccccgggtattttggcagaactagttgattagtttagggatctctggaaatgtcagtttcctgaagagccaagcactttgtgaattctggtttgtttgtaaaacagcattattataatgtaggtatggtcaatgagcagtggtgtccatcacatatattatagaagcaagcgaggacattccaccctagaaatggttcagaaactcataggcacccttagctgatggaaacaatcaatcatatttaatacgcttagaatcagttttactccaatcagctggcaattttgagctgccggttatacaccaaaatgttctgttcagtacctagctctgctcttttatattgctttaaatttttaaagaaattgtattgcatggatgtggttatttgtgcatattttttaacaatgcccaatctgtatgaataatgtaaacttcgatttttttttaaaaaaattagattttagctggagcttttgactaatgtaaagtaaatgccaaactaccgacttgatagggatgtttttgtaagttaattttctaagactttttcacatccaaagtgatgctttgctttgggttttaactgtttggccacggcgggggtgggggcggggggttggtacagaaacttgaagctgtttgtgatatgtacaactcagatgtttctcattaaaaaacaaaattagcc

SEQ ID NO: 29639 - DNA, 11532 bp, Homo sapiens
  source 1..11532: mol_type = unassigned DNA
atggaagaggatatttacactaacctcagcaaaatggagacagttcttggacagtccatgtcctcgttgccactgtcttacagagaagctttagagcgcttggaacagagcaaggccttggtgtcaaatcttatatcaaccaaagaagagttaatgaaactacgacagatccttagactcttgagactcaggtgcacagaaaatgatggcatatgtttgctcaagattgtgtcggctctgtgggagaaatggctgagtttgctggaagctgctaaagagtgggagatgtggtgcgaagaactgaagcaggaatggaaatttgtcagtgaagaaattgaacgagaggcaattattttagataatcttcaggaagaactccctgaaatttccaaaacaaaagaggcagccaccacagaggaactctctgagctgctagactgtttatgccaatatggagagaacgtggagaagcaacagctgttactgactctacttcttcagcgcatcagaagtatccagaatgttcctgaaagctcaggggctgtggaaactgttccagcatttcaagaaattacttctatgaaagaacgatgcaacaagcttcttcagaaagttcagaaaaataaagaattggtgcagactgaaatccaagaaagacattccttcacaaaagagataattgctttgaagaatttctttcaacagaccacaacttcattccaaaatatggcattccaggatcacccagaaaagtcagaacaatttgaggagcttcaaagcatccttaagaaagggaaactaacttttgagaatattatggaaaaactgcgaatcaagtattccgaaatgtacaccatagtccctgcagagattgaatcccaggtggaagaatgcagaaaagctttagaagacatagatgagaagattagcaatgaagtcttaaaaagctcaccatcatatgcaatgaggagaaaaatagaagaaattaacaatgggcttcataatgttgaaaagatgttgcagcagaaaagcaaaaatattgagaaagctcaagaaattcaaaagaaaatgtgggacgagttagatctatggcattccaaactaaatgagctggattctgaagttcaggacattgttgaacaggacccaggacaggctcaagaatggatggataacttgatgattcctttccagcagtatcagcaagtatcacagagagcagagtgtagaacctcacagttgaataaggccacagttaagatggaggaatatagtgaccttctgaagagcactgaggcttggatagaaaataccagtcatttgctggccaatcctgctgactatgactctttgaggacactgagtcaccatgctagcactgtgcagatggctttggaagattcagaacagaagcacaatcttttacattcaatctttatggatctagaagacctgtcaataatttttgaaacagatgaattaacccaatccatacaagagttaagtaatcaagtaacagctttacaacaaaaaataatggaaagccttccacagattcagcgaatggctgatgatgtggttgctattgaatctgaagtaaaatcaatggaaaaaagagtttcaaaaatcaaaactatcctattatcaaaagaaatatttgatttttcacctgaagaacatctcaaacatggggaggtcatacttgaaaatatacgtcccatgaagaaaaccattgctgagatagtgtcttaccaagtggaactgaggttgccccaaacaggaatgaaacctctgcctgtgtttcagcggacaaatcagcttttacaagatataaaactattggaaaatgtgactcaagaacaaaatgagttattaaaggtagtcataaaacagaccaatgaatgggatgaagaaatagaaaatttgaaacagatcttaaataattattcagctcagttctcccttgaacatatgtcaccagaccaagctgacaagctgccacaactacagggagaaatcgaacgtatggagaaacagattctgagtttgaaccagagaaaagaagacctgttggtggacttgaaggccaccgtactaaaccttcaccagcatttgaagcaagaacaagaaggagtagaaagagataggctgccagctgtaacatcagaggaaggtggagtggcagagagggatgcttctgagcggaagttgaacagaagaggctccatgtcttacctggcagcagtcgaggaagaggtggaagaaagttccgtgaagagcgataatggagatgagaaggcagagccatcgcctcagtcttggtcttcactttggaagcatgacaaggacatggaagaagacagagcttcctcatcctctggaacaattgttcaggaagcatatgggaaaataagcacctctgataattccatggcacaaatcctcacaccagactcactaaacactgagcaaggcccagaatgttccctaaggcccaaccaaacagaagagggcaccacacctcctattgaggctgacactctggactcttctgacgcgcaaggaggtttggagcccagggtggagaaaactaggccggagcccacagaagtcctgcatgcctgcaagacccaggtggccgagctggagctgtggctgcaacaagccaacgtggcagttgagccggaaacattaaacgcagacatgcagcaggtgctggaacagcagctggtagggtgccaggctatgctaacagagattgagcacaaggttgcctttctgttagagacttgcaaagatcagggcctgggagataatggagccactcaacatgaggctgaagcgctttccctgaaactgaaaacagtgaagtgcaatttagaaaaagtccagatgatgcttcaggagaagcacagtgaagatcagcatcctaccattctaaagaaatcctcagagccagagcatcaagaagctctccaaccagttaacctttctgaattggaatccattgtaactgaaaggccacaattcagcagacaaaaagatttccagcagcaacaggttctggagttaaaaccaatggaacagaaagatttcatcaaattcatagaatttaatgctaagaaaatgtggccccagtattgccaacatgataacgatacaactcaggaatcatctgcaagcaaccaggcatccagccctgaaaatgacgttccagactcgatcttgtcaccccagggccaaaatggagataagtggcaatatctgcatcatgaactctcatcaaaaataaagctcccactccctcagcttgtggagcctcaggtttccacaaatatgggtattctacccagcgtgactatgtataactttagatacccaacaactgaagaactgaaaacctataccacccaacttgaagacctgcgccaagaagcaagtaaccttcagacacaggaaaatatgacagaagaagcatatatcaatttggataaaaaattgtttgaactattcctgaccctcagtcagtgcctcagcagtgtggaggagatgctggagatgcccagactttacagggaggatggttctggccagcaggtgcactacgagacgctggctcttgagttgaagaaactttatttagcgctaagtgacaagaagggtgatcttttgaaagccatgacttggcctggcgagaacaccaacttgctccttgaatgttttgacaaccttcaagtctgcctggagcacactcaggctgcagctgtctgtagaagcaagtccctgaaagctggcctcgattacaaccgcagttaccagaatgaaataaagagattatatcatcagctcattaagagtaagacatctttacaacagtctttgaatgaaatcagtgggcagagtgttgctgaacagcttcagaaagcagatgcatatacagtggagctggagaacgccgagagccgagtggccaaactaagagatgaaggggagaggcttcatttaccttatgctttactccaggaggtttacaaattagaggatgtacttgacagtatgtggggaatgctaagagccaggtacacagaactcagcagccctttcgtcactgagagccagcaagatgctttgttgcaaggcatggtggaactggtgaagattgggaaggaaaagcttgctcatggccacttaaaacaaaccaaaagtaaagtggcgttacaggctcaaatagaaaatcacaaggtttttttccagaagcttgttgctgacatgttgttgatccaagcatactctgccaaaatacttccttctttattgcaaaacagagagacattttgggcagaacaagtaacagaagttaaaatactagaagaaaagtcacgccaatgtggtatgaagctgcagagtttgttgcagaaatgggaagaatttgatgaaaactatgcatctcttgaaaaggacctggaaattcttatatctacattgccctctgtgagtttggtggaagaaacagaggaaagattagtggaaaggatttcattttaccagcaaataaaaagaaacattggtggaaaacacgcccggctttaccaaactctgaacgaaggcaaacagttggtggcgtctgtgagctgtcctgaattagagggccagatcgcaaaactggaagagcagtggttgtccctgaacaagaaaattgaccatgagctccacaggctgcaagctcttctcaagcatctgctcagttataacagagattcggatcagttaaccaagtggttggaatcttcccagcatactctgaattactggaaagaacagtccctcaatgtgtctcaggacttggatacaatcagaagcaacatcaacaatttttttgagttttcaaaagaagttgatgaaaaatcctccttgaagactgccgttatcagtatcgggaaccagcttcttcacctgaaagaaactgatacagctacactgagagcttctttagcacagtttgaacaaaaatggacaatgctcataactcaacttccagatattcaagaaaaacttcaccagcttcaaatggagaaattgccgtctcgtaaagcaatcacagaaatgattagctggatgaacaatgtggagcatcaaacttcagatgaagactccgtgcattcaccaagttctgcatctcaagttaaacatcttcttcagaagcacaaggagtttagaatggaaatggactataaacagtggatagttgacttcgttaaccagtcattacttcagctaagcacctgtgatgtagaaagcaagcgctatgaaagaacggagtttgcagagcacctgggggagatgaaccgccagtggcaccgtgtacatggaatgctgaatagaaagatacaacatttagaacaacttctagaaagtatcactgagagtgaaaataaaatacagatcttgaacaactggctggaagcacaagaagagagactgaaaactttacaaaaacctgaaagtgtgatctcagtgcagaagctgctcctggactgtcaggatatagaaaatcaacttgcaattaaatccaaagcactagatgagttgaaacaaagttatctgactttggagagtggggcagtgccattgttagaagatacagcatcccgaattgatgagttatttcaaaagagaagcagtgttctcactcaggtcaatcagctcaaaacctccatgcagtcagttttacaggagtggaagatttatgatcaactctatgatgaagtgaatatgatgacaatccgattctggtactgcatggaacacagcaagcctgtggtgttatcattggagaccttgagatgccaggtggagaaccttcagtctctgcaagatgaagctgagagcagtgaagggagttgggagaaactccaggaggttatcggcaaactcaaaggtctctgcccctctgttgctgaaataatcgaagagaaatgccaaaatactcataaaaggtggactcaggtgaaccaagccattgcagaccagttgcagaaggcccagagtctgctccagctctggaaggcctatagcaatgctcatggtgaagctgccgcaaggctgaagcagcaggaagcaaagtttcaacagctcgcaaacatcagcatgtctggaaacaacctggcagagatcctgcccccagccctgcaggacataaaggagctgcagcatgatgtgcagaaaacaaaagaagcctttctccaaaattccagtgtcctggatcgactcccacaacccgcagagtccagcacccacatgctcctcccgggccccctgcactctctccagagggctgcttatttggaaaagatgctgcttgtgaaagcaaatgaatttgagtttgttctctcacagtttaaggattttggagtccggctggaatctttaaaaggtcttattatgcatgaagaagagaatttggatagacttcaccaacaggaaaaagaaaatcctgactcattcctgaatcatgtgctggcactgacagcccaatcacctgatattgaacatttgaatgaagtgagcctcaagctcccacttagtgacgtagctgtgaagacgttacaaaatatgaaccggcaatggattcgggccacggccacggcactggagcgctgcagtgagcttcagggaattggattgaatgaaaagtttctttattgctgtgaaaagtggatccaacttttggagaagatagaagaagcactcaaagtggatgtggctaacagccttcctgagctcctggagcagcagaaaacctataagatgttagaagctgaagtttctataaaccagacaattgctgattcctatgtcacccagtccttacaactcctggacacaacagaaatagagaacagaccagaatttattacagaattctcaaagctgacggatcggtggcagaatgctgtccagggtgttcggcagaggaagggtgacgttgatgggctggtgaggcagtggcaagatttcactacttctgtggagaacttgtttcgcttcctcactgacaccagccacctgctatctgcagtgaagggccaggagcgcttcagcctctaccaaaccagaagtctgatccatgagctgaagaataaagaaattcattttcaaaggaggcgaactacctgtgccctaaccttggaagctggagaaaagttactgctcacaactgacctgaaaactaaagagtctgtgggtaggagaatcagtcaacttcaggacagctggaaagacatggagccccagctggcagagatgattaagcagttccagagcactgtagagacctgggaccagtgtgaaaagaaaatcaaggagttgaaaagcaggctgcaagttttaaaggcacaaagtgaagatcctcttccagagcttcacgaggacctccataacgaaaaagagctgattaaggaactagaacagtctttggctagctggactcagaacttgaaagaacttcaaactatgaaggcggacttaacccggcacgttctcgtggaagatgtgatggttttgaaggagcaaatagagcatttgcacagacaatgggaggacctctgcttaagggtggccatacgtaaacaggagattgaagacagactcaatacatgggttgtattcaatgaaaaaaataaagagttgtgtgcctggctggtgcagatggaaaacaaagttctacagacagcggacattagtattgaagaaatgattgaaaagttacagaaggactgcatggaagaaataaacttgtttagtgaaaacaagttacagttaaagcagatgggtgaccagttgatcaaggccagcaacaaatcaagagcagctgagatcgatgacaagctcaacaaaattaacgatcgttggcaacatctttttgatgtcatcggatcaagggtgaagaagctgaaggagacctttgcttttattcagcagttggacaaaaacatgagcaaccttcgcacctggttggctcgaattgagtctgagctttccaagcctgttgtttatgatgtctgcgatgatcaagagatccagaagaggctcgctgagcagcaggatctacagcgagatattgaacaacacagcgcaggggtggagtccgtgtttaacatctgtgacgtcctactgcacgactccgatgcctgtgcaaatgagaccgagtgtgactcgatccagcagaccaccaggagcctggacagacgctggaggaacatttgtgccatgtccatggagcggcgcatgaaaatcgaggagacgtggcgcctgtggcagaagtttttagacgactattctcgctttgaggactggctcaagtcagctgagaggacggcagcctgcccaaattcctcagaggtgttgtacacgagtgccaaagaggaactgaagaggtttgaggcctttcagcggcagattcatgagcggctcactcagctggagctcatcaacaagcagtaccggcggctggcccgggagaaccgcacagacacggccagcaggctgaagcagatggtccacgagggcaaccagcgctgggacaaccttcagaggcgggtcacagccgtcctgcggagactcaggcatttcaccaaccagagggaagaatttgagggcaccagggagagcattctggtgtggctcacagagatggacctgcagctgaccaacgtggagcacttctcagagagtgacgccgatgacaagatgcgccaactgaatggcttccaacaggaaattacattaaataccaacaagattgatcagctcattgtgtttggggagcagctgattcagaagagcgagcccctggatgctgtgctgattgaggatgagctggaggaactccaccgctactgccaggaggtgtttggaagggtctcccggttccaccggcggctcacctcctgcactccgggcttggaagatgaaaaggaggcctctgagaatgaaacagacatggaagaccccagagaaatccagactgattcttggcgtaaacggggagagagcgaggaaccgtcatctcctcagtccctgtgtcatctagtggccccagggcacgagcggtctggctgcgagacccctgtcagcgtggactccatccccctggagtgggaccacacaggcgacgtggggggctcctcctctcacgaagaggacgaggagggcccatactacagcgcactgtcagatgtagaaatccctgaaaatcctgaggcatatcttaaaatgaccacaaaaactttgaaagcgtcttctggtaaatccatttcggatggccactcgtggcatgttcccgacagcccttcctgtcccgagcatcactacaagcaaatggaaggtgacaggaatgttccacctgttccccctgcgtccagcaccccttataaaccaccctatggaaagctactattacctccaggcacggatggtggcaaagaaggcccgcgagtcctgaatggcaacccacagcaggaagacgggggactggccggtatcacagagcagcagtcaggtgccttcgacagatgggagatgattcaagcacaggagcttcacaataagctcaaaataaaacaaaatttgcaacagctgaactctgatatcagcgccatcactacttggctgaaaaaaactgaagcagagctggaaatgttaaagatggcaaagcctccctctgatatccaggaaatagaactgagagtgaagagactgcaggagatactgaaagcctttgacacttacaaggcattagtggtctctgtcaacgtgagcagcaaggaatttctgcaaaccgagagccccgaatccacagagctccaaagtagactccgccagctgagcctgctctgggaagcagcacagggcgcagtggacagctggagagggggcttacgacagtcgctcatgcagtgccaggacttccaccagttgagtcaaaatctgctgctgtggttagcgagtgccaagaaccggaggcagaaggctcatgtcaccgatccaaaggcagacccccgggctctcctagagtgtcggagggaactaatgcaactggaaaaggagctggtagaacgtcaacctcaagtggacatgttacaggagatttcaaacagccttctcattaagggacatggagaagactgtattgaagctgaagaaaaggtgcatgttattgagaagaaactcaaacagttacgggagcaagtgtcccaagatttaatggccttgcagggaacccagaacccagcctcacccctgcccagcttcgacgaggtagactcgggggaccagcctcctgcaacatccgtgccagctccccgagcaaagttcagagcagtgagaactacagaaggcgaggaggagacagagagcagggtccccggcagcacacggccacagcgctccttcctctcaagggtggtccgggcagccctacccctgcagctgctcctcctgctgctgctgctcctggcctgcctgctgccctcctccgaagaagactacagctgcactcaggccaacaactttgcccggtccttttaccccatgctgaggtacaccaatgggccaccccccacatagagggcatagctggccacagtgctacaccacctgcctgattgccaagggtgcccagcacgtggccccagaccaatctgagtgacttagtgttggcaaggtcccgggacctgtgcagacttcttctgggcttacccagcacgggctccctggagcccagggcagctttcagattgtgttcctccccaggagcagggaacctgtgtggcaggtgccccgggtattttggcagaactagttgattagtttagggatctctggaaatgtcagtttcctgaagagccaagcactttgtgaattctggtttgtttgtaaaacagcattattataatgtaggtatggtcaatgagcagtggtgtccatcacatatattatagaagcaagcgaggacattccaccctagaaatggttcagaaactcataggcacccttagctgatggaaacaatcaatcatatttaatacgcttagaatcagttttactccaatcagctggcaattttgagctgccggttatacaccaaaatgttctgttcagtacctagctctgctcttttatattgctttaaatttttaaagaaattgtattgcatggatgtggttatttgtgcatattttttaacaatgcccaatctgtatgaataatgtaaacttcgatttttttttaaaaaaattagattttagctggagcttttgactaatgtaaagtaaatgccaaactaccgacttgatagggatgtttttgtaagttaattttctaagactttttcacatccaaagtgatgctttgctttgggttttaactgtttggccacggcgggggtgggggcggggggttggtacagaaacttgaagctgtttgtgatatgtacaactcagatgtttctcattaaaaaacaaaattagccag

SEQ ID NO: 29640 - DNA, 3396 bp, Homo sapiens
  source 1..3396: mol_type = unassigned DNA
ggcaaggccttgcaaataacaatttaccctgagtggatctacagcgagatattgaacaacacagcgcaggggtggagtccgtgtttaacatctgtgacgtcctactgcacgactccgatgcctgtgcaaatgagaccgagtgtgactcgatccagcagaccaccaggagcctggacagacgctggaggaacatttgtgccatgtccatggagcggcgcatgaaaatcgaggagacgtggcgcctgtggcagaagtttttagacgactattctcgctttgaggactggctcaagtcagctgagaggacggcagcctgcccaaattcctcagaggtgttgtacacgagtgccaaagaggaactgaagaggtttgaggcctttcagcggcagattcatgagcggctcactcagctggagctcatcaacaagcagtaccggcggctggcccgggagaaccgcacagacacggccagcaggctgaagcagatggtccacgagggcaaccagcgctgggacaaccttcagaggcgggtcacagccgtcctgcggagactcaggcatttcaccaaccagagggaagaatttgagggcaccagggagagcattctggtgtggctcacagagatggacctgcagctgaccaacgtggagcacttctcagagagtgacgccgatgacaagatgcgccaactgaatggcttccaacaggaaattacattaaataccaacaagattgatcagctcattgtgtttggggagcagctgattcagaagagcgagcccctggatgctgtgctgattgaggatgagctggaggaactccaccgctactgccaggaggtgtttggaagggtctcccggttccaccggcggctcacctcctgcactccgggcttggaagatgaaaaggaggcctctgagaatgaaacagacatggaagaccccagagaaatccagactgattcttggcgtaaacggggagagagcgaggaaccgtcatctcctcagtccctgtgtcatctagtggccccagggcacgagcggtctggctgcgagacccctgtcagcgtggactccatccccctggagtgggaccacacaggcgacgtggggggctcctcctctcacgaagaggacgaggagggcccatactacagcgcactgtcaggtaaatccatttcggatggccactcgtggcatgttcccgacagcccttcctgtcccgagcatcactacaagcaaatggaaggtgacaggaatgttccacctgttccccctgcgtccagcaccccttataaaccaccctatggaaagctactattacctccaggcacggatggtggcaaagaaggcccgcgagtcctgaatggcaacccacagcaggaagacgggggactggccggtatcacagagcagcagtcaggtgccttcgacagatgggagatgattcaagcacaggagcttcacaataagctcaaaataaaacaaaatttgcaacagctgaactctgatatcagcgccatcactacttggctgaaaaaaactgaagcagagctggaaatgttaaagatggcaaagcctccctctgatatccaggaaatagaactgagagtgaagagactgcaggagatactgaaagcctttgacacttacaaggcattagtggtctctgtcaacgtgagcagcaaggaatttctgcaaaccgagagccccgaatccacagagctccaaagtagactccgccagctgagcctgctctgggaagcagcacagggcgcagtggacagctggagagggggcttacgacagtcgctcatgcagtgccaggacttccaccagttgagtcaaaatctgctgctgtggttagcgagtgccaagaaccggaggcagaaggctcatgtcaccgatccaaaggcagacccccgggctctcctagagtgtcggagggaactaatgcaactggaaaaggagctggtagaacgtcaacctcaagtggacatgttacaggagatttcaaacagccttctcattaagggacatggagaagactgtattgaagctgaagaaaaggtgcatgttattgagaagaaactcaaacagttacgggagcaagtgtcccaagatttaatggccttgcagggaacccagaacccagcctcacccctgcccagcttcgacgaggtagactcgggggaccagcctcctgcaacatccgtgccagctccccgagcaaagcagttcagagcagtgagaactacagaaggcgaggaggagacagagagcagggtccccggcagcacacggccacagcgctccttcctctcaagggtggtccgggcagccctacccctgcagctgctcctcctgctgctgctgctcctggcctgcctgctgccctcctccgaagaagactacagctgcactcaggccaacaactttgcccggtccttttaccccatgctgaggtacaccaatgggccaccccccacatagagggcatagctggccacagtgctacaccacctgcctgattgccaagggtgcccagcacgtggccccagaccaatctgagtgacttagtgttggcaaggtcccgggacctgtgcagacttcttctgggcttacccagcacgggctccctggagcccagggcagctttcagattgtgttcctccccaggagcagggaacctgtgtggcaggtgccccgggtattttggcagaactagttgattagtttagggatctctggaaatgtcagtttcctgaagagccaagcactttgtgaattctggtttgtttgtaaaacagcattattataatgtaggtatggtcaatgagcagtggtgtccatcacatatattatagaagcaagcgaggacattccaccctagaaatggttcagaaactcataggcacccttagctgatggaaacaatcaatcatatttaatacgcttagaatcagttttactccaatcagctggcaattttgagctgccggttatacaccaaaatgttctgttcagtacctagctctgctcttttatattgctttaaatttttaaagaaattgtattgcatggatgtggttatttgtgcatattttttaacaatgcccaatctgtatgaataatgtaaacttcgatttttttttaaaaaaattagattttagctggagcttttgactaatgtaaagtaaatgccaaactaccgacttgatagggatgtttttgtaagttaattttctaagactttttcacatccaaagtgatgctttgctttgggttttaactgtttggccacggcgggggtgggggcggggggttggtacagaaacttgaagctgtttgtgatatgtacaactcagatgtttctcattaaaaaacaaaattagcc

SEQ ID NO: 29641 - DNA, 8047 bp, Homo sapiens
  source 1..8047: mol_type = unassigned DNA
ggtttttttttttcccccacatacttaacgtttctatatttctatttgaattcgactggacagttccatttgaattatttctctctctctctctctctgacacattttatcttgccaggttctaaacctttaggaaaaatggagcaatttccaaaggaaaccgttgtggagagcagtgggccaaaggttttggaaacagcagaagagatccaggagaggcgtcaggaagtgttgactcggtatcaaagtttcaaggagcgggtcgctgagaggggtcagaagcttgaggattcctatcacttacaagttttcaagcgagatgcagatgatctggggaagtggatcatggagaaagtcaatatcttaaccgataagagctatgaagacccaactaatatacaggggaaatatcagaagcatcaatcccttgaagcagaggtgcaaacaaaatcaagactcatgtctgaactggaaaaaacaagggaagaacgatttaccatgggtcattctgcccacgaagaaacgaaggcccatatagaggagctacgccacctgtgggacctgctgttagagctgaccctggagaagggtgaccagttgctgcgggccctgaagttccagcagtatgtacaggagtgtgctgacatcttagagtggattggagacaaggaggctatagcgacatcagtggagctaggtgaagactgggagcgcaccgaagttctgcataagaaatttgaagacttccaagtggagctggtagctaaagaagggagagttgttgaagtgaaccaatatgccaatgagtgtgccgaggaaaaccatcctgacctacccttaattcagtctaagcaaaatgaggtgaatgctgcctgggagcgccttcgtggtttggctctccagagacagaaagctctgtccaatgctgcaaacttacaacgattcaaaagggatgtgactgaagccatccagtggatcaaggagaaggaacctgtactcacctctgaggactatggcaaagaccttgttgcctctgaaggactgtttcacagtcacaagggacttgagagaaatcttgctgtcatgagtgacaaggtgaaggagttatgtgctaaagcagagaagctgacactttcccatccttcagatgcacctcagatccaggagatgaaagaagatctggtctccagctgggagcatattcgtgccctggccaccagcagatatgaaaaactgcaggctacttattggtaccatcgattttcatctgactttgatgaactctcaggctggatgaacgagaagactgctgcgatcaatgctgatgagctgccaacagatgtggctggtggagaagttctgctggacaggcatcagcagcataagcatgagattgactcttacgatgaccgatttcaatctgctgatgagactggtcaagacctcgtgaatgccaatcatgaagcctctgatgaagttcgggaaaagatggaaatacttgacaacaactggactgccctgctggaactgtgggacgagcgtcatcgtcagtatgagcagtgcttggactttcatctcttctacagagacagtgagcaagtggacagttggatgagtagacaagaggccttcctggaaaacgaggatctgggaaactcactgggcagtgcagaagcccttcttcagaagcatgaagactttgaggaagcctttactgcccaggaagagaagatcataactgtagacaagactgcaaccaaattgattggtgatgaccattatgattcagagaacatcaaggctatccgtgacgggctgttagcccggcgggatgccctacgtgaaaaggctgccactagacgtagattgctgaaggagtcattgcttctgcaaaaactgtatgaggactcagatgacctaaagaactggatcaacaagaagaaaaagttggcagatgatgaagattacaaggacatacagaacttgaagagcagggttcaaaagcagcaagtctttgaaaaggagttggcagttaataagacccagctggaaaacatacagaaaactggccaagagatgattgagggtggtcactatgcctctgacaatgtgaccactcgtctgagtgaagttgccagcctctgggaggagttgctggaggctacaaaacagaaagggacccagttgcatgaggccaaccagcagctgcaatttgaaaataatgcagaagatttgcagcgctggctggaggatgttgagtggcaagtcacctctgaggattatgggaaaggcctggccgaggtacagaatcgactcaggaaacacggcctcctggagtcggctgtggctgctcgtcaggatcaggtggatatccttacagacctggctgcatattttgaagaaataggccatcctgattctaaggatataagggcaaggcaagagtccttggtatgccgatttgaagctctgaaagagccactggccacccgaaagaagaagctcttagaccttctccatctgcagctgatttgtagagacacagaggatgaggaggcctggatccaagagactgaaccctcagctacttccacctaccttggaaaggacctgattgcttccaaaaagcttctgaataggcatagagtcatcctggagaacattgccagccatgaaccacgcattcaagagataacagaaaggggaaacaaaatggtagaggaaggacactttgctgcagaagatgtggcctctagggtcaagagtttgaaccagaatatggagtctctccgtgctcgagctgctaggcgacaaaatgatcttgaagccaatgtccagttccagcagtacctggctgacctgcatgaagcagaaacatggatcagagagaaggaacctattgtagataatactaactatggtgctgatgaagaagcagctggggctcttctaaagaagcatgaggcctttctattagatctcaattcatttggagacagtatgaaagctctgcggaatcaggcaaacgcctgccagcaacaacaggctgcaccagtggagggagttgctggagaacaaagggtcatggctttatatgacttccaggcccgcagcccccgagaagtcaccatgaagaaaggtgatgtcttaacgctgctcagttccatcaataaggactggtggaaggtggaagctgctgatcatcagggcattgtcccagctgtctatgtcagaagactggcccacgatgagttcccgatgctcccacagcggcgacgagaagagccaggaaacatcacccagcgccaggagcagattgagaaccaataccgctccctcttggatcgggcagaagaacgcagacgtcgtctattgcaacgttataatgaatttttattggcctatgaggcaggagacatgctggaatggattcaagagaaaaaggcagaaaacactggagtggaactagatgatgtttgggagctgcagaaaaagtttgatgagttccaaaaggatttgaataccaatgagcctcggctaagggatatcaacaaggtagctgatgatctactatttgaaggacttctaacaccagaaggagctcaaatccggcaggaattgaattcccgctggggttctttgcagaggcttgcagatgaacagcggcagctgctgggcagtgcccatgctgttgaagtgtttcacagagaagcagatgacacgaaggagcagattgagaagaaatgccaggccctcagtgctgcagaccctggctcagatctgttcagtgttcaggctcttcagcgacggcatgagggctttgaaagggacctcgtacccctgggagataaggtgaccatactgggggagacagcagagcggctcagtgagtcccatccagatgccactgaggacctgcagagacagaaaatggagctgaatgaggcctgggaagacctgcaggggcgtacaaaggatcgtaaggagagcctaaatgaggcccagaaattctacctgttcctcagcaaggccagggatctgcagaactggatcagtagcattggtggcatggtatcatcacaggagctggccgaagacttaactggcatagagatcttgctggagagacatcaggagcaccgtgctgacatggaggcagaggctcccaccttccaggccttagaggacttcagtgcagaacttatcgacagtgggcaccatgctagccctgaaattgaaaaaaagcttcaagctgtcaagctagagagagatgatttggagaaggcttgggaaaaacgcaagaagatcctagaccagtgcctggagttgcagatgttccaggggaactgtgatcaagttgagagctggatggtggcacgtgagaattccctgaggtcagatgacaaaagttccttagacagtctggaggctttgatgaagaaacgggacgatttggacaaagcaatcactgcccaggaagggaagatcactgacctagaacattttgctgagagcctcattgctgatgaacactatgccaaagaagagattgctacgcggctccaacgtgtactagacaggtggaaggctctcaaagcacaactgattgatgagcggacaaagcttggagactatgccaacctaaaacaattctaccgagaccttgaggagctggaagaatggatcagtgagatgctgcccacagcctgtgatgaatcctacaaagacgccactaacattcagaggaaatacctgaaacaccagacctttgcacatgaagtcgatggccgatctgagcaggtgcatggcgtcatcaacctggggaactccctgattgagtgtagcgcttgtgatggcaatgaagaggccatgaaggagcaactggaacagctgaaggaacattgggatcatctgcttgagagaacaaatgacaaagggaagaagctcaatgaggccagtcgtcaacagaggttcaacacaagcatccgggactttgagttctggctctcagaggcagagacattgctggccatgaaagatcaggccagggacttggcttcagcaggaaacctactcaagaagcatcagctattggagagagagatgttggctcgagaggatgcactcaaggacctgaatacattggctgaagatttgctctccagcgggactttcaacgttgatcagattgtgaagaaaaaagataatgtcaacaagcgtttcctgaatgtccaagaattggcagctgcacaccacgaaaaattgaaagaggcctatgccttgttccagttcttccaggatctagatgatgaggaatcctggatagaggagaagttgatacgagtgagctcccaggactatgggagagatcttcagggggttcagaacttgctgaagaagcacaaacgcctagagggggagctggtggcccatgagcctgccatccagaatgtgctggatatggcagagaagctgaaagacaaggctgctgtggggcaagaggagatccagttgcggctggctcagtttgttgaacactgggagaagctcaaagagttggccaaggcccgaggacttaagttggaagaatccctagaatacttgcaattcatgcagaatgctgaggaagaggaagcttggatcaatgaaaagaatgctttggctgtccgaggagattgtggagatacattagctgctactcagagcttgctaatgaagcatgaagctttggaaaatgactttgctgtccatgagacccgagtacaaaatgtgtgtgcacaaggagaagacatcctaaataaggaggaaagtcagaacaaagagatttcttccaagatagaggctctgaatgaaaagaccccttctctggctaaggcaatagctgcttggaagttgcaattggaagacgattatgcctttcaggaattcaactggaaggctgatgtggtagaggcttggatagctgataaggaaacaagcctaaagaccaatggcaatggtgcagaccttggtgacttcctcactcttctggcaaaacaggacactctggatgccagtctgcagagtttccagcaagagagacttcccgagatcactgacctgaaggacaaactgatttctgctcaacacaaccagtctaaagccattgaagagcgttatgccgctctgctgaagcgctgggaacagttgctggaagcctcggcagtccacagacagaaattgctggagaaacagctgcctctacagaaggctgaggacctgttcgtggaatttgcacataaggcttcagctttgaacaactggtgtgaaaagatggaagaaaacttgtcagagcctgtgcactgtgtctccctgaatgaaattcggcagctgcagaaagaccatgaggacttcttggcctccctggctagggctcaagcagactttaaatgtttgctggagctagaccagcagattaaggccttaggtgtgccttccagcccttatacctggttaacagtggaggtgctggaaaggacctggaagcacctatctgacatcattgaggaacgggagcaggagctgcaaaaggaagaggcaagacaggtcaagaactttgagatgtgtcaggagtttgaacagaatgccagtaccttccttcaatggatcctggaaaccagggcttactttctggatggatcattgctcaaagaaacaggaactctggaatctcagctggaagcaaataaaagaaaacagaaggagatccaggcgatgaagcgtcaactaaccaagattgtggacctgggggacaacttggaagacgctctgatccttgatatcaaatacagcaccattggattggctcagcagtgggaccagctctaccagcttgggttgcggatgcaacacaacctggagcaacagatccaggccaaggacatcaaaggtgtgagtgaagagactctaaaggaatttagcacaatctataaacactttgatgagaatttgacagggcgcctgactcacaaagagttccggtcctgcctgagaggactcaattactacttgcccatggtggaggaggatgaacatgagcccaagtttgagaagttcctggatgctgtggatccagggaggaagggctatgtctcactggaggactatactgctttcctgattgacaaggagtcagaaaacatcaagtccagtgatgaaatagagaatgccttccaagccctggcagagggcaagtcatatattaccaaagaagacatgaagcaggcccttaccccagagcaagtgtcattctgtgccacacatatgcagcaatatatggacccacggggtcgaagccatctctctggctatgactacgttggcttcaccaattcctactttggcaactaataagcagctcctcgtggatcgtagaaaatcttagtgtcgtgggaaatttactggggggcaaagagtacaggcaaatgtggaagataaagatggcctcgtgtgtgtgtgtgtgtgtgtgtgtgtgtgtgtgtgcttgtgtttgtgtgcatattacatttattgtaggatcttaaaaaatctcaagggtgggagatagaaaggttaatagagttggaggagtggaagctattttgtatgcaactagtcactgctgaggggtgtcaaagtttctatttttatttgttctgttttgcacgtctttatcattttgctttattccgattatagaataaagtaattctttttaaaaatattttttggggcaaagttaagtaaaatgttgagcttctatatttctgggaactgtactcatataagagtgggcagctaattttactgtaaagaagggccatggtatagtagataaataaaatccaaggcaattttcaaacaatttttttaaactttggaatgtgtttaaatttaaatttgaaaataaagatatttgattttctggggaacatgaatattttagtttgtacaatgaaacaacacacagatcagcataacacctgttttcttcttgttttttttccatacttcaaaattattgtagatg

SEQ ID NO: 29642 - DNA, 8217 bp, Homo sapiens
  source 1..8217: mol_type = unassigned DNA
tgtcgattgtgtatggctgatgggattctaggaccaagcaagaggtttttttttttcccccacatacttaacgtttctatatttctatttgaattcgactggacagttccatttgaattatttctctctctctctctctctgacacattttatcttgccaggttctaaacctttaggaaaaatggagcaatttccaaaggaaaccgttgtggagagcagtgggccaaaggttttggaaacagcagaagagatccaggagaggcgtcaggaagtgttgactcggtatcaaagtttcaaggagcgggtcgctgagaggggtcagaagcttgaggattcctatcacttacaagttttcaagcgagatgcagatgatctggggaagtggatcatggagaaagtcaatatcttaaccgataagagctatgaagacccaactaatatacaggggaaatatcagaagcatcaatcccttgaagcagaggtgcaaacaaaatcaagactcatgtctgaactggaaaaaacaagggaagaacgatttaccatgggtcattctgcccacgaagaaacgaaggcccatatagaggagctacgccacctgtgggacctgctgttagagctgaccctggagaagggtgaccagttgctgcgggccctgaagttccagcagtatgtacaggagtgtgctgacatcttagagtggattggagacaaggaggctatagcgacatcagtggagctaggtgaagactgggagcgcaccgaagttctgcataagaaatttgaagacttccaagtggagctggtagctaaagaagggagagttgttgaagtgaaccaatatgccaatgagtgtgccgaggaaaaccatcctgacctacccttaattcagtctaagcaaaatgaggtgaatgctgcctgggagcgccttcgtggtttggctctccagagacagaaagctctgtccaatgctgcaaacttacaacgattcaaaagggatgtgactgaagccatccagtggatcaaggagaaggaacctgtactcacctctgaggactatggcaaagaccttgttgcctctgaaggactgtttcacagtcacaagggacttgagagaaatcttgctgtcatgagtgacaaggtgaaggagttatgtgctaaagcagagaagctgacactttcccatccttcagatgcacctcagatccaggagatgaaagaagatctggtctccagctgggagcatattcgtgccctggccaccagcagatatgaaaaactgcaggctacttattggtaccatcgattttcatctgactttgatgaactctcaggctggatgaacgagaagactgctgcgatcaatgctgatgagctgccaacagatgtggctggtggagaagttctgctggacaggcatcagcagcataagcatgagattgactcttacgatgaccgatttcaatctgctgatgagactggtcaagacctcgtgaatgccaatcatgaagcctctgatgaagttcgggaaaagatggaaatacttgacaacaactggactgccctgctggaactgtgggacgagcgtcatcgtcagtatgagcagtgcttggactttcatctcttctacagagacagtgagcaagtggacagttggatgagtagacaagaggccttcctggaaaacgaggatctgggaaactcactgggcagtgcagaagcccttcttcagaagcatgaagactttgaggaagcctttactgcccaggaagagaagatcataactgtagacaagactgcaaccaaattgattggtgatgaccattatgattcagagaacatcaaggctatccgtgacgggctgttagcccggcgggatgccctacgtgaaaaggctgccactagacgtagattgctgaaggagtcattgcttctgcaaaaactgtatgaggactcagatgacctaaagaactggatcaacaagaagaaaaagttggcagatgatgaagattacaaggacatacagaacttgaagagcagggttcaaaagcagcaagtctttgaaaaggagttggcagttaataagacccagctggaaaacatacagaaaactggccaagagatgattgagggtggtcactatgcctctgacaatgtgaccactcgtctgagtgaagttgccagcctctgggaggagttgctggaggctacaaaacagaaagggacccagttgcatgaggccaaccagcagctgcaatttgaaaataatgcagaagatttgcagcgctggctggaggatgttgagtggcaagtcacctctgaggattatgggaaaggcctggccgaggtacagaatcgactcaggaaacacggcctcctggagtcggctgtggctgctcgtcaggatcaggtggatatccttacagacctggctgcatattttgaagaaataggccatcctgattctaaggatataagggcaaggcaagagtccttggtatgccgatttgaagctctgaaagagccactggccacccgaaagaagaagctcttagaccttctccatctgcagctgatttgtagagacacagaggatgaggaggcctggatccaagagactgaaccctcagctacttccacctaccttggaaaggacctgattgcttccaaaaagcttctgaataggcatagagtcatcctggagaacattgccagccatgaaccacgcattcaagagataacagaaaggggaaacaaaatggtagaggaaggacactttgctgcagaagatgtggcctctagggtcaagagtttgaaccagaatatggagtctctccgtgctcgagctgctaggcgacaaaatgatcttgaagccaatgtccagttccagcagtacctggctgacctgcatgaagcagaaacatggatcagagagaaggaacctattgtagataatactaactatggtgctgatgaagaagcagctggggctcttctaaagaagcatgaggcctttctattagatctcaattcatttggagacagtatgaaagctctgcggaatcaggcaaacgcctgccagcaacaacaggctgcaccagtggagggagttgctggagaacaaagggtcatggctttatatgacttccaggcccgcagcccccgagaagtcaccatgaagaaaggtgatgtcttaacgctgctcagttccatcaataaggactggtggaaggtggaagctgctgatcatcagggcattgtcccagctgtctatgtcagaagactggcccacgatgagttcccgatgctcccacagcggcgacgagaagagccaggaaacatcacccagcgccaggagcagattgagaaccaataccgctccctcttggatcgggcagaagaacgcagacgtcgtctattgcaacgttataatgaatttttattggcctatgaggcaggagacatgctggaatggattcaagagaaaaaggcagaaaacactggagtggaactagatgatgtttgggagctgcagaaaaagtttgatgagttccaaaaggatttgaataccaatgagcctcggctaagggatatcaacaaggtagctgatgatctactatttgaaggacttctaacaccagaaggagctcaaatccggcaggaattgaattcccgctggggttctttgcagaggcttgcagatgaacagcggcagctgctgggcagtgcccatgctgttgaagtgtttcacagagaagcagatgacacgaaggagcagattgagaagaaatgccaggccctcagtgctgcagaccctggctcagatctgttcagtgttcaggctcttcagcgacggcatgagggctttgaaagggacctcgtacccctgggagataaggtgaccatactgggggagacagcagagcggctcagtgagtcccatccagatgccactgaggacctgcagagacagaaaatggagctgaatgaggcctgggaagacctgcaggggcgtacaaaggatcgtaaggagagcctaaatgaggcccagaaattctacctgttcctcagcaaggccagggatctgcagaactggatcagtagcattggtggcatggtatcatcacaggagctggccgaagacttaactggcatagagatcttgctggagagacatcaggagcaccgtgctgacatggaggcagaggctcccaccttccaggccttagaggacttcagtgcagaacttatcgacagtgggcaccatgctagccctgaaattgaaaaaaagcttcaagctgtcaagctagagagagatgatttggagaaggcttgggaaaaacgcaagaagatcctagaccagtgcctggagttgcagatgttccaggggaactgtgatcaagttgagagctggatggtggcacgtgagaattccctgaggtcagatgacaaaagttccttagacagtctggaggctttgatgaagaaacgggacgatttggacaaagcaatcactgcccaggaagggaagatcactgacctagaacattttgctgagagcctcattgctgatgaacactatgccaaagaagagattgctacgcggctccaacgtgtactagacaggtggaaggctctcaaagcacaactgattgatgagcggacaaagcttggagactatgccaacctaaaacaattctaccgagaccttgaggagctggaagaatggatcagtgagatgctgcccacagcctgtgatgaatcctacaaagacgccactaacattcagaggaaatacctgaaacaccagacctttgcacatgaagtcgatggccgatctgagcaggtgcatggcgtcatcaacctggggaactccctgattgagtgtagcgcttgtgatggcaatgaagaggccatgaaggagcaactggaacagctgaaggaacattgggatcatctgcttgagagaacaaatgacaaagggaagaagctcaatgaggccagtcgtcaacagaggttcaacacaagcatccgggactttgagttctggctctcagaggcagagacattgctggccatgaaagatcaggccagggacttggcttcagcaggaaacctactcaagaagcatcagctattggagagagagatgttggctcgagaggatgcactcaaggacctgaatacattggctgaagatttgctctccagcgggactttcaacgttgatcagattgtgaagaaaaaagataatgtcaacaagcgtttcctgaatgtccaagaattggcagctgcacaccacgaaaaattgaaagaggcctatgccttgttccagttcttccaggatctagatgatgaggaatcctggatagaggagaagttgatacgagtgagctcccaggactatgggagagatcttcagggggttcagaacttgctgaagaagcacaaacgcctagagggggagctggtggcccatgagcctgccatccagaatgtgctggatatggcagagaagctgaaagacaaggctgctgtggggcaagaggagatccagttgcggctggctcagtttgttgaacactgggagaagctcaaagagttggccaaggcccgaggacttaagttggaagaatccctagaatacttgcaattcatgcagaatgctgaggaagaggaagcttggatcaatgaaaagaatgctttggctgtccgaggagattgtggagatacattagctgctactcagagcttgctaatgaagcatgaagctttggaaaatgactttgctgtccatgagacccgagtacaaaatgtgtgtgcacaaggagaagacatcctaaataaggtgttgcaggaggaaagtcagaacaaagagatttcttccaagatagaggctctgaatgaaaagaccccttctctggctaaggcaatagctgcttggaagttgcaattggaagacgattatgcctttcaggaattcaactggaaggctgatgtggtagaggcttggatagctgataaggaaacaagcctaaagaccaatggcaatggtgcagaccttggtgacttcctcactcttctggcaaaacaggacactctggatgccagtctgcagagtttccagcaagagagacttcccgagatcactgacctgaaggacaaactgatttctgctcaacacaaccagtctaaagccattgaagagcgttatgccgctctgctgaagcgctgggaacagttgctggaagcctcggcagtccacagacagaaattgctggagaaacagctgcctctacagaaggctgaggacctgttcgtggaatttgcacataaggcttcagctttgaacaactggtgtgaaaagatggaagaaaacttgtcagagcctgtgcactgtgtctccctgaatgaaattcggcagctgcagaaagaccatgaggacttcttggcctccctggctagggctcaagcagactttaaatgtttgctggagctagaccagcagattaaggccttaggtgtgccttccagcccttatacctggttaacagtggaggtgctggaaaggacctggaagcacctatctgacatcattgaggaacgggagcaggagctgcaaaaggaagaggcaagacaggtcaagaactttgagatgtgtcaggagtttgaacagaatgccagtaccttccttcaatggatcctggaaaccagggcttactttctggatggatcattgctcaaagaaacaggaactctggaatctcagctggaagcaaataaaagaaaacagaaggagatccaggcgatgaagcgtcaactaaccaagattgtggacctgggggacaacttggaagacgctctgatccttgatatcaaatacagcaccattggattggctcagcagtgggaccagctctaccagcttgggttgcggatgcaacacaacctggagcaacagatccaggccaaggacatcaaaggtgtgagtgaagagactctaaaggaatttagcacaatctataaacactttgatgagaatttgacagggcgcctgactcacaaagagttccggtcctgcctgagaggactcaattactacttgcccatggtggaggaggatgaacatgagcccaagtttgagaagttcctggatgctgtggatccagggaggaagggctatgtctcactggaggactatactgctttcctgattgacaaggagtcagaaaacatcaagtccagtgatgaaatagagaatgccttccaagccctggcagagggcaagtcatatattaccaaagaagacatgaagcaggcccttaccccagagcaagtgtcattctgtgccacacatatgcagcaatatatggacccacggggtcgaagccatctctctggctatgactacgttggcttcaccaattcctactttggcaactaataagcagctcctcgtggatcgtagaaaatcttagtgtcgtgggaaatttactggggggcaaagagtacaggcaaatgtggaagataaagatggcctcgtgtgtgtgtgtgtgtgtgtgtgtgtgtgtgtgtgcttgtgtttgtgtgcatattacatttattgtaggatcttaaaaaatctcaagggtgggagatagaaaggttaatagagttggaggagtggaagctattttgtatgcaactagtcactgctgaggggtgtcaaagtttctatttttatttgttctgttttgcacgtctttatcattttgctttattccgattatagaataaagtaattctttttaaaaatattttttggggcaaagttaagtaaaatgttgagcttctatatttctgggaactgtactcatataagagtgggcagctaattttactgtaaagaagggccatggtatagtagataaataaaatccaaggcaattttcaaacaatttttttaaactttggaatgtgtttaaatttaaatttgaaaataaagatatttgattttctggggaacatgaatattttagtttgtacaatgaaacaacacacagatcagcataacacctgttttcttcttgttttttttccatacttcaaaattattgtagatgttattactctcagaaagacaaaattccagcatagcagggctttctcttgtcctccaagctcccgtattttctcttaagttttaatgtaataaaaataatacttcaatatcctgttaaa

SEQ ID NO: 29643 - DNA, 7872 bp, Homo sapiens
  source 1..7872: mol_type = unassigned DNA
gccactacccgctgcggagtgaacggtgtggagcggaggccgcggaggctcctcggtccttcagcacccctcggcccgacgcacccacgcccctcaccccccgagagccgaaaatggacccaagtggggtcaaagtgctggaaacagcagaggacatccaggagaggcggcagcaggtcctagaccgataccaccgcttcaaggaactctcaacccttaggcgtcagaagctggaagattcctatcgattccagttctttcaaagagatgctgaagagctggagaaatggatacaggaaaaacttcagattgcatctgatgagaattataaagacccaaccaacttgcagggaaagcttcagaagcatcaagcatttgaagctgaagtgcaggccaactcaggagccattgttaagctggatgaaactggaaacctgatgatctcagaagggcattttgcatctgaaaccatacggacccgtttgatggagctgcaccgccagtgggaattacttttggagaagatgcgagaaaaaggaatcaaactgctgcaggcccagaagttggtgcagtacttacgagaatgtgaggacgtgatggactggatcaatgacaaggaagcaattgttacttctgaagagctgggccaggatctggagcatgtagaggttttacagaagaaatttgaagagtttcaaacagatatggctgctcatgaagaaagagttaatgaagtgaaccagtttgctgccaaactcatacaggagcagcaccctgaggaggaactgatcaagactaagcaggatgaagtcaatgcagcctggcagcggctgaagggcctggctctgcagaggcaggggaagctctttggggcagcagaagttcagcgctttaacagggatgtggatgagactatcagttggattaaggaaaaggagcagttaatggcctctgatgattttggccgagacctggcaagtgttcaggctctgcttcggaagcacgagggtctggagagagatcttgctgctctagaagacaaggtcaaagccctgtgtgctgaggctgaccgcctgcaacagtcccaccctctgagtgcaacacagattcaagtgaagcgagaggaactgattacaaactgggagcagatccgcaccttggcggcagagagacatgcacggctcaatgattcatacaggcttcaacgcttccttgctgacttccgtgacctcaccagctgggtgactgagatgaaagccctcatcaatgcagatgagcttgccagtgatgtggctggggctgaagccctgctagatagacaccaagagcacaagggtgaaattgatgcccatgaagacagcttcaaatctgcagatgaatctggacaggcactgcttgctgctggtcactatgcctcagatgaagtgagggagaagctgaccgtcctttccgaggagagagcggcgctgctggagctgtgggagctgcgcaggcagcagtacgagcagtgcatggacctgcagctcttctaccgggacactgagcaggtggacaactggatgagcaagcaggaggcgttcctgttgaatgaagacttgggagattccttggatagtgtggaagcgcttcttaagaagcacgaagactttgagaaatcccttagtgcccaggaggaaaagattacagcattagatgaatttgcaaccaagctaattcagaacaaccactatgcaatggaagatgtggccactcgccgagatgctctgttgagccgccgcaatgcccttcacgagagagccatgcgtcgccgggcccagctagccgattctttccatctgcagcagtttttccgtgattctgatgagctcaagagttgggtcaatgagaagatgaaaactgccacagatgaagcttataaagatccatccaacctacaaggaaaagtacagaagcatcaggcttttgaggctgagctctcagcaaaccagagccgaattgatgccttggagaaagctggccaaaagctgattgatgtcaaccactatgccaaggatgaagtggcagctcgtatgaatgaggtgatcagtttgtggaagaaactgctagaggccactgaactgaaaggaataaagcttcgtgaagccaaccagcaacagcaatttaatcgcaatgttgaggatattgaattgtggctatatgaagtagaaggtcacttggcttcggatgattacggcaaagatcttaccaatgtgcagaacctccagaagaaacatgcactgctagaggcagatgtggctgctcaccaggaccgaattgatggcatcaccattcaggcccgccagttccaagatgctggccattttgatgcagaaaacatcaagaagaaacaggaagccctcgtggctcgctatgaggcactcaaggagcccatggttgcccggaagcagaagctggccgattctctgcggttgcagcagctcttccgggatgttgaggatgaggagacgtggattcgagagaaagagcccattgccgcatctaccaacagaggtaaggatttaattggggtccagaatctgctaaagaaacatcaagccttacaagcagaaattgctggacatgaaccacgcatcaaagcagttacacagaaggggaatgccatggtggaggaaggccattttgctgcagaggatgtgaaggccaagcttcacgagctgaaccaaaagtgggaggcactgaaagccaaagcttcccagcgtcggcaggacctggaggactctctgcaggcccagcagtactttgctgatgctaacgaggctgaatcctggatgcgggagaaggaacccattgtgggcagcactgactatggcaaggacgaagactctgctgaggctctactgaagaaacacgaagctttgatgtcagatctcagtgcctacggcagcagcatccaggctttgcgagaacaagcacagtcctgccggcaacaagtggcccccacggatgatgagactgggaaggagctggtcttggctctctacgactatcaggagaagagtccccgagaggtcaccatgaagaagggagatatccttaccttactcaacagcaccaacaaggattggtggaaagtggaagtgaacgatcgtcagggttttgtgccggctgcgtacgtgaagaaattggaccccgcccagtcagcctcccgggagaatctcctggaggagcaaggcagcatagcactgcggcaggagcagattgacaatcagacacgcataactaaggaggccggcagtgtatctctgcgtatgaagcaggtggaagaactatatcattctctgctggaactgggtgagaagcgtaaaggcatgttggagaagagttgcaagaagtttatgttgttccgtgaagcgaatgaactacagcaatggatcaatgagaaggaagccgctctgacaagtgaggaggtcggagcagacttggagcaggttgaggtgctccagaagaagtttgatgacttccagaaggacctgaaggccaatgagtcacggttgaaggacattaacaaggtagctgaagacctggagtctgaaggtctcatggcagaggaggtgcaggctgtgcaacaacaggaagtgtatggcatgatgcccagggatgaaactgattccaagacagcctccccgtggaagtctgctcgtctgatggttcacaccgtggccacctttaattccatcaaggagctgaatgagcgctggcggtccctacagcagctggccgaggaacggagccagctcttgggcagcgcccatgaagtacagaggttccacagagatgctgatgaaaccaaagaatggattgaagagaagaatcaagctctaaacacagacaattatggacatgatctcgccagtgtccaggccctgcaacgcaagcatgagggcttcgagagggaccttgcggctctcggtgacaaggtaaactcccttggtgaaacagcagagcgcctgatccagtcccatcccgagtcagcagaagacctgcaggaaaagtgcacagagttaaaccaggcctggagcagcctggggaaacgtgcagatcagcgcaaggcaaagttgggtgactcccacgacctgcagcgcttccttagcgatttccgggacctcatgtcttggatcaatggaatacgggggttggtgtcctcagatgagctagccaaggatgtcaccggagctgaggcattgctggagcgacaccaggaacaccggacagaaatcgatgccagggctggcactttccaggcatttgagcagtttggacagcagctgttggctcacggacactatgccagccctgagatcaagcagaaacttgatattcttgaccaggagcgtgcagacctggagaaggcctgggttcagcgcaggatgatgctggatcagtgccttgaactgcagctgttccatcgggactgtgagcaagctgagaactggatggctgcccgggaggccttcttgaataccgaagacaaaggagactcactggacagcgtagaggctctgatcaaaaaacatgaagactttgacaaagcgattaacgtccaggaagagaagattgctgctctgcaggcctttgccgaccagctcatcgctgccggccattatgccaagggagacatttctagccggcgcaatgaggtcttggacaggtggcgacgtctgaaagcccagatgattgagaaaaggtcaaagctaggagaatctcaaaccctccaacagttcagccgggatgtggatgagattgaggcttggatcagtgaaaaattgcaaacagcgagtgatgagtcgtacaaggatcccaccaacatccaggtaagccttatgttaagcaagcaccagaagcaccaggcttttgaagcagagctgcatgccaacgctgaccggatccgtggggttatcgacatgggcaactccctcattgaacgtggagcctgtgccggcagtgaggatgctgtcaaggcccgcctggctgccttagctgaccagtggcagttcttggtgcaaaagtcagcggaaaagagccagaaactgaaagaagccaacaagcagcagaacttcaacacagggatcaaggactttgacttctggctgtctgaggtggaggccctgctggcatccgaagattatggcaaagacctagcttctgtgaacaacctgctgaaaaagcatcaactgctggaagcagatatatctgcccatgaggatcgcctgaaggacctgaacagccaggcagacagcctgatgaccagcagtgccttcgacacctcccaagtaaaggacaagagggacaccatcaacgggcgcttccagaagatcaagagcatggcggcctcccggcgagccaagctgaatgaatcccatcgcctgcaccagttcttccgggacatggatgacgaggagtcctggatcaaggagaagaagctgctggtgggctcagaggactacggccgggacctaaccggcgtgcagaacctgaggaagaagcacaagcggctggaagcagaactggctgcgcatgagccggctattcagggtgtcctggacactggcaagaagctgtccgatgacaacaccatcgggaaagaggagatccagcagcggctggcgcagtttgtggagcactggaaagagctgaagcagctggcagctgcccggggtcagcggctggaagagtccttggaatatcagcagtttgtagccaatgtggaagaggaagaagcctggatcaatgagaaaatgaccctggtggccagcgaagattatggcgacactcttgccgccatccagggcttactgaagaaacatgaagcttttgagacagacttcaccgtccacaaggatcgcgtgaatgatgtctgcaccaatggacaagacctcattaagaagaacaatcaccatgaggagaacatctcttcaaagatgaagggcctgaacgggaaagtgtcagacctggagaaagctgcagcccagagaaaggcgaagctggatgagaactcggccttccttcagttcaactggaaggcggacgtggtggagtcctggatcggtgaaaaggagaacagcttgaagacagatgattatggccgagacctgtcttctgtgcagacgctcctcaccaaacaggaaacttttgacgctgggctgcaggccttccagcaggaaggcattgccaacatcactgccctcaaagatcagcttctcgccgccaaacacgttcagtccaaggccatcgaggcccggcacgcctccctcatgaagaggtggagccagcttctggccaactcagccgcccgcaagaagaagcttctggaggctcagagtcacttccgcaaggtggaggacctcttcctgaccttcgccaaaaaggcttctgccttcaacagctggtttgaaaatgcagaggaggacttaacagaccccgtgcgctgcaactccttggaagaaatcaaagctttgcgcgaggcccacgacgccttccgctcctccctcagctctgcccaggctgacttcaaccagctggccgagctggaccgccagatcaagagcttccgcgtagcctccaacccctacacctggtttaccatggaggccctggaggagacctggaggaacctacagaaaatcatcaaggagagggagctggagctgcagaaggaacagcggcggcaggaggagaacgacaagctgcgccaggagtttgcccagcacgccaacgccttccaccagtggatccaagagaccaggtgccagcccgctggggcgtcctgtatggtggaagagtcggggaccctcgaatcccagcttgaagctaccaaacgcaagcaccaggaaatccgagccatgagaagtcagctcaaaaagatcgaggacctgggggccgccatggaggaggccctcatcctggacaacaagtacacggagcacagcaccgtgggcctcgcccagcagtgggaccagctggaccagctgggcatgcgcatgcagcacaacctggagcagcagatccaggccaggaacacaacaggtgtgactgaggaggccctcaaagaattcagcatgatgtttaaacactttgacaaggacaagtctggcaggctgaaccatcaggagttcaaatcttgcctgcgctccctgggctatgacctgcccatggtggaggaaggggaacctgaccctgagttcgaggcaatcctggacacggtggatccgaacagagatggccatgtctccttgcaagaatacatggctttcatgatcagccgcgaaactgagaacgtcaagtccagcgaggagattgagagcgccttccgggccctcagctcagagggaaagccttacgtgaccaaggaggagctctaccagaacctgacccgggaacaagccgactactgcgtctcccacatgaagccctacgtggacggcaagggccgcgagctccccaccgcgttcgactacgtggagttcacccgctcgcttttcgtgaactgagccactccctgggtcacccacccctcgctgcttgccctgcgtcgccttgctgcatgtccgctcctctgtgtgctctcactttccactgtaaccttaagcctgcttagcttggaataagacttaggagaaaatggtgcttcactaacccgcttccggtccagtcacaatcatcatgtcactgtggggacccagatctgtgtcttgaagcagctgccctcattccgacttcagaaaatcgaagcagctggctcctccccttgttctctctcccaccctcccccaaatctgttttcatgtaaaagacaaataaatgatgacttccccc

SEQ ID NO: 29644 - DNA, 7793 bp, Homo sapiens
  source 1..7793: mol_type = unassigned DNA
actacccgctgcggagtgaacggtgtggagcggaggccgcggaggctcctcggtccttcagcacccctcggcccgacgcacccacgcccctcaccccccgagagccgaaaatggacccaagtggggtcaaagtgctggaaacagcagaggacatccaggagaggcggcagcaggtcctagaccgataccaccgcttcaaggaactctcaacccttaggcgtcagaagctggaagattcctatcgattccagttctttcaaagagatgctgaagagctggagaaatggatacaggaaaaacttcagattgcatctgatgagaattataaagacccaaccaacttgcagggaaagcttcagaagcatcaagcatttgaagctgaagtgcaggccaactcaggagccattgttaagctggatgaaactggaaacctgatgatctcagaagggcattttgcatctgaaaccatacggacccgtttgatggagctgcaccgccagtgggaattacttttggagaagatgcgagaaaaaggaatcaaactgctgcaggcccagaagttggtgcagtacttacgagaatgtgaggacgtgatggactggatcaatgacaaggaagcaattgttacttctgaagagctgggccaggatctggagcatgtagaggttttacagaagaaatttgaagagtttcaaacagatatggctgctcatgaagaaagagttaatgaagtgaaccagtttgctgccaaactcatacaggagcagcaccctgaggaggaactgatcaagactaagcaggatgaagtcaatgcagcctggcagcggctgaagggcctggctctgcagaggcaggggaagctctttggggcagcagaagttcagcgctttaacagggatgtggatgagactatcagttggattaaggaaaaggagcagttaatggcctctgatgattttggccgagacctggcaagtgttcaggctctgcttcggaagcacgagggtctggagagagatcttgctgctctagaagacaaggtcaaagccctgtgtgctgaggctgaccgcctgcaacagtcccaccctctgagtgcaacacagattcaagtgaagcgagaggaactgattacaaactgggagcagatccgcaccttggcggcagagagacatgcacggctcaatgattcatacaggcttcaacgcttccttgctgacttccgtgacctcaccagctgggtgactgagatgaaagccctcatcaatgcagatgagcttgccagtgatgtggctggggctgaagccctgctagatagacaccaagagcacaagggtgaaattgatgcccatgaagacagcttcaaatctgcagatgaatctggacaggcactgcttgctgctggtcactatgcctcagatgaagtgagggagaagctgaccgtcctttccgaggagagagcggcgctgctggagctgtgggagctgcgcaggcagcagtacgagcagtgcatggacctgcagctcttctaccgggacactgagcaggtggacaactggatgagcaagcaggaggcgttcctgttgaatgaagacttgggagattccttggatagtgtggaagcgcttcttaagaagcacgaagactttgagaaatcccttagtgcccaggaggaaaagattacagcattagatgaatttgcaaccaagctaattcagaacaaccactatgcaatggaagatgtggccactcgccgagatgctctgttgagccgccgcaatgcccttcacgagagagccatgcgtcgccgggcccagctagccgattctttccatctgcagcagtttttccgtgattctgatgagctcaagagttgggtcaatgagaagatgaaaactgccacagatgaagcttataaagatccatccaacctacaaggaaaagtacagaagcatcaggcttttgaggctgagctctcagcaaaccagagccgaattgatgccttggagaaagctggccaaaagctgattgatgtcaaccactatgccaaggatgaagtggcagctcgtatgaatgaggtgatcagtttgtggaagaaactgctagaggccactgaactgaaaggaataaagcttcgtgaagccaaccagcaacagcaatttaatcgcaatgttgaggatattgaattgtggctatatgaagtagaaggtcacttggcttcggatgattacggcaaagatcttaccaatgtgcagaacctccagaagaaacatgcactgctagaggcagatgtggctgctcaccaggaccgaattgatggcatcaccattcaggcccgccagttccaagatgctggccattttgatgcagaaaacatcaagaagaaacaggaagccctcgtggctcgctatgaggcactcaaggagcccatggttgcccggaagcagaagctggccgattctctgcggttgcagcagctcttccgggatgttgaggatgaggagacgtggattcgagagaaagagcccattgccgcatctaccaacagaggtaaggatttaattggggtccagaatctgctaaagaaacatcaagccttacaagcagaaattgctggacatgaaccacgcatcaaagcagttacacagaaggggaatgccatggtggaggaaggccattttgctgcagaggatgtgaaggccaagcttcacgagctgaaccaaaagtgggaggcactgaaagccaaagcttcccagcgtcggcaggacctggaggactctctgcaggcccagcagtactttgctgatgctaacgaggctgaatcctggatgcgggagaaggaacccattgtgggcagcactgactatggcaaggacgaagactctgctgaggctctactgaagaaacacgaagctttgatgtcagatctcagtgcctacggcagcagcatccaggctttgcgagaacaagcacagtcctgccggcaacaagtggcccccacggatgatgagactgggaaggagctggtcttggctctctacgactatcaggagaagagtccccgagaggtcaccatgaagaagggagatatccttaccttactcaacagcaccaacaaggattggtggaaagtggaagtgaacgatcgtcagggttttgtgccggctgcgtacgtgaagaaattggaccccgcccagtcagcctcccgggagaatctcctggaggagcaaggcagcatagcactgcggcaggagcagattgacaatcaatatcattctctgctggaactgggtgagaagcgtaaaggcatgttggagaagagttgcaagaagtttatgttgttccgtgaagcgaatgaactacagcaatggatcaatgagaaggaagccgctctgacaagtgaggaggtcggagcagacttggagcaggttgaggtgctccagaagaagtttgatgacttccagaaggacctgaaggccaatgagtcacggttgaaggacattaacaaggtagctgaagacctggagtctgaaggtctcatggcagaggaggtgcaggctgtgcaacaacaggaagtgtatggcatgatgcccagggatgaaactgattccaagacagcctccccgtggaagtctgctcgtctgatggttcacaccgtggccacctttaattccatcaaggagctgaatgagcgctggcggtccctacagcagctggccgaggaacggagccagctcttgggcagcgcccatgaagtacagaggttccacagagatgctgatgaaaccaaagaatggattgaagagaagaatcaagctctaaacacagacaattatggacatgatctcgccagtgtccaggccctgcaacgcaagcatgagggcttcgagagggaccttgcggctctcggtgacaaggtaaactcccttggtgaaacagcagagcgcctgatccagtcccatcccgagtcagcagaagacctgcaggaaaagtgcacagagttaaaccaggcctggagcagcctggggaaacgtgcagatcagcgcaaggcaaagttgggtgactcccacgacctgcagcgcttccttagcgatttccgggacctcatgtcttggatcaatggaatacgggggttggtgtcctcagatgagctagccaaggatgtcaccggagctgaggcattgctggagcgacaccaggaacaccggacagaaatcgatgccagggctggcactttccaggcatttgagcagtttggacagcagctgttggctcacggacactatgccagccctgagatcaagcagaaacttgatattcttgaccaggagcgtgcagacctggagaaggcctgggttcagcgcaggatgatgctggatcagtgccttgaactgcagctgttccatcgggactgtgagcaagctgagaactggatggctgcccgggaggccttcttgaataccgaagacaaaggagactcactggacagcgtagaggctctgatcaaaaaacatgaagactttgacaaagcgattaacgtccaggaagagaagattgctgctctgcaggcctttgccgaccagctcatcgctgccggccattatgccaagggagacatttctagccggcgcaatgaggtcttggacaggtggcgacgtctgaaagcccagatgattgagaaaaggtcaaagctaggagaatctcaaaccctccaacagttcagccgggatgtggatgagattgaggcttggatcagtgaaaaattgcaaacagcgagtgatgagtcgtacaaggatcccaccaacatccagagcaagcaccagaagcaccaggcttttgaagcagagctgcatgccaacgctgaccggatccgtggggttatcgacatgggcaactccctcattgaacgtggagcctgtgccggcagtgaggatgctgtcaaggcccgcctggctgccttagctgaccagtggcagttcttggtgcaaaagtcagcggaaaagagccagaaactgaaagaagccaacaagcagcagaacttcaacacagggatcaaggactttgacttctggctgtctgaggtggaggccctgctggcatccgaagattatggcaaagacctagcttctgtgaacaacctgctgaaaaagcatcaactgctggaagcagatatatctgcccatgaggatcgcctgaaggacctgaacagccaggcagacagcctgatgaccagcagtgccttcgacacctcccaagtaaaggacaagagggacaccatcaacgggcgcttccagaagatcaagagcatggcggcctcccggcgagccaagctgaatgaatcccatcgcctgcaccagttcttccgggacatggatgacgaggagtcctggatcaaggagaagaagctgctggtgggctcagaggactacggccgggacctaaccggcgtgcagaacctgaggaagaagcacaagcggctggaagcagaactggctgcgcatgagccggctattcagggtgtcctggacactggcaagaagctgtccgatgacaacaccatcgggaaagaggagatccagcagcggctggcgcagtttgtggagcactggaaagagctgaagcagctggcagctgcccggggtcagcggctggaagagtccttggaatatcagcagtttgtagccaatgtggaagaggaagaagcctggatcaatgagaaaatgaccctggtggccagcgaagattatggcgacactcttgccgccatccagggcttactgaagaaacatgaagcttttgagacagacttcaccgtccacaaggatcgcgtgaatgatgtctgcaccaatggacaagacctcattaagaagaacaatcaccatgaggagaacatctcttcaaagatgaagggcctgaacgggaaagtgtcagacctggagaaagctgcagcccagagaaaggcgaagctggatgagaactcggccttccttcagttcaactggaaggcggacgtggtggagtcctggatcggtgaaaaggagaacagcttgaagacagatgattatggccgagacctgtcttctgtgcagacgctcctcaccaaacaggaaacttttgacgctgggctgcaggccttccagcaggaaggcattgccaacatcactgccctcaaagatcagcttctcgccgccaaacacgttcagtccaaggccatcgaggcccggcacgcctccctcatgaagaggtggagccagcttctggccaactcagccgcccgcaagaagaagcttctggaggctcagagtcacttccgcaaggtggaggacctcttcctgaccttcgccaaaaaggcttctgccttcaacagctggtttgaaaatgcagaggaggacttaacagaccccgtgcgctgcaactccttggaagaaatcaaagctttgcgcgaggcccacgacgccttccgctcctccctcagctctgcccaggctgacttcaaccagctggccgagctggaccgccagatcaagagcttccgcgtagcctccaacccctacacctggtttaccatggaggccctggaggagacctggaggaacctacagaaaatcatcaaggagagggagctggagctgcagaaggaacagcggcggcaggaggagaacgacaagctgcgccaggagtttgcccagcacgccaacgccttccaccagtggatccaagagaccaggtgccagcccgctggggcgtcctgtatggtggaagagtcggggaccctcgaatcccagcttgaagctaccaaacgcaagcaccaggaaatccgagccatgagaagtcagctcaaaaagatcgaggacctgggggccgccatggaggaggccctcatcctggacaacaagtacacggagcacagcaccgtgggcctcgcccagcagtgggaccagctggaccagctgggcatgcgcatgcagcacaacctggagcagcagatccaggccaggaacacaacaggtgtgactgaggaggccctcaaagaattcagcatgatgtttaaacactttgacaaggacaagtctggcaggctgaaccatcaggagttcaaatcttgcctgcgctccctgggctatgacctgcccatggtggaggaaggggaacctgaccctgagttcgaggcaatcctggacacggtggatccgaacagagatggccatgtctccttgcaagaatacatggctttcatgatcagccgcgaaactgagaacgtcaagtccagcgaggagattgagagcgccttccgggccctcagctcagagggaaagccttacgtgaccaaggaggagctctaccagaacctgacccgggaacaagccgactactgcgtctcccacatgaagccctacgtggacggcaagggccgcgagctccccaccgcgttcgactacgtggagttcacccgctcgcttttcgtgaactgagccactccctgggtcacccacccctcgctgcttgccctgcgtcgccttgctgcatgtccgctcctctgtgtgctctcactttccactgtaaccttaagcctgcttagcttggaataagacttaggagaaaatggtgcttcactaacccgcttccggtccagtcacaatcatcatgtcactgtggggacccagatctgtgtcttgaagcagctgccctcattccgacttcagaaaatcgaagcagctggctcctccccttgttctctctcccaccctcccccaaatctgttttcatgtaaaagacaaataaatgatgacttcccc

SEQ ID NO: 29645 - DNA, 6863 bp, Homo sapiens
  source 1..6863: mol_type = unassigned DNA
actacccgctgcggagtgaacggtgtggagcggaggccgcggaggctcctcggtccttcagcacccctcggcccgacgcacccacgcccctcaccccccgagagccgaaaatggacccaagtggggtcaaagtgctggaaacagcagaggacatccaggagaggcggcagcaggtcctagaccgataccaccgcttcaaggaactctcaacccttaggcgtcagaagctggaagattcctatcgattccagttctttcaaagagatgctgaagagctggagaaatggatacaggaaaaacttcagattgcatctgatgagaattataaagacccaaccaacttgcagggaaagcttcagaagcatcaagcatttgaagctgaagtgcaggccaactcaggagccattgttaagctggatgaaactggaaacctgatgatctcagaagggcattttgcatctgaaaccatacggacccgtttgatggagctgcaccgccagtgggaattacttttggagaagatgcgagaaaaaggaatcaaactgctgcaggcccagaagttggtgcagtacttacgagaatgtgaggacgtgatggactggatcaatgacaaggaagcaattgttacttctgaagagctgggccaggatctggagcatgtagaggttttacagaagaaatttgaagagtttcaaacagatatggctgctcatgaagaaagagttaatgaagtgaaccagtttgctgccaaactcatacaggagcagcaccctgaggaggaactgatcaagactaagcaggatgaagtcaatgcagcctggcagcggctgaagggcctggctctgcagaggcaggggaagctctttggggcagcagaagttcagcgctttaacagggatgtggatgagactatcagttggattaaggaaaaggagcagttaatggcctctgatgattttggccgagacctggcaagtgttcaggctctgcttcggaagcacgagggtctggagagagatcttgctgctctagaagacaaggtcaaagccctgtgtgctgaggctgaccgcctgcaacagtcccaccctctgagtgcaacacagattcaagtgaagcgagaggaactgattacaaactgggagcagatccgcaccttggcggcagagagacatgcacggctcaatgattcatacaggcttcaacgcttccttgctgacttccgtgacctcaccagctgggtgactgagatgaaagccctcatcaatgcagatgagcttgccagtgatgtggctggggctgaagccctgctagatagacaccaagagcacaagggtgaaattgatgcccatgaagacagcttcaaatctgcagatgaatctggacaggcactgcttgctgctggtcactatgcctcagatgaagtgagggagaagctgaccgtcctttccgaggagagagcggcgctgctggagctgtgggagctgcgcaggcagcagtacgagcagtgcatggacctgcagctcttctaccgggacactgagcaggtggacaactggatgagcaagcaggaggcgttcctgttgaatgaagacttgggagattccttggatagtgtggaagcgcttcttaagaagcacgaagactttgagaaatcccttagtgcccaggaggaaaagattacagcattagatgaatttgcaaccaagctaattcagaacaaccactatgcaatggaagatgtggccactcgccgagatgctctgttgagccgccgcaatgcccttcacgagagagccatgcgtcgccgggcccagctagccgattctttccatctgcagcagtttttccgtgattctgatgagctcaagagttgggtcaatgagaagatgaaaactgccacagatgaagcttataaagatccatccaacctacaaggaaaagtacagaagcatcaggcttttgaggctgagctctcagcaaaccagagccgaattgatgccttggagaaagctggccaaaagctgattgatgtcaaccactatgccaaggatgaagtggcagctcgtatgaatgaggtgatcagtttgtggaagaaactgctagaggccactgaactgaaaggaataaagcttcgtgaagccaaccagcaacagcaatttaatcgcaatgttgaggatattgaattgtggctatatgaagtagaaggtcacttggcttcggatgattacggcaaagatcttaccaatgtgcagaacctccagaagaaacatgcactgctagaggcagatgtggctgctcaccaggaccgaattgatggcatcaccattcaggcccgccagttccaagatgctggccattttgatgcagaaaacatcaagaagaaacaggaagccctcgtggctcgctatgaggcactcaaggagcccatggttgcccggaagcagaagctggccgattctctgcggttgcagcagctcttccgggatgttgaggatgaggagacgtggattcgagagaaagagcccattgccgcatctaccaacagaggtaaggatttaattggggtccagaatctgctaaagaaacatcaagccttacaagcagaaattgctggacatgaaccacgcatcaaagcagttacacagaaggggaatgccatggtggaggaaggccattttgctgcagaggatgtgaaggccaagcttcacgagctgaaccaaaagtgggaggcactgaaagccaaagcttcccagcgtcggcaggacctggaggactctctgcaggcccagcagtactttgctgatgctaacgaggctgaatcctggatgcgggagaaggaacccattgtgggcagcactgactatggcaaggacgaagactctgctgaggctctactgaagaaacacgaagctttgatgtcagatctcagtgcctacggcagcagcatccaggctttgcgagaacaagcacagtcctgccggcaacaagtggcccccacggatgatgagactgggaaggagctggtcttggctctctacgactatcaggagaagagtccccgagaggtcaccatgaagaagggagatatccttaccttactcaacagcaccaacaaggattggtggaaagtggaagtgaacgatcgtcagggttttgtgccggctgcgtacgtgaagaaattggaccccgcccagtcagcctcccgggagaatctcctggaggagcaaggcagcatagcactgcggcaggagcagattgacaatcagacacgcataactaaggaggccggcagtgtatctctgcgtatgaagcaggtggaagaactatatcattctctgctggaactgggtgagaagcgtaaaggcatgttggagaagagttgcaagaagtttatgttgttccgtgaagcgaatgaactacagcaatggatcaatgagaaggaagccgctctgacaagtgaggaggtcggagcagacttggagcaggttgaggtgctccagaagaagtttgatgacttccagaaggacctgaaggccaatgagtcacggttgaaggacattaacaaggtagctgaagacctggagtctgaaggtctcatggcagaggaggtgcaggctgtgcaacaacaggaagtgtatggcatgatgcccagggatgaaactgattccaagacagcctccccgtggaagtctgctcgtctgatggttcacaccgtggccacctttaattccatcaaggagctgaatgagcgctggcggtccctacagcagctggccgaggaacggagccagctcttgggcagcgcccatgaagtacagaggttccacagagatgctgatgaaaccaaagaatggattgaagagaagaatcaagctctaaacacagacaattatggacatgatctcgccagtgtccaggccctgcaacgcaagcatgagggcttcgagagggaccttgcggctctcggtgacaaggtaaactcccttggtgaaacagcagagcgcctgatccagtcccatcccgagtcagcagaagacctgcaggaaaagtgcacagagttaaaccaggcctggagcagcctggggaaacgtgcagatcagcgcaaggcaaagttgggtgactcccacgacctgcagcgcttccttagcgatttccgggacctcatgtcttggatcaatggaatacgggggttggtgtcctcagatgagctagccaaggatgtcaccggagctgaggcattgctggagcgacaccaggaacaccggacagaaatcgatgccagggctggcactttccaggcatttgagcagtttggacagcagctgttggctcacggacactatgccagccctgagatcaagcagaaacttgatattcttgaccaggagcgtgcagacctggagaaggcctgggttcagcgcaggatgatgctggatcagtgccttgaactgcagctgttccatcgggactgtgagcaagctgagaactggatggctgcccgggaggccttcttgaataccgaagacaaaggagactcactggacagcgtagaggctctgatcaaaaaacatgaagactttgacaaagcgattaacgtccaggaagagaagattgctgctctgcaggcctttgccgaccagctcatcgctgccggccattatgccaagggagacatttctagccggcgcaatgaggtcttggacaggtggcgacgtctgaaagcccagatgattgagaaaaggtcaaagctaggagaatctcaaaccctccaacagttcagccgggatgtggatgagattgaggcttggatcagtgaaaaattgcaaacagcgagtgatgagtcgtacaaggatcccaccaacatccagctttccaagctgctgagcaagcaccagaagcaccaggcttttgaagcagagctgcatgccaacgctgaccggatccgtggggttatcgacatgggcaactccctcattgaacgtggagcctgtgccggcagtgaggatgctgtcaaggcccgcctggctgccttagctgaccagtggcagttcttggtgcaaaagtcagcggaaaagagccagaaactgaaagaagccaacaagcagcagaacttcaacacagggatcaaggactttgacttctggctgtctgaggtggaggccctgctggcatccgaagattatggcaaagacctagcttctgtgaacaacctgctgaaaaagcatcaactgctggaagcagatatatctgcccatgaggatcgcctgaaggacctgaacagccaggcagacagcctgatgaccagcagtgccttcgacacctcccaagtaaaggacaagagggacaccatcaacgggcgcttccagaagatcaagagcatggcggcctcccggcgagccaagctgaatgaatcccatcgcctgcaccagttcttccgggacatggatgacgaggagtcctggatcaaggagaagaagctgctggtgggctcagaggactacggccgggacctaaccggcgtgcagaacctgaggaagaagcacaagcggctggaagcagaactggctgcgcatgagccggctattcagggtgtcctggacactggcaagaagctgtccgatgacaacaccatcgggaaagaggagatccagcagcggctggcgcagtttgtggagcactggaaagagctgaagcagctggcagctgcccggggtcagcggctggaagagtccttggaatatcagcagtttgtagccaatgtggaagaggaagaagcctggatcaatgagaaaatgaccctggtggccagcgaagattatggcgacactcttgccgccatccagggcttactgaagaaacatgaagcttttgagacagacttcaccgtccacaaggatcgcgtgaatgatgtctgcaccaatggacaagacctcattaagaagaacaatcaccatgaggagaacatctcttcaaagatgaagggcctgaacgggaaagtgtcagacctggagaaagctgcagcccagagaaaggcgaagctggatgagaactcggccttccttcagttcaactggaaggcggacgtggtggagtcctggatcggtgaaaaggagaacagcttgaagacagatgattatggccgagacctgtcttctgtgcagacgctcctcaccaaacaggaaacttttgacgctgggctgcaggccttccagcaggaaggcattgccaacatcactgccctcaaagatcagcttctcgccgccaaacacgttcagtccaaggccatcgaggcccggcacgcctccctcatgaagaggtggagccagcttctggccaactcagccgcccgcaagaagaagcttctggaggctcagagtcacttccgcaaggtggaggacctcttcctgaccttcgccaaaaaggcttctgccttcaacagctggtttgaaaatgcagaggaggacttaacagaccccgtgcgctgcaactccttggaagaaatcaaagctttgcgcgaggcccacgacgccttccgctcctccctcagctctgcccaggctgacttcaaccagctggccgagctggaccgccagatcaagagcttccgcgtagcctccaacccctacacctggtttaccatggaggccctggaggagacctggaggaacctacagaaaatcatcaaggagagggagctggagctgcagaaggaacagcggcggcaggaggagaacgacaagctgcgccaggagtttgcccagcacgccaacgccttccaccagtggatccaagagaccaggtgccagcgtaaagatggccagttgcagggtggaagagtcggggaccctcgaatcccagcttga

SEQ ID NO: 29646 - DNA, 7857 bp, Homo sapiens
  source 1..7857: mol_type = unassigned DNA
actacccgctgcggagtgaacggtgtggagcggaggccgcggaggctcctcggtccttcagcacccctcggcccgacgcacccacgcccctcaccccccgagagccgaaaatggacccaagtggggtcaaagtgctggaaacagcagaggacatccaggagaggcggcagcaggtcctagaccgataccaccgcttcaaggaactctcaacccttaggcgtcagaagctggaagattcctatcgattccagttctttcaaagagatgctgaagagctggagaaatggatacaggaaaaacttcagattgcatctgatgagaattataaagacccaaccaacttgcagggaaagcttcagaagcatcaagcatttgaagctgaagtgcaggccaactcaggagccattgttaagctggatgaaactggaaacctgatgatctcagaagggcattttgcatctgaaaccatacggacccgtttgatggagctgcaccgccagtgggaattacttttggagaagatgcgagaaaaaggaatcaaactgctgcaggcccagaagttggtgcagtacttacgagaatgtgaggacgtgatggactggatcaatgacaaggaagcaattgttacttctgaagagctgggccaggatctggagcatgtagaggttttacagaagaaatttgaagagtttcaaacagatatggctgctcatgaagaaagagttaatgaagtgaaccagtttgctgccaaactcatacaggagcagcaccctgaggaggaactgatcaagactaagcaggatgaagtcaatgcagcctggcagcggctgaagggcctggctctgcagaggcaggggaagctctttggggcagcagaagttcagcgctttaacagggatgtggatgagactatcagttggattaaggaaaaggagcagttaatggcctctgatgattttggccgagacctggcaagtgttcaggctctgcttcggaagcacgagggtctggagagagatcttgctgctctagaagacaaggtcaaagccctgtgtgctgaggctgaccgcctgcaacagtcccaccctctgagtgcaacacagattcaagtgaagcgagaggaactgattacaaactgggagcagatccgcaccttggcggcagagagacatgcacggctcaatgattcatacaggcttcaacgcttccttgctgacttccgtgacctcaccagctgggtgactgagatgaaagccctcatcaatgcagatgagcttgccagtgatgtggctggggctgaagccctgctagatagacaccaagagcacaagggtgaaattgatgcccatgaagacagcttcaaatctgcagatgaatctggacaggcactgcttgctgctggtcactatgcctcagatgaagtgagggagaagctgaccgtcctttccgaggagagagcggcgctgctggagctgtgggagctgcgcaggcagcagtacgagcagtgcatggacctgcagctcttctaccgggacactgagcaggtggacaactggatgagcaagcaggaggcgttcctgttgaatgaagacttgggagattccttggatagtgtggaagcgcttcttaagaagcacgaagactttgagaaatcccttagtgcccaggaggaaaagattacagcattagatgaatttgcaaccaagctaattcagaacaaccactatgcaatggaagatgtggccactcgccgagatgctctgttgagccgccgcaatgcccttcacgagagagccatgcgtcgccgggcccagctagccgattctttccatctgcagcagtttttccgtgattctgatgagctcaagagttgggtcaatgagaagatgaaaactgccacagatgaagcttataaagatccatccaacctacaaggaaaagtacagaagcatcaggcttttgaggctgagctctcagcaaaccagagccgaattgatgccttggagaaagctggccaaaagctgattgatgtcaaccactatgccaaggatgaagtggcagctcgtatgaatgaggtgatcagtttgtggaagaaactgctagaggccactgaactgaaaggaataaagcttcgtgaagccaaccagcaacagcaatttaatcgcaatgttgaggatattgaattgtggctatatgaagtagaaggtcacttggcttcggatgattacggcaaagatcttaccaatgtgcagaacctccagaagaaacatgcactgctagaggcagatgtggctgctcaccaggaccgaattgatggcatcaccattcaggcccgccagttccaagatgctggccattttgatgcagaaaacatcaagaagaaacaggaagccctcgtggctcgctatgaggcactcaaggagcccatggttgcccggaagcagaagctggccgattctctgcggttgcagcagctcttccgggatgttgaggatgaggagacgtggattcgagagaaagagcccattgccgcatctaccaacagaggtaaggatttaattggggtccagaatctgctaaagaaacatcaagccttacaagcagaaattgctggacatgaaccacgcatcaaagcagttacacagaaggggaatgccatggtggaggaaggccattttgctgcagaggatgtgaaggccaagcttcacgagctgaaccaaaagtgggaggcactgaaagccaaagcttcccagcgtcggcaggacctggaggactctctgcaggcccagcagtactttgctgatgctaacgaggctgaatcctggatgcgggagaaggaacccattgtgggcagcactgactatggcaaggacgaagactctgctgaggctctactgaagaaacacgaagctttgatgtcagatctcagtgcctacggcagcagcatccaggctttgcgagaacaagcacagtcctgccggcaacaagtggcccccacggatgatgagactgggaaggagctggtcttggctctctacgactatcaggagaagagtccccgagaggtcaccatgaagaagggagatatccttaccttactcaacagcaccaacaaggattggtggaaagtggaagtgaacgatcgtcagggttttgtgccggctgcgtacgtgaagaaattggaccccgcccagtcagcctcccgggagaatctcctggaggagcaaggcagcatagcactgcggcaggagcagattgacaatcagacacgcataactaaggaggccggcagtgtatctctgcgtatgaagcaggtggaagaactatatcattctctgctggaactgggtgagaagcgtaaaggcatgttggagaagagttgcaagaagtttatgttgttccgtgaagcgaatgaactacagcaatggatcaatgagaaggaagccgctctgacaagtgaggaggtcggagcagacttggagcaggttgaggtgctccagaagaagtttgatgacttccagaaggacctgaaggccaatgagtcacggttgaaggacattaacaaggtagctgaagacctggagtctgaaggtctcatggcagaggaggtgcaggctgtgcaacaacaggaagtgtatggcatgatgcccagggatgaaactgattccaagacagcctccccgtggaagtctgctcgtctgatggttcacaccgtggccacctttaattccatcaaggagctgaatgagcgctggcggtccctacagcagctggccgaggaacggagccagctcttgggcagcgcccatgaagtacagaggttccacagagatgctgatgaaaccaaagaatggattgaagagaagaatcaagctctaaacacagacaattatggacatgatctcgccagtgtccaggccctgcaacgcaagcatgagggcttcgagagggaccttgcggctctcggtgacaaggtaaactcccttggtgaaacagcagagcgcctgatccagtcccatcccgagtcagcagaagacctgcaggaaaagtgcacagagttaaaccaggcctggagcagcctggggaaacgtgcagatcagcgcaaggcaaagttgggtgactcccacgacctgcagcgcttccttagcgatttccgggacctcatgtcttggatcaatggaatacgggggttggtgtcctcagatgagctagccaaggatgtcaccggagctgaggcattgctggagcgacaccaggaacaccggacagaaatcgatgccagggctggcactttccaggcatttgagcagtttggacagcagctgttggctcacggacactatgccagccctgagatcaagcagaaacttgatattcttgaccaggagcgtgcagacctggagaaggcctgggttcagcgcaggatgatgctggatcagtgccttgaactgcagctgttccatcgggactgtgagcaagctgagaactggatggctgcccgggaggccttcttgaataccgaagacaaaggagactcactggacagcgtagaggctctgatcaaaaaacatgaagactttgacaaagcgattaacgtccaggaagagaagattgctgctctgcaggcctttgccgaccagctcatcgctgccggccattatgccaagggagacatttctagccggcgcaatgaggtcttggacaggtggcgacgtctgaaagcccagatgattgagaaaaggtcaaagctaggagaatctcaaaccctccaacagttcagccgggatgtggatgagattgaggcttggatcagtgaaaaattgcaaacagcgagtgatgagtcgtacaaggatcccaccaacatccagagcaagcaccagaagcaccaggcttttgaagcagagctgcatgccaacgctgaccggatccgtggggttatcgacatgggcaactccctcattgaacgtggagcctgtgccggcagtgaggatgctgtcaaggcccgcctggctgccttagctgaccagtggcagttcttggtgcaaaagtcagcggaaaagagccagaaactgaaagaagccaacaagcagcagaacttcaacacagggatcaaggactttgacttctggctgtctgaggtggaggccctgctggcatccgaagattatggcaaagacctagcttctgtgaacaacctgctgaaaaagcatcaactgctggaagcagatatatctgcccatgaggatcgcctgaaggacctgaacagccaggcagacagcctgatgaccagcagtgccttcgacacctcccaagtaaaggacaagagggacaccatcaacgggcgcttccagaagatcaagagcatggcggcctcccggcgagccaagctgaatgaatcccatcgcctgcaccagttcttccgggacatggatgacgaggagtcctggatcaaggagaagaagctgctggtgggctcagaggactacggccgggacctaaccggcgtgcagaacctgaggaagaagcacaagcggctggaagcagaactggctgcgcatgagccggctattcagggtgtcctggacactggcaagaagctgtccgatgacaacaccatcgggaaagaggagatccagcagcggctggcgcagtttgtggagcactggaaagagctgaagcagctggcagctgcccggggtcagcggctggaagagtccttggaatatcagcagtttgtagccaatgtggaagaggaagaagcctggatcaatgagaaaatgaccctggtggccagcgaagattatggcgacactcttgccgccatccagggcttactgaagaaacatgaagcttttgagacagacttcaccgtccacaaggatcgcgtgaatgatgtctgcaccaatggacaagacctcattaagaagaacaatcaccatgaggagaacatctcttcaaagatgaagggcctgaacgggaaagtgtcagacctggagaaagctgcagcccagagaaaggcgaagctggatgagaactcggccttccttcagttcaactggaaggcggacgtggtggagtcctggatcggtgaaaaggagaacagcttgaagacagatgattatggccgagacctgtcttctgtgcagacgctcctcaccaaacaggaaacttttgacgctgggctgcaggccttccagcaggaaggcattgccaacatcactgccctcaaagatcagcttctcgccgccaaacacgttcagtccaaggccatcgaggcccggcacgcctccctcatgaagaggtggagccagcttctggccaactcagccgcccgcaagaagaagcttctggaggctcagagtcacttccgcaaggtggaggacctcttcctgaccttcgccaaaaaggcttctgccttcaacagctggtttgaaaatgcagaggaggacttaacagaccccgtgcgctgcaactccttggaagaaatcaaagctttgcgcgaggcccacgacgccttccgctcctccctcagctctgcccaggctgacttcaaccagctggccgagctggaccgccagatcaagagcttccgcgtagcctccaacccctacacctggtttaccatggaggccctggaggagacctggaggaacctacagaaaatcatcaaggagagggagctggagctgcagaaggaacagcggcggcaggaggagaacgacaagctgcgccaggagtttgcccagcacgccaacgccttccaccagtggatccaagagaccaggacatacctcctcgatgggtcctgtatggtggaagagtcggggaccctcgaatcccagcttgaagctaccaaacgcaagcaccaggaaatccgagccatgagaagtcagctcaaaaagatcgaggacctgggggccgccatggaggaggccctcatcctggacaacaagtacacggagcacagcaccgtgggcctcgcccagcagtgggaccagctggaccagctgggcatgcgcatgcagcacaacctggagcagcagatccaggccaggaacacaacaggtgtgactgaggaggccctcaaagaattcagcatgatgtttaaacactttgacaaggacaagtctggcaggctgaaccatcaggagttcaaatcttgcctgcgctccctgggctatgacctgcccatggtggaggaaggggaacctgaccctgagttcgaggcaatcctggacacggtggatccgaacagagatggccatgtctccttgcaagaatacatggctttcatgatcagccgcgaaactgagaacgtcaagtccagcgaggagattgagagcgccttccgggccctcagctcagagggaaagccttacgtgaccaaggaggagctctaccagaacctgacccgggaacaagccgactactgcgtctcccacatgaagccctacgtggacggcaagggccgcgagctccccaccgcgttcgactacgtggagttcacccgctcgcttttcgtgaactgagccactccctgggtcacccacccctcgctgcttgccctgcgtcgccttgctgcatgtccgctcctctgtgtgctctcactttccactgtaaccttaagcctgcttagcttggaataagacttaggagaaaatggtgcttcactaacccgcttccggtccagtcacaatcatcatgtcactgtggggacccagatctgtgtcttgaagcagctgccctcattccgacttcagaaaatcgaagcagctggctcctccccttgttctctctcccaccctcccccaaatctgttttcatgtaaaagacaaataaatgatgacttcccccaaa

SEQ ID NO: 29647 - DNA, 7872 bp, Homo sapiens
  source 1..7872: mol_type = unassigned DNA
actacccgctgcggagtgaacggtgtggagcggaggccgcggaggctcctcggtccttcagcacccctcggcccgacgcacccacgcccctcaccccccgagagccgaaaatggacccaagtggggtcaaagtgctggaaacagcagaggacatccaggagaggcggcagcaggtcctagaccgataccaccgcttcaaggaactctcaacccttaggcgtcagaagctggaagattcctatcgattccagttctttcaaagagatgctgaagagctggagaaatggatacaggaaaaacttcagattgcatctgatgagaattataaagacccaaccaacttgcagggaaagcttcagaagcatcaagcatttgaagctgaagtgcaggccaactcaggagccattgttaagctggatgaaactggaaacctgatgatctcagaagggcattttgcatctgaaaccatacggacccgtttgatggagctgcaccgccagtgggaattacttttggagaagatgcgagaaaaaggaatcaaactgctgcaggcccagaagttggtgcagtacttacgagaatgtgaggacgtgatggactggatcaatgacaaggaagcaattgttacttctgaagagctgggccaggatctggagcatgtagaggttttacagaagaaatttgaagagtttcaaacagatatggctgctcatgaagaaagagttaatgaagtgaaccagtttgctgccaaactcatacaggagcagcaccctgaggaggaactgatcaagactaagcaggatgaagtcaatgcagcctggcagcggctgaagggcctggctctgcagaggcaggggaagctctttggggcagcagaagttcagcgctttaacagggatgtggatgagactatcagttggattaaggaaaaggagcagttaatggcctctgatgattttggccgagacctggcaagtgttcaggctctgcttcggaagcacgagggtctggagagagatcttgctgctctagaagacaaggtcaaagccctgtgtgctgaggctgaccgcctgcaacagtcccaccctctgagtgcaacacagattcaagtgaagcgagaggaactgattacaaactgggagcagatccgcaccttggcggcagagagacatgcacggctcaatgattcatacaggcttcaacgcttccttgctgacttccgtgacctcaccagctgggtgactgagatgaaagccctcatcaatgcagatgagcttgccagtgatgtggctggggctgaagccctgctagatagacaccaagagcacaagggtgaaattgatgcccatgaagacagcttcaaatctgcagatgaatctggacaggcactgcttgctgctggtcactatgcctcagatgaagtgagggagaagctgaccgtcctttccgaggagagagcggcgctgctggagctgtgggagctgcgcaggcagcagtacgagcagtgcatggacctgcagctcttctaccgggacactgagcaggtggacaactggatgagcaagcaggaggcgttcctgttgaatgaagacttgggagattccttggatagtgtggaagcgcttcttaagaagcacgaagactttgagaaatcccttagtgcccaggaggaaaagattacagcattagatgaatttgcaaccaagctaattcagaacaaccactatgcaatggaagatgtggccactcgccgagatgctctgttgagccgccgcaatgcccttcacgagagagccatgcgtcgccgggcccagctagccgattctttccatctgcagcagtttttccgtgattctgatgagctcaagagttgggtcaatgagaagatgaaaactgccacagatgaagcttataaagatccatccaacctacaaggaaaagtacagaagcatcaggcttttgaggctgagctctcagcaaaccagagccgaattgatgccttggagaaagctggccaaaagctgattgatgtcaaccactatgccaaggatgaagtggcagctcgtatgaatgaggtgatcagtttgtggaagaaactgctagaggccactgaactgaaaggaataaagcttcgtgaagccaaccagcaacagcaatttaatcgcaatgttgaggatattgaattgtggctatatgaagtagaaggtcacttggcttcggatgattacggcaaagatcttaccaatgtgcagaacctccagaagaaacatgcactgctagaggcagatgtggctgctcaccaggaccgaattgatggcatcaccattcaggcccgccagttccaagatgctggccattttgatgcagaaaacatcaagaagaaacaggaagccctcgtggctcgctatgaggcactcaaggagcccatggttgcccggaagcagaagctggccgattctctgcggttgcagcagctcttccgggatgttgaggatgaggagacgtggattcgagagaaagagcccattgccgcatctaccaacagaggtaaggatttaattggggtccagaatctgctaaagaaacatcaagccttacaagcagaaattgctggacatgaaccacgcatcaaagcagttacacagaaggggaatgccatggtggaggaaggccattttgctgcagaggatgtgaaggccaagcttcacgagctgaaccaaaagtgggaggcactgaaagccaaagcttcccagcgtcggcaggacctggaggactctctgcaggcccagcagtactttgctgatgctaacgaggctgaatcctggatgcgggagaaggaacccattgtgggcagcactgactatggcaaggacgaagactctgctgaggctctactgaagaaacacgaagctttgatgtcagatctcagtgcctacggcagcagcatccaggctttgcgagaacaagcacagtcctgccggcaacaagtggcccccacggatgatgagactgggaaggagctggtcttggctctctacgactatcaggagaagagtccccgagaggtcaccatgaagaagggagatatccttaccttactcaacagcaccaacaaggattggtggaaagtggaagtgaacgatcgtcagggttttgtgccggctgcgtacgtgaagaaattggaccccgcccagtcagcctcccgggagaatctcctggaggagcaaggcagcatagcactgcggcaggagcagattgacaatcagacacgcataactaaggaggccggcagtgtatctctgcgtatgaagcaggtggaagaactatatcattctctgctggaactgggtgagaagcgtaaaggcatgttggagaagagttgcaagaagtttatgttgttccgtgaagcgaatgaactacagcaatggatcaatgagaaggaagccgctctgacaagtgaggaggtcggagcagacttggagcaggttgaggtgctccagaagaagtttgatgacttccagaaggacctgaaggccaatgagtcacggttgaaggacattaacaaggtagctgaagacctggagtctgaaggtctcatggcagaggaggtgcaggctgtgcaacaacaggaagtgtatggcatgatgcccagggatgaaactgattccaagacagcctccccgtggaagtctgctcgtctgatggttcacaccgtggccacctttaattccatcaaggagctgaatgagcgctggcggtccctacagcagctggccgaggaacggagccagctcttgggcagcgcccatgaagtacagaggttccacagagatgctgatgaaaccaaagaatggattgaagagaagaatcaagctctaaacacagacaattatggacatgatctcgccagtgtccaggccctgcaacgcaagcatgagggcttcgagagggaccttgcggctctcggtgacaaggtaaactcccttggtgaaacagcagagcgcctgatccagtcccatcccgagtcagcagaagacctgcaggaaaagtgcacagagttaaaccaggcctggagcagcctggggaaacgtgcagatcagcgcaaggcaaagttgggtgactcccacgacctgcagcgcttccttagcgatttccgggacctcatgtcttggatcaatggaatacgggggttggtgtcctcagatgagctagccaaggatgtcaccggagctgaggcattgctggagcgacaccaggaacaccggacagaaatcgatgccagggctggcactttccaggcatttgagcagtttggacagcagctgttggctcacggacactatgccagccctgagatcaagcagaaacttgatattcttgaccaggagcgtgcagacctggagaaggcctgggttcagcgcaggatgatgctggatcagtgccttgaactgcagctgttccatcgggactgtgagcaagctgagaactggatggctgcccgggaggccttcttgaataccgaagacaaaggagactcactggacagcgtagaggctctgatcaaaaaacatgaagactttgacaaagcgattaacgtccaggaagagaagattgctgctctgcaggcctttgccgaccagctcatcgctgccggccattatgccaagggagacatttctagccggcgcaatgaggtcttggacaggtggcgacgtctgaaagcccagatgattgagaaaaggtcaaagctaggagaatctcaaaccctccaacagttcagccgggatgtggatgagattgaggcttggatcagtgaaaaattgcaaacagcgagtgatgagtcgtacaaggatcccaccaacatccagctttccaagctgctgagcaagcaccagaagcaccaggcttttgaagcagagctgcatgccaacgctgaccggatccgtggggttatcgacatgggcaactccctcattgaacgtggagcctgtgccggcagtgaggatgctgtcaaggcccgcctggctgccttagctgaccagtggcagttcttggtgcaaaagtcagcggaaaagagccagaaactgaaagaagccaacaagcagcagaacttcaacacagggatcaaggactttgacttctggctgtctgaggtggaggccctgctggcatccgaagattatggcaaagacctagcttctgtgaacaacctgctgaaaaagcatcaactgctggaagcagatatatctgcccatgaggatcgcctgaaggacctgaacagccaggcagacagcctgatgaccagcagtgccttcgacacctcccaagtaaaggacaagagggacaccatcaacgggcgcttccagaagatcaagagcatggcggcctcccggcgagccaagctgaatgaatcccatcgcctgcaccagttcttccgggacatggatgacgaggagtcctggatcaaggagaagaagctgctggtgggctcagaggactacggccgggacctaaccggcgtgcagaacctgaggaagaagcacaagcggctggaagcagaactggctgcgcatgagccggctattcagggtgtcctggacactggcaagaagctgtccgatgacaacaccatcgggaaagaggagatccagcagcggctggcgcagtttgtggagcactggaaagagctgaagcagctggcagctgcccggggtcagcggctggaagagtccttggaatatcagcagtttgtagccaatgtggaagaggaagaagcctggatcaatgagaaaatgaccctggtggccagcgaagattatggcgacactcttgccgccatccagggcttactgaagaaacatgaagcttttgagacagacttcaccgtccacaaggatcgcgtgaatgatgtctgcaccaatggacaagacctcattaagaagaacaatcaccatgaggagaacatctcttcaaagatgaagggcctgaacgggaaagtgtcagacctggagaaagctgcagcccagagaaaggcgaagctggatgagaactcggccttccttcagttcaactggaaggcggacgtggtggagtcctggatcggtgaaaaggagaacagcttgaagacagatgattatggccgagacctgtcttctgtgcagacgctcctcaccaaacaggaaacttttgacgctgggctgcaggccttccagcaggaaggcattgccaacatcactgccctcaaagatcagcttctcgccgccaaacacgttcagtccaaggccatcgaggcccggcacgcctccctcatgaagaggtggagccagcttctggccaactcagccgcccgcaagaagaagcttctggaggctcagagtcacttccgcaaggtggaggacctcttcctgaccttcgccaaaaaggcttctgccttcaacagctggtttgaaaatgcagaggaggacttaacagaccccgtgcgctgcaactccttggaagaaatcaaagctttgcgcgaggcccacgacgccttccgctcctccctcagctctgcccaggctgacttcaaccagctggccgagctggaccgccagatcaagagcttccgcgtagcctccaacccctacacctggtttaccatggaggccctggaggagacctggaggaacctacagaaaatcatcaaggagagggagctggagctgcagaaggaacagcggcggcaggaggagaacgacaagctgcgccaggagtttgcccagcacgccaacgccttccaccagtggatccaagagaccaggacatacctcctcgatgggtcctgtatggtggaagagtcggggaccctcgaatcccagcttgaagctaccaaacgcaagcaccaggaaatccgagccatgagaagtcagctcaaaaagatcgaggacctgggggccgccatggaggaggccctcatcctggacaacaagtacacggagcacagcaccgtgggcctcgcccagcagtgggaccagctggaccagctgggcatgcgcatgcagcacaacctggagcagcagatccaggccaggaacacaacaggtgtgactgaggaggccctcaaagaattcagcatgatgtttaaacactttgacaaggacaagtctggcaggctgaaccatcaggagttcaaatcttgcctgcgctccctgggctatgacctgcccatggtggaggaaggggaacctgaccctgagttcgaggcaatcctggacacggtggatccgaacagagatggccatgtctccttgcaagaatacatggctttcatgatcagccgcgaaactgagaacgtcaagtccagcgaggagattgagagcgccttccgggccctcagctcagagggaaagccttacgtgaccaaggaggagctctaccagaacctgacccgggaacaagccgactactgcgtctcccacatgaagccctacgtggacggcaagggccgcgagctccccaccgcgttcgactacgtggagttcacccgctcgcttttcgtgaactgagccactccctgggtcacccacccctcgctgcttgccctgcgtcgccttgctgcatgtccgctcctctgtgtgctctcactttccactgtaaccttaagcctgcttagcttggaataagacttaggagaaaatggtgcttcactaacccgcttccggtccagtcacaatcatcatgtcactgtggggacccagatctgtgtcttgaagcagctgccctcattccgacttcagaaaatcgaagcagctggctcctccccttgttctctctcccaccctcccccaaatctgttttcatgtaaaagacaaataaatgatgacttcccccaaa

SEQ ID NO: 29648 - DNA, 10168 bp, Homo sapiens
  source 1..10168: mol_type = unassigned DNA
cagggatccttccatgaagactgaggcaggcggagctgctaagagcctgctgacatgacatcggccacagagtttgaaaatgtgggcaaccagccaccttacagcaggatcaatgcccgctgggacgccccagacgacgagctggataatgacaacagctcagccaggctctttgagaggtcccggataaaggccttggcagatgagcgggaagttgttcagaaaaagaccttcacgaaatgggtgaactcgcacctggctcgagtgtcctgccgcatcaccgatctctacaaggacctgcgggatgggcgcatgctcatcaagctgctggaggtgctctctggagagatgctgccaaagcccaccaaggggaagatgcgcatccactgcctggagaatgtggacaaggctctccagttcctcaaggagcagcgtgtacacctggagaacatgggctcccacgacattgtagatggcaaccaccgcctggtcctgggcctcatctggaccatcatcctccgcttccagattcaggacattgtggtccaaactcaggaaggtcgtgaaacacgctcagccaaggatgcgttgctgttgtggtgtcagatgaagacggcaggctaccctcatgttaatgtcaccaactttacctccagctggaaggatggcttggcctttaatgccctgatacacaagcaccggcccgacctgatcgactttgataagctgaaggactccaatgcccggcacaacctggagcacgcattcaatgtggctgagcgccagctgggcatcatcccgctcctcgaccccgaagatgtctttacggaaaaccctgatgagaaatccatcatcacctatgtggtggccttttaccactacttctccaagatgaaggtgctggcagtggagggcaagcgtgtcggcaaggttattgaccatgccattgagactgagaagatgattgaaaagtacagcgggctagcctcggacctgctcacctggatcgagcagaccatcactgtcctgaacagccgcaagtttgccaactcgctgacgggcgtccagcagcagctgcaggccttcagcacctaccgcaccgtggagaagccgcccaagtttcaagagaaggggaatctggaagttctactttttaccatccagtcccggatgagagccaacaatcagaaagtgtacacaccccacgatgggaaactagtgtctgacatcaacagggcctgggaaagcctggaggaagctgagtatcggcgggagctggccctgagaaatgagctcattcggcaggagaagctagagcaactggcccggcgctttgaccggaaggccgcaatgagagagacctggctcagtgaaaaccagcgcctcgtggcccaggataactttgggtatgacctggcagctgtggaggccgccaagaagaagcatgaggccatcgagaccgacacggctgcctacgaggagcgggtgagagccctggaggacctggctcaggagctggagaaagagaactaccatgaccagaagcgcatcacggcccgcaaggacaatatactgcgcctatggagctacctgcaggagctgctgcagtcccggcgccagaggctcgagaccaccctggcactgcagaagctcttccaggacatgctgcacagcatcgactggatggatgagatcaaggctcacctcttgtctgccgagtttgggaagcacttgttggaggttgaagacctgctacagaagcacaagttgatggaagctgacatcgccatccaaggggacaaagtgaaggccatcaccgcagccaccctgaagttcaccgaggggaaagggtaccagccttgtgacccccaggtcatccaggaccgcatcagccacttggagcagtgctttgaggagctgagcaacatggcagctgggcggaaggcccaactggagcagtccaaacgactctggaagttcttctgggagatggatgaggctgagagctggatcaaggagaaggagcagatctattcttccctggactatggcaaagacctgaccagtgtgctcatcttacagcgcaagcacaaggcctttgaggatgagctccgtgggctggatgctcacctggagcagatcttccaggaggctcatggcatggttgcgcgcaagcagtttgggcacccgcagatcgaggcccgcataaaggaggtgtcggcacagtgggaccagctgaaggacctggctgccttctgcaagaagaacctccaggatgctgagaactttttccagttccagggcgatgcggatgacctgaaggcttggctgcaagacgcccaccggctgctctctggtgaagatgtggggcaggacgaaggggccacgcgggccctggggaaaaagcacaaggacttcctggaggagctggaggagagccgtggggtgatggagcacctggagcagcaggcccagggattccccgaagagtttcgggattccccagatgtgacccatcggctgcaggccctgcgggagctctaccaacaggtggtggcccaggcggacctgcgtcagcagaggctgcaggaagccctggacctgtacacggtgttcggggagacagacgcctgtgagctgtggatgggagagaaggagaagtggctggccgagatggaaatgccagacaccctggaggacctggaggtcgtgcagcacaggttcgacatcctggaccaggagatgaagaccttgatgactcagattgatggtgtgaacctcgctgccaacagcttggtagagagtggccacccacgcagcagggaggtgaagcagtaccaggaccatctgaacaccaggtggcaggcatttcagaccctggtgtcggagcggcgggaggctgtggactcagccctccgagtgcacaactactgcgtagattgcgaggagaccagcaagtggatcacggacaagacaaaggtagtggagtccacaaaagacctggggcgggacctggcaggtatcatcgccatccagaggaagttgtcagggctggagcgtgacgtggccgccatccaggcccgtgtggatgccctggagcgtgagtcccagcagctgatggactcgcaccctgagcagaaggaggatattggtcagcggcaaaaacacttggaggagctgtggcagggcctgcagcaatccctgcagggccaggaggacttgctgggggaagtcagccagctgcaggccttcctgcaggatctggatgacttccaggcctggctctccatcacccagaaggctgtggcctctgaggacatgcccgaatccctcccagaggctgagcagctcctgcagcagcatgcaggtatcaaggatgagattgacgggcaccaagacagctaccagcgtgttaaggagtctggggagaaagtgatccaaggccagacggacccagagtatctgcttctgggccagcggctggagggcctggatactggctggaatgccctgggcaggatgtgggagagccgcagccacaccctcgctcagtgccttggcttccaggagttccagaaagatgccaagcaggctgaagccatcctcagcaaccaggaatacactctggctcacttggagcccccagactccctggaagctgcagaggctgggatccggaagtttgaggatttcttggggtctatggagaacaaccgggataaggtcttgagtcctgtggactctggaaacaagctggtagctgagggaaacctatactcagacaagatcaaggagaaggtgcagctgattgaggacaggcacaggaagaacaacgagaaggcccaggaggcctctgtcctactgagagacaacctggagctacagaacttcctccagaactgccaggagctcactctctggatcaacgacaagctgctgacatctcaggatgtctcctatgatgaagcacgaaaccttcacaataaatggctaaagcaccaggcgtttgtggcagagctggcttcccatgaagggtggctagagaacatcgatgcggaaggaaagcagctgatggatgagaagccccagtttacagccctggtgtcccaaaagctggaagccctgcaccggctctgggacgagctgcaggccaccacaaaggagaagacccagcacctctcggctgccaggagctccgacctgcgcttgcagacccatgctgacctcaacaagtggatcagcgccatggaggaccagctgcggtcagacgacccgggcaaggacctgaccagtgtcaatcggatgttggctaagctgaagcgagtggaggaccaagtgaatgtgcgaaaagaggagctgggggagctgtttgcccaggtgccttcaatgggagaggagggaggagatgcagacttgagcatcgagaagcggttcctggacctcctggaacccctaggaaggaggaagaagcagctggaatcatccagagccaagctgcagatcagccgggacttagaggatgagacgctttgggtggaggagaggctgcctctggcccagtcagccgactatggcactaatctgcaaactgtgcaactgttcatgaagaagaaccagacactgcagaatgagattctgggccatacgccgcgggttgaggatgtgctgcagagagggcagcagctggtggaggcggcggagatcgactgccaggaccttgaggagcgcctggggcacctgcagagctcctgggacaggctgcgggaggcagcggccgggaggctgcagcgactgagggacgccaacgaggcacagcagtactacctggatgcagacgaggctgaggcctggattggcgagcaggagctctacgtcatctccgatgagatccccaaggatgaagagggcgccattgtgatgctgaagcgacatttgcggcagcagcgtgcggtggaggactacggccggaacatcaagcagctggccagccgggcccagggcctgctgtctgcaggccaccctgagggggaacagatcatcagacttcaggggcaagtggacaagcactacgcagggctgaaggacgtggcggaagagcgcaagcgcaagctggagaacatgtaccacctgttccagctcaagcgggagaccgacgacctggagcagtggatttcagaaaaggagctagtggcctcttccccggaaatggggcaagactttgaccacgtgactcttctgcgggacaagttccgggactttgcccgggagaccggggcgattgggcaggagcgggtggacaatgtgaatgccttcatcgagcgactcatcgacgcgggccacagcgaggcggccaccatcgccgagtggaaggacgggctgaacgagatgtgggcagacctcctggagctcattgacacgcgcatgcagctgctggccgcctcctatgacctgcaccgctacttctacacgggtgccgagatcctgggcctcatcgacgagaagcaccgcgagctgcccgaggacgtggggctggacgccagcacggccgagtccttccaccgggtgcacacagccttcgagcgggagctccacctgctgggtgtccaggtgcagcagttccaggacgtggccacccgtctgcagacagcatatgctggggagaaggcagaggccatccagaacaaggagcaggaggtgtctgccgcgtggcaggcgctgctcgatgcctgtgccgggcgccggacccagctagtggacacggcggataaattccgcttcttcagcatggcccgtgacctcctctcctggatggagagcatcatccggcagatcgagacccaggagaggcccagggatgtctcctctgtggaactgctcatgaagtatcaccagggcatcaatgcagagattgaaacccggagcaagaacttcagtgcctgcctggagcttggcgagtccctgctgcagcggcagcaccaggcctcagaggagatccgcgagaaactgcagcaggtgatgtccaggaggaaagagatgaatgagaagtgggaagcccgctgggagcggctccgcatgttgctggaggtgtgccagttctcgagggatgcctctgtggctgaggcgtggctgattgcccaggagccctacctggccagcggggactttggacacacagtggacagtgtggagaagctcatcaagaggcatgaggcttttgagaagtccacggccagctgggcagagcgctttgctgccctggagaagcccaccacgcttgagctgaaagaacgccagattgcagagagacccgcagaggagactgggcctcaagaggaggaaggcgagacagcaggggaggctccagtttcccaccatgcggccaccgagagaacgtccccgggggaagaagagggaacgtggcctcagaacctgcagcagccaccaccgccgggtcagcacaaggatgggcagaaatccactggggatgagaggcccaccacggagcccctctttaaggtcctagatacgcctctgagcgagggtgatgagcccgcaacgctgccggccccgcgggaccatgggcagagtgtgcagatggaaggctacctgggccgcaagcatgacctggaggggcccaacaagaaggcttccaacagtaagggagaagagggagaggagaggagggagacagaagaggaggatgaagaggaggaggaaacagagtctgttgctgtagaaatgcagcaacatgcttcccacgtgtcctggaacaacctgtactgtgtgctcaggaacagtgagctaaccttctacaaggatgccaagaacctggccctggggatgccctaccatggggaggaacccctggccctgagacatgccatctgtgagattgctgccaactacaagaagaagaagcacgtctttaagctgaggctgagtaatggcagcgagtggctcttccatggcaaggatgaggaggagatgctgtcctggctgcagggcgtgagcaccgccatcaacgagtcccagagcatccgcgtcaaggcgcagagcctgcccctgccttccctctccggccccgacgccagcctcggcaagaaagacaaggagaagagattcagcttcttccccaaaaagaagtagcaggtggggctggcgggcgcggcggagtcgggacgcgcagagaccgggcagcccaggccttggcctcctctcgccgccgcccgccggtcgaatcgagatgagtcgagtcgcgggccgggcccccgggccccacgctgcactgcaaaagctgccttcgcccgcgtgtcctgggccgacgccccctccatgccctcgcccgcgctggctccgctccagggacaggggctcccagctcctctggcgcctttggggcctccaggcctgggggcaggaaacggttctctgaggcacacgccctcctctcccaccctcctcctgagccgagggggcacaggccccttacccccaaccaaaaaaaaaaaaaaaaaagagctggagaaggctgatggggttcttcaaacgctgcccgttcctaaagcaagtcttgcttcgggtcacctcccacctggtggcagccagggaaaggggaaaggaagaagacactggaaatgcatggccagccccctaggggcatgaggaaggagccttcaggtggcccacaaagccctagctctgggccaggggctctggggggctgaggggaccagactgggtgcagggccttgggagctgccagcctccttcccactgggcttccgcagaactgggactctcacttcaggggccaccacatccctcctctctgcttctccccccagatcaaagggtaccctcccacggttggcagggcctggctgagtgcctctagcaccctttgtgccaccacaggcggtcccaggaagggcagcaaggtcagaccattcctcattgaaaaccgtggctagggcacagggctctgatctgaaggagtgacaggtgcgtcacaacactgcctaaggctctccctctcaatgctgggaccctcgccccactcccagtggcagccaaaccagcaatatccaacagacataggccccctacgggacagtgtgggcccccagatataagatggataccccccgcacctgcagtaaagcatcccaaagccaaatgctcaattgcatcctgtctgcagctgggactttggagggtaatggctgggcagacagtaaagttgatcatctgttttctcggggtggcagacgcagccatgtcttggtatcaccacccatgtgacagctactcctgcacaactgggacaaatgtcagggccagagccatgaaggtgtggtaccccttgatcagcttctccacgtcctggccccaggtcttggcggggagggggtcacatgagtacagaggtcaaatatctaccaccctccagccctgagcaccagaagctctgcaaccaacgtccccaggaatggccttccccttgctgctcaggtcatacttctggaggaagagaaagctcattccatattttccccaccactctactccgaaagcaacacagttctggcccagtatcaaactagggttaggtccaagagagcagtcaagcgggtcgggggtgggggggagggcggagggcagcaggcattttcccccaaggaaaccatgaaagtccccagggcctgcagtcaagtttctatcaccttccccgtgagaaggaccttagttccatggagatgaagtgggtgaggttcaggtagaagccacaggggcaggcatccagaatgaggccccctgaggaaccctgagtgctgaccagtgccggcagaaatcagttccaccctgtggccctgacactatatgtcagggtgacaccaactgcagcaggcaggagccacaggaaggaagacgtcatccgatggagcctgacatccccaggttcccgccctggtgagcaaggtcttcatttggctttggtacatatgaccctatacagggaacctagtgtgtatcactcaccagcctctttctgtatctggggaaaccaaggcagtgaggtgactgcactcacctagcaataaagtaggcctttggtgcacttgcaggcatgtcctcctctggggcagagagcaggttccttgctgaagggcagatggtggcaaacatctccctcaactgtttccctgggccagtctttagggagcctagggacaagggcccaccctcccccttccacgtgtgccaaatcagcacctgaagtgaggcatttccagcaagcaactccacagacccgagaaaggaagggctctagtggaagagctagcatctcaccaccccaggtcccctggcctggtccagggcagccagctgcatgtgaccattctgttgccagctccccacacatccctcctgtcacccaggctccaagacattcgaccaactagactgaaaatgcaggcatccagctttgggagaccctgtgtgtgccacaccagggctaagctctcccagtgccctagcaaggtctttttttttttttctctccttattctactctacagtcttttgacagtattcccaaacgaggttgacacagctccagtccacaccagcataccaggcttccttcccagggcagtttagaggaagctccttctgggcaaggtcaggcggtcctccttccctctctccttcccctttgtcccagcctcaactgactctggctgtgggaggtgtggagggtccttaggcttccctccccaacctggcctccaccaacacccctaacaggaggcccgtggaaggctcagcctctcctccgcatccctcctccttcctgcctatcggagggagccagggtcccctaggctgaccctgaatcctcttcctcccttcatgggaggggggcaggaatccagaggaggatgaagccagcgggaccacatggcttggtggcttggacaaacaagctcagggaggaaatgaggaggcggcggctgcagaggaatgcaaccctgttgggcacagaccatgcaatctggggctggccctggggccagctgggtcctgtcctccacctgctcaaccgtgcttccaccaaccagaggaaacccatttactagtttttctaataaatcaataatgctcc

SEQ ID NO: 29649 - DNA, 6375 bp, Homo sapiens
  source 1..6375: mol_type = unassigned DNA
cagggatccttccatgaagactgaggcaggcggagctgctaagagcctgctgacatgacatcggccacagagtttgaaaatgtgggcaaccagccaccttacagcaggatcaatgcccgctgggacgccccagacgacgagctggataatgacaacagctcagccaggctctttgagaggtcccggataaaggccttggcagatgagcgggaagttgttcagaaaaagaccttcacgaaatgggtgaactcgcacctggctcgagtgtcctgccgcatcaccgatctctacaaggacctgcgggatgggcgcatgctcatcaagctgctggaggtgctctctggagagatgctgccaaagcccaccaaggggaagatgcgcatccactgcctggagaatgtggacaaggctctccagttcctcaaggagcagcgtgtacacctggagaacatgggctcccacgacattgtagatggcaaccaccgcctggtcctgggcctcatctggaccatcatcctccgcttccagattcaggacattgtggtccaaactcaggaaggtcgtgaaacacgctcagccaaggatgcgttgctgttgtggtgtcagatgaagacggcaggctaccctcatgttaatgtcaccaactttacctccagctggaaggatggcttggcctttaatgccctgatacacaagcaccggcccgacctgatcgactttgataagctgaaggactccaatgcccggcacaacctggagcacgcattcaatgtggctgagcgccagctgggcatcatcccgctcctcgaccccgaagatgtctttacggaaaaccctgatgagaaatccatcatcacctatgtggtggccttttaccactacttctccaagatgaaggtgctggcagtggagggcaagcgtgtcggcaaggttattgaccatgccattgagactgagaagatgattgaaaagtacagcgggctagcctcggacctgctcacctggatcgagcagaccatcactgtcctgaacagccgcaagtttgccaactcgctgacgggcgtccagcagcagctgcaggccttcagcacctaccgcaccgtggagaagccgcccaagtttcaagagaaggggaatctggaagttctactttttaccatccagtcccggatgagagccaacaatcagaaagtgtacacaccccacgatgggaaactagtgtctgacatcaacagggcctgggaaagcctggaggaagctgagtatcggcgggagctggccctgagaaatgagctcattcggcaggagaagctagagcaactggcccggcgctttgaccggaaggccgcaatgagagagacctggctcagtgaaaaccagcgcctcgtggcccaggataactttgggtatgacctggcagctgtggaggccgccaagaagaagcatgaggccatcgagaccgacacggctgcctacgaggagcgggtgagagccctggaggacctggctcaggagctggagaaagagaactaccatgaccagaagcgcatcacggcccgcaaggacaatatactgcgcctatggagctacctgcaggagctgctgcagtcccggcgccagaggctcgagaccaccctggcactgcagaagctcttccaggacatgctgcacagcatcgactggatggatgagatcaaggctcacctcttgtctgccgagtttgggaagcacttgttggaggttgaagacctgctacagaagcacaagttgatggaagctgacatcgccatccaaggggacaaagtgaaggccatcaccgcagccaccctgaagttcaccgaggggaaagggtaccagccttgtgacccccaggtcatccaggaccgcatcagccacttggagcagtgctttgaggagctgagcaacatggcagctgggcggaaggcccaactggagcagtccaaacgactctggaagttcttctgggagatggatgaggctgagagctggatcaaggagaaggagcagatctattcttccctggactatggcaaagacctgaccagtgtgctcatcttacagcgcaagcacaaggcctttgaggatgagctccgtgggctggatgctcacctggagcagatcttccaggaggctcatggcatggttgcgcgcaagcagtttgggcacccgcagatcgaggcccgcataaaggaggtgtcggcacagtgggaccagctgaaggacctggctgccttctgcaagaagaacctccaggatgctgagaactttttccagttccagggcgatgcggatgacctgaaggcttggctgcaagacgcccaccggctgctctctggtgaagatgtggggcaggacgaaggggccacgcgggccctggggaaaaagcacaaggacttcctggaggagctggaggagagccgtggggtgatggagcacctggagcagcaggcccagggattccccgaagagtttcgggattccccagatgtgacccatcggctgcaggccctgcgggagctctaccaacaggtggtggcccaggcggacctgcgtcagcagaggctgcaggaagccctggacctgtacacggtgttcggggagacagacgcctgtgagctgtggatgggagagaaggagaagtggctggccgagatggaaatgccagacaccctggaggacctggaggtcgtgcagcacaggttcgacatcctggaccaggagatgaagaccttgatgactcagattgatggtgtgaacctcgctgccaacagcttggtagagagtggccacccacgcagcagggaggtgaagcagtaccaggaccatctgaacaccaggtggcaggcatttcagaccctggtgtcggagcggcgggaggctgtggactcagccctccgagtgcacaactactgcgtagattgcgaggagaccagcaagtggatcacggacaagacaaaggtagtggagtccacaaaagacctggggcgggacctggcaggtatcatcgccatccagaggaagttgtcagggctggagcgtgacgtggccgccatccaggcccgtgtggatgccctggagcgtgagtcccagcagctgatggactcgcaccctgagcagaaggaggatattggtcagcggcaaaaacacttggaggagctgtggcagggcctgcagcaatccctgcagggccaggaggacttgctgggggaagtcagccagctgcaggccttcctgcaggatctggatgacttccaggcctggctctccatcacccagaaggctgtggcctctgaggacatgcccgaatccctcccagaggctgagcagctcctgcagcagcatgcaggtatcaaggatgagattgacgggcaccaagacagctaccagcgtgttaaggagtctggggagaaagtgatccaaggccagacggacccagagtatctgcttctgggccagcggctggagggcctggatactggctggaatgccctgggcaggatgtgggagagccgcagccacaccctcgctcagtgccttggcttccaggagttccagaaagatgccaagcaggctgaagccatcctcagcaaccaggaatacactctggctcacttggagcccccagactccctggaagctgcagaggctgggatccggaagtttgaggatttcttggggtctatggagaacaaccgggataaggtcttgagtcctgtggactctggaaacaagctggtagctgagggaaacctatactcagacaagatcaaggagaaggtgcagctgattgaggacaggcacaggaagaacaacgagaaggcccaggaggcctctgtcctactgagagacaacctggagctacagaacttcctccagaactgccaggagctcactctctggatcaacgacaagctgctgacatctcaggatgtctcctatgatgaagcacgaaaccttcacaataaatggctaaagcaccaggcgtttgtggcagagctggcttcccatgaagggtggctagagaacatcgatgcggaaggaaagcagctgatggatgagaagccccagtttacagccctggtgtcccaaaagctggaagccctgcaccggctctgggacgagctgcaggccaccacaaaggagaagacccagcacctctcggctgccaggagctccgacctgcgcttgcagacccatgctgacctcaacaagtggatcagcgccatggaggaccagctgcggtcagacgacccgggcaaggacctgaccagtgtcaatcggatgttggctaagctgaagcgagtggaggaccaagtgaatgtgcgaaaagaggagctgggggagctgtttgcccaggtgccttcaatgggagaggagggaggagatgcagacttgagcatcgagaagcggttcctggacctcctggaacccctaggaaggaggaagaagcagctggaatcatccagagccaagctgcagatcagccgggacttagaggatgagacgctttgggtggaggagaggctgcctctggcccagtcagccgactatggcactaatctgcaaactgtgcaactgttcatgaagaagaaccagacactgcagaatgagattctgggccatacgccgcgggttgaggatgtgctgcagagagggcagcagctggtggaggcggcggagatcgactgccaggaccttgaggagcgcctggggcacctgcagagctcctgggacaggctgcgggaggcagcggccgggaggctgcagcgactgagggacgccaacgaggcacagcagtactacctggatgcagacgaggctgaggcctggattggcgagcaggagctctacgtcatctccgatgagatccccaaggatgaagagggcgccattgtgatgctgaagcgacatttgcggcagcagcgtgcggtggaggactacggccggaacatcaagcagctggccagccgggcccagggcctgctgtctgcaggccaccctgagggggaacagatcatcagacttcaggggcaagtggacaagcactacgcagggctgaaggacgtggcggaagagcgcaagcgcaagctggagaacatgtaccacctgttccagctcaagcgggagaccgacgacctggagcagtggatttcagaaaaggagctagtggcctcttccccggaaatggggcaagactttgaccacgtgactcttctgcgggacaagttccgggactttgcccgggagaccggggcgattgggcaggagcgggtggacaatgtgaatgccttcatcgagcgactcatcgacgcgggccacagcgaggcggccaccatcgccgagtggaaggacgggctgaacgagatgtgggcagacctcctggagctcattgacacgcgcatgcagctgctggccgcctcctatgacctgcaccgctacttctacacgggtgccgagatcctgggcctcatcgacgagaagcaccgcgagctgcccgaggacgtggggctggacgccagcacggccgagtccttccaccgggtgcacacagccttcgagcgggagctccacctgctgggtgtccaggtgcagcagttccaggacgtggccacccgtctgcagacagcatatgctggggagaaggcagaggccatccagaacaaggagcaggaggtgtctgccgcgtggcaggcgctgctcgatgcctgtgccgggcgccggacccagctagtggacacggcggataaattccgcttcttcagcatggcccgtgacctcctctcctggatggagagcatcatccggcagatcgagacccaggagaggcccagggatgtctcctctgtggaactgctcatgaagtatcaccagggcatcaatgcagagattgaaacccggagcaagaacttcagtgcctgcctggagcttggcgagtccctgctgcagcggcagcaccaggcctcagaggagatccgcgagaaactgcagcaggtgatgtccaggaggaaagagatgaatgagaagtgggaagcccgctgggagcggctccgcatgttgctggaggtgtgccagttctcgagggatgcctctgtggctgaggcgtggctgattgcccaggagccctacctggccagcggggactttggacacacagtggacagtgtggagaagctcatcaagaggcatgaggcttttgagaagtccacggccagctgggcagagcgctttgctgccctggagaagcccaccacggcctcaagaggaggaaggcgagacagcaggggaggctccagtttcccaccatgcggccaccgagagaacgtccccggtcagtctctggtctcgtttgtctag

SEQ ID NO: 29650 - DNA, 6705 bp, Homo sapiens
  source 1..6705: mol_type = unassigned DNA
tgaggcaggcggagctgctaagagcctgctgacatgacatcggccacagagtttgaaaatgtgggcaaccagccaccttacagcaggatcaatgcccgctgggacgccccagacgacgagctggataatgacaacagctcagccaggctctttgagaggtcccggataaaggccttggcagatgagcgggaagttgttcagaaaaagaccttcacgaaatgggtgaactcgcacctggctcgagtgtcctgccgcatcaccgatctctacaaggacctgcgggatgggcgcatgctcatcaagctgctggaggtgctctctggagagatgctgccaaagcccaccaaggggaagatgcgcatccactgcctggagaatgtggacaaggctctccagttcctcaaggagcagcgtgtacacctggagaacatgggctcccacgacattgtagatggcaaccaccgcctggtcctgggcctcatctggaccatcatcctccgcttccagattcaggacattgtggtccaaactcaggaaggtcgtgaaacacgctcagccaaggatgcgttgctgttgtggtgtcagatgaagacggcaggctaccctcatgttaatgtcaccaactttacctccagctggaaggatggcttggcctttaatgccctgatacacaagcaccggcccgacctgatcgactttgataagctgaaggactccaatgcccggcacaacctggagcacgcattcaatgtggctgagcgccagctgggcatcatcccgctcctcgaccccgaagatgtctttacggaaaaccctgatgagaaatccatcatcacctatgtggtggccttttaccactacttctccaagatgaaggtgctggcagtggagggcaagcgtgtcggcaaggttattgaccatgccattgagactgagaagatgattgaaaagtacagcgggctagcctcggacctgctcacctggatcgagcagaccatcactgtcctgaacagccgcaagtttgccaactcgctgacgggcgtccagcagcagctgcaggccttcagcacctaccgcaccgtggagaagccgcccaagtttcaagagaaggggaatctggaagttctactttttaccatccagtcccggatgagagccaacaatcagaaagtgtacacaccccacgatgggaaactagtgtctgacatcaacagggcctgggaaagcctggaggaagctgagtatcggcgggagctggccctgagaaatgagctcattcggcaggagaagctagagcaactggcccggcgctttgaccggaaggccgcaatgagagagacctggctcagtgaaaaccagcgcctcgtggcccaggataactttgggtatgacctggcagctgtggaggccgccaagaagaagcatgaggccatcgagaccgacacggctgcctacgaggagcgggtgagagccctggaggacctggctcaggagctggagaaagagaactaccatgaccagaagcgcatcacggcccgcaaggacaatatactgcgcctatggagctacctgcaggagctgctgcagtcccggcgccagaggctcgagaccaccctggcactgcagaagctcttccaggacatgctgcacagcatcgactggatggatgagatcaaggctcacctcttgtctgccgagtttgggaagcacttgttggaggttgaagacctgctacagaagcacaagttgatggaagctgacatcgccatccaaggggacaaagtgaaggccatcaccgcagccaccctgaagttcaccgaggggaaagggtaccagccttgtgacccccaggtcatccaggaccgcatcagccacttggagcagtgctttgaggagctgagcaacatggcagctgggcggaaggcccaactggagcagtccaaacgactctggaagttcttctgggagatggatgaggctgagagctggatcaaggagaaggagcagatctattcttccctggactatggcaaagacctgaccagtgtgctcatcttacagcgcaagcacaaggcctttgaggatgagctccgtgggctggatgctcacctggagcagatcttccaggaggctcatggcatggttgcgcgcaagcagtttgggcacccgcagatcgaggcccgcataaaggaggtgtcggcacagtgggaccagctgaaggacctggctgccttctgcaagaagaacctccaggatgctgagaactttttccagttccagggcgatgcggatgacctgaaggcttggctgcaagacgcccaccggctgctctctggtgaagatgtggggcaggacgaaggggccacgcgggccctggggaaaaagcacaaggacttcctggaggagctggaggagagccgtggggtgatggagcacctggagcagcaggcccagggattccccgaagagtttcgggattccccagatgtgacccatcggctgcaggccctgcgggagctctaccaacaggtggtggcccaggcggacctgcgtcagcagaggctgcaggaagccctggacctgtacacggtgttcggggagacagacgcctgtgagctgtggatgggagagaaggagaagtggctggccgagatggaaatgccagacaccctggaggacctggaggtcgtgcagcacaggttcgacatcctggaccaggagatgaagaccttgatgactcagattgatggtgtgaacctcgctgccaacagcttggtagagagtggccacccacgcagcagggaggtgaagcagtaccaggaccatctgaacaccaggtggcaggcatttcagaccctggtgtcggagcggcgggaggctgtggactcagccctccgagtgcacaactactgcgtagattgcgaggagaccagcaagtggatcacggacaagacaaaggtagtggagtccacaaaagacctggggcgggacctggcaggtatcatcgccatccagaggaagttgtcagggctggagcgtgacgtggccgccatccaggcccgtgtggatgccctggagcgtgagtcccagcagctgatggactcgcaccctgagcagaaggaggatattggtcagcggcaaaaacacttggaggagctgtggcagggcctgcagcaatccctgcagggccaggaggacttgctgggggaagtcagccagctgcaggccttcctgcaggatctggatgacttccaggcctggctctccatcacccagaaggctgtggcctctgaggacatgcccgaatccctcccagaggctgagcagctcctgcagcagcatgcaggtatcaaggatgagattgacgggcaccaagacagctaccagcgtgttaaggagtctggggagaaagtgatccaaggccagacggacccagagtatctgcttctgggccagcggctggagggcctggatactggctggaatgccctgggcaggatgtgggagagccgcagccacaccctcgctcagtgccttggcttccaggagttccagaaagatgccaagcaggctgaagccatcctcagcaaccaggaatacactctggctcacttggagcccccagactccctggaagctgcagaggctgggatccggaagtttgaggatttcttggggtctatggagaacaaccgggataaggtcttgagtcctgtggactctggaaacaagctggtagctgagggaaacctatactcagacaagatcaaggagaaggtgcagctgattgaggacaggcacaggaagaacaacgagaaggcccaggaggcctctgtcctactgagagacaacctggagctacagaacttcctccagaactgccaggagctcactctctggatcaacgacaagctgctgacatctcaggatgtctcctatgatgaagcacgaaaccttcacaataaatggctaaagcaccaggcgtttgtggcagagctggcttcccatgaagggtggctagagaacatcgatgcggaaggaaagcagctgatggatgagaagccccagtttacagccctggtgtcccaaaagctggaagccctgcaccggctctgggacgagctgcaggccaccacaaaggagaagacccagcacctctcggctgccaggagctccgacctgcgcttgcagacccatgctgacctcaacaagtggatcagcgccatggaggaccagctgcggtcagacgacccgggcaaggacctgaccagtgtcaatcggatgttggctaagctgaagcgagtggaggaccaagtgaatgtgcgaaaagaggagctgggggagctgtttgcccaggtgccttcaatgggagaggagggaggagatgcagacttgagcatcgagaagcggttcctggacctcctggaacccctaggaaggaggaagaagcagctggaatcatccagagccaagctgcagatcagccgggacttagaggatgagacgctttgggtggaggagaggctgcctctggcccagtcagccgactatggcactaatctgcaaactgtgcaactgttcatgaagaagaaccagacactgcagaatgagattctgggccatacgccgcgggttgaggatgtgctgcagagagggcagcagctggtggaggcggcggagatcgactgccaggaccttgaggagcgcctggggcacctgcagagctcctgggacaggctgcgggaggcagcggccgggaggctgcagcgactgagggacgccaacgaggcacagcagtactacctggatgcagacgaggctgaggcctggattggcgagcaggagctctacgtcatctccgatgagatccccaaggatgaagagggcgccattgtgatgctgaagcgacatttgcggcagcagcgtgcggtggaggactacggccggaacatcaagcagctggccagccgggcccagggcctgctgtctgcaggccaccctgagggggaacagatcatcagacttcaggggcaagtggacaagcactacgcagggctgaaggacgtggcggaagagcgcaagcgcaagctggagaacatgtaccacctgttccagctcaagcgggagaccgacgacctggagcagtggatttcagaaaaggagctagtggcctcttccccggaaatggggcaagactttgaccacgtgactcttctgcgggacaagttccgggactttgcccgggagaccggggcgattgggcaggagcgggtggacaatgtgaatgccttcatcgagcgactcatcgacgcgggccacagcgaggcggccaccatcgccgagtggaaggacgggctgaacgagatgtgggcagacctcctggagctcattgacacgcgcatgcagctgctggccgcctcctatgacctgcaccgctacttctacacgggtgccgagatcctgggcctcatcgacgagaagcaccgcgagctgcccgaggacgtggggctggacgccagcacggccgagtccttccaccgggtgcacacagccttcgagcgggagctccacctgctgggtgtccaggtgcagcagttccaggacgtggccacccgtctgcagacagcatatgctggggagaaggcagaggccatccagaacaaggagcaggaggtgtctgccgcgtggcaggcgctgctcgatgcctgtgccgggcgccggacccagctagtggacacggcggataaattccgcttcttcagcatggcccgtgacctcctctcctggatggagagcatcatccggcagatcgagacccaggagaggcccagggatgtctcctctgtggaactgctcatgaagtatcaccagggcatcaatgcagagattgaaacccggagcaagaacttcagtgcctgcctggagcttggcgagtccctgctgcagcggcagcaccaggcctcagaggagatccgcgagaaactgcagcaggtgatgtccaggaggaaagagatgaatgagaagtgggaagcccgctgggagcggctccgcatgttgctggaggtgtgccagttctcgagggatgcctctgtggctgaggcgtggctgattgcccaggagccctacctggccagcggggactttggacacacagtggacagtgtggagaagctcatcaagaggcatgaggcttttgagaagtccacggccagctgggcagagcgctttgctgccctggagaagcccaccacgcttgagctgaaagaacgccagattgcagagagacccgcagaggagactgggcctcaagaggaggaaggcgagacagcaggggaggctccagtttcccaccatgcggccaccgagagaacgtccccggtcagtctctggtctcgtttgtctagttcctgggagtcactgcagccagagccctctcacccctactaggctcagcccaggtggaggcgagatgagctggcgcagccccgccctccatcctccccacatccctgcagccacctcccagcagagcaggctacgtcctcactgaggtgttcttcatgagagtactagcctcctccactcctccccacagcgcagaggaaacaggccagcccagtgacatgacgttattagttttgttttacctaatgtaataaattttattgtataaatatatcaccatttacatgaggggaaacacta

SEQ ID NO: 29651 - DNA, 10063 bp, Homo sapiens
  source 1..10063: mol_type = unassigned DNA
cagggatccttccatgaagactgaggcaggcggagctgctaagagcctgctgacatgacatcggccacagagtttgaaaatgtgggcaaccagccaccttacagcaggatcaatgcccgctgggacgccccagacgacgagctggataatgacaacagctcagccaggctctttgagaggtcccggataaaggccttggcagatgagcgggaagttgttcagaaaaagaccttcacgaaatgggtgaactcgcacctggctcgagtgtcctgccgcatcaccgatctctacaaggacctgcgggatgggcgcatgctcatcaagctgctggaggtgctctctggagagatgctgccaaagcccaccaaggggaagatgcgcatccactgcctggagaatgtggacaaggctctccagttcctcaaggagcagcgtgtacacctggagaacatgggctcccacgacattgtagatggcaaccaccgcctggtcctgggcctcatctggaccatcatcctccgcttccagattcaggacattgtggtccaaactcaggaaggtcgtgaaacacgctcagccaaggatgcgttgctgttgtggtgtcagatgaagacggcaggctaccctcatgttaatgtcaccaactttacctccagctggaaggatggcttggcctttaatgccctgatacacaagcaccggcccgacctgatcgactttgataagctgaaggactccaatgcccggcacaacctggagcacgcattcaatgtggctgagcgccagctgggcatcatcccgctcctcgaccccgaagatgtctttacggaaaaccctgatgagaaatccatcatcacctatgtggtggccttttaccactacttctccaagatgaaggtgctggcagtggagggcaagcgtgtcggcaaggttattgaccatgccattgagactgagaagatgattgaaaagtacagcgggctagcctcggacctgctcacctggatcgagcagaccatcactgtcctgaacagccgcaagtttgccaactcgctgacgggcgtccagcagcagctgcaggccttcagcacctaccgcaccgtggagaagccgcccaagtttcaagagaaggggaatctggaagttctactttttaccatccagtcccggatgagagccaacaatcagaaagtgtacacaccccacgatgggaaactagtgtctgacatcaacagggcctgggaaagcctggaggaagctgagtatcggcgggagctggccctgagaaatgagctcattcggcaggagaagctagagcaactggcccggcgctttgaccggaaggccgcaatgagagagacctggctcagtgaaaaccagcgcctcgtggcccaggataactttgggtatgacctggcagctgtggaggccgccaagaagaagcatgaggccatcgagaccgacacggctgcctacgaggagcgggtgagagccctggaggacctggctcaggagctggagaaagagaactaccatgaccagaagcgcatcacggcccgcaaggacaatatactgcgcctatggagctacctgcaggagctgctgcagtcccggcgccagaggctcgagaccaccctggcactgcagaagctcttccaggacatgctgcacagcatcgactggatggatgagatcaaggctcacctcttgtctgccgagtttgggaagcacttgttggaggttgaagacctgctacagaagcacaagttgatggaagctgacatcgccatccaaggggacaaagtgaaggccatcaccgcagccaccctgaagttcaccgaggggaaagggtaccagccttgtgacccccaggtcatccaggaccgcatcagccacttggagcagtgctttgaggagctgagcaacatggcagctgggcggaaggcccaactggagcagtccaaacgactctggaagttcttctgggagatggatgaggctgagagctggatcaaggagaaggagcagatctattcttccctggactatggcaaagacctgaccagtgtgctcatcttacagcgcaagcacaaggcctttgaggatgagctccgtgggctggatgctcacctggagcagatcttccaggaggctcatggcatggttgcgcgcaagcagtttgggcacccgcagatcgaggcccgcataaaggaggtgtcggcacagtgggaccagctgaaggacctggctgccttctgcaagaagaacctccaggatgctgagaactttttccagttccagggcgatgcggatgacctgaaggcttggctgcaagacgcccaccggctgctctctggtgaagatgtggggcaggacgaaggggccacgcgggccctggggaaaaagcacaaggacttcctggaggagctggaggagagccgtggggtgatggagcacctggagcagcaggcccagggattccccgaagagtttcgggattccccagatgtgacccatcggctgcaggccctgcgggagctctaccaacaggtggtggcccaggcggacctgcgtcagcagaggctgcaggaagccctggacctgtacacggtgttcggggagacagacgcctgtgagctgtggatgggagagaaggagaagtggctggccgagatggaaatgccagacaccctggaggacctggaggtcgtgcagcacaggttcgacatcctggaccaggagatgaagaccttgatgactcagattgatggtgtgaacctcgctgccaacagcttggtagagagtggccacccacgcagcagggaggtgaagcagtaccaggaccatctgaacaccaggtggcaggcatttcagaccctggtgtcggagcggcgggaggctgtggactcagccctccgagtgcacaactactgcgtagattgcgaggagaccagcaagtggatcacggacaagacaaaggtagtggagtccacaaaagacctggggcgggacctggcaggtatcatcgccatccagaggaagttgtcagggctggagcgtgacgtggccgccatccaggcccgtgtggatgccctggagcgtgagtcccagcagctgatggactcgcaccctgagcagaaggaggatattggtcagcggcaaaaacacttggaggagctgtggcagggcctgcagcaatccctgcagggccaggaggacttgctgggggaagtcagccagctgcaggccttcctgcaggatctggatgacttccaggcctggctctccatcacccagaaggctgtggcctctgaggacatgcccgaatccctcccagaggctgagcagctcctgcagcagcatgcaggtatcaaggatgagattgacgggcaccaagacagctaccagcgtgttaaggagtctggggagaaagtgatccaaggccagacggacccagagtatctgcttctgggccagcggctggagggcctggatactggctggaatgccctgggcaggatgtgggagagccgcagccacaccctcgctcagtgccttggcttccaggagttccagaaagatgccaagcaggctgaagccatcctcagcaaccaggaatacactctggctcacttggagcccccagactccctggaagctgcagaggctgggatccggaagtttgaggatttcttggggtctatggagaacaaccgggataaggtcttgagtcctgtggactctggaaacaagctggtagctgagggaaacctatactcagacaagatcaaggagaaggtgcagctgattgaggacaggcacaggaagaacaacgagaaggcccaggaggcctctgtcctactgagagacaacctggagctacagaacttcctccagaactgccaggagctcactctctggatcaacgacaagctgctgacatctcaggatgtctcctatgatgaagcacgaaaccttcacaataaatggctaaagcaccaggcgtttgtggcagagctggcttcccatgaagggtggctagagaacatcgatgcggaaggaaagcagctgatggatgagaagccccagtttacagccctggtgtcccaaaagctggaagccctgcaccggctctgggacgagctgcaggccaccacaaaggagaagacccagcacctctcggctgccaggagctccgacctgcgcttgcagacccatgctgacctcaacaagtggatcagcgccatggaggaccagctgcggtcagacgacccgggcaaggacctgaccagtgtcaatcggatgttggctaagctgaagcgagtggaggaccaagtgaatgtgcgaaaagaggagctgggggagctgtttgcccaggtgccttcaatgggagaggagggaggagatgcagacttgagcatcgagaagcggttcctggacctcctggaacccctaggaaggaggaagaagcagctggaatcatccagagccaagctgcagatcagccgggacttagaggatgagacgctttgggtggaggagaggctgcctctggcccagtcagccgactatggcactaatctgcaaactgtgcaactgttcatgaagaagaaccagacactgcagaatgagattctgggccatacgccgcgggttgaggatgtgctgcagagagggcagcagctggtggaggcggcggagatcgactgccaggaccttgaggagcgcctggggcacctgcagagctcctgggacaggctgcgggaggcagcggccgggaggctgcagcgactgagggacgccaacgaggcacagcagtactacctggatgcagacgaggctgaggcctggattggcgagcaggagctctacgtcatctccgatgagatccccaaggatgaagagggcgccattgtgatgctgaagcgacatttgcggcagcagcgtgcggtggaggactacggccggaacatcaagcagctggccagccgggcccagggcctgctgtctgcaggccaccctgagggggaacagatcatcagacttcaggggcaagtggacaagcactacgcagggctgaaggacgtggcggaagagcgcaagcgcaagctggagaacatgtaccacctgttccagctcaagcgggagaccgacgacctggagcagtggatttcagaaaaggagctagtggcctcttccccggaaatggggcaagactttgaccacgtgactcttctgcgggacaagttccgggactttgcccgggagaccggggcgattgggcaggagcgggtggacaatgtgaatgccttcatcgagcgactcatcgacgcgggccacagcgaggcggccaccatcgccgagtggaaggacgggctgaacgagatgtgggcagacctcctggagctcattgacacgcgcatgcagctgctggccgcctcctatgacctgcaccgctacttctacacgggtgccgagatcctgggcctcatcgacgagaagcaccgcgagctgcccgaggacgtggggctggacgccagcacggccgagtccttccaccgggtgcacacagccttcgagcgggagctccacctgctgggtgtccaggtgcagcagttccaggacgtggccacccgtctgcagacagcatatgctggggagaaggcagaggccatccagaacaaggagcaggaggtgtctgccgcgtggcaggcgctgctcgatgcctgtgccgggcgccggacccagctagtggacacggcggataaattccgcttcttcagcatggcccgtgacctcctctcctggatggagagcatcatccggcagatcgagacccaggagaggcccagggatgtctcctctgtggaactgctcatgaagtatcaccagggcatcaatgcagagattgaaacccggagcaagaacttcagtgcctgcctggagcttggcgagtccctgctgcagcggcagcaccaggcctcagaggagatccgcgagaaactgcagcaggtgatgtccaggaggaaagagatgaatgagaagtgggaagcccgctgggagcggctccgcatgttgctggaggtgtgccagttctcgagggatgcctctgtggctgaggcgtggctgattgcccaggagccctacctggccagcggggactttggacacacagtggacagtgtggagaagctcatcaagaggcatgaggcttttgagaagtccacggccagctgggcagagcgctttgctgccctggagaagcccaccacgcttgagctgaaagaacgccagattgcagagagacccgcagaggagactgggcctcaagaggaggaaggcgagacagcaggggaggctccagtttcccaccatgcggccaccgagagaacgtccccgggggaagaagagggaacgtggcctcagaacctgcagcagccaccaccgccgggtcagcacaaggatgggcagaaatccactggggatgagaggcccaccacggagcccctctttaaggtcctagatacgcctctgagcgagggtgatgagcccgcaacgctgccggccccgcgggaccatgggcagagtgtgcagatggaaggctacctgggccgcaagcatgacctggaggggcccaacaagaaggcttccaacaggtcctggaacaacctgtactgtgtgctcaggaacagtgagctaaccttctacaaggatgccaagaacctggccctggggatgccctaccatggggaggaacccctggccctgagacatgccatctgtgagattgctgccaactacaagaagaagaagcacgtctttaagctgaggctgagtaatggcagcgagtggctcttccatggcaaggatgaggaggagatgctgtcctggctgcagggcgtgagcaccgccatcaacgagtcccagagcatccgcgtcaaggcgcagagcctgcccctgccttccctctccggccccgacgccagcctcggcaagaaagacaaggagaagagattcagcttcttccccaaaaagaagtagcaggtggggctggcgggcgcggcggagtcgggacgcgcagagaccgggcagcccaggccttggcctcctctcgccgccgcccgccggtcgaatcgagatgagtcgagtcgcgggccgggcccccgggccccacgctgcactgcaaaagctgccttcgcccgcgtgtcctgggccgacgccccctccatgccctcgcccgcgctggctccgctccagggacaggggctcccagctcctctggcgcctttggggcctccaggcctgggggcaggaaacggttctctgaggcacacgccctcctctcccaccctcctcctgagccgagggggcacaggccccttacccccaaccaaaaaaaaaaaaaaaaaagagctggagaaggctgatggggttcttcaaacgctgcccgttcctaaagcaagtcttgcttcgggtcacctcccacctggtggcagccagggaaaggggaaaggaagaagacactggaaatgcatggccagccccctaggggcatgaggaaggagccttcaggtggcccacaaagccctagctctgggccaggggctctggggggctgaggggaccagactgggtgcagggccttgggagctgccagcctccttcccactgggcttccgcagaactgggactctcacttcaggggccaccacatccctcctctctgcttctccccccagatcaaagggtaccctcccacggttggcagggcctggctgagtgcctctagcaccctttgtgccaccacaggcggtcccaggaagggcagcaaggtcagaccattcctcattgaaaaccgtggctagggcacagggctctgatctgaaggagtgacaggtgcgtcacaacactgcctaaggctctccctctcaatgctgggaccctcgccccactcccagtggcagccaaaccagcaatatccaacagacataggccccctacgggacagtgtgggcccccagatataagatggataccccccgcacctgcagtaaagcatcccaaagccaaatgctcaattgcatcctgtctgcagctgggactttggagggtaatggctgggcagacagtaaagttgatcatctgttttctcggggtggcagacgcagccatgtcttggtatcaccacccatgtgacagctactcctgcacaactgggacaaatgtcagggccagagccatgaaggtgtggtaccccttgatcagcttctccacgtcctggccccaggtcttggcggggagggggtcacatgagtacagaggtcaaatatctaccaccctccagccctgagcaccagaagctctgcaaccaacgtccccaggaatggccttccccttgctgctcaggtcatacttctggaggaagagaaagctcattccatattttccccaccactctactccgaaagcaacacagttctggcccagtatcaaactagggttaggtccaagagagcagtcaagcgggtcgggggtgggggggagggcggagggcagcaggcattttcccccaaggaaaccatgaaagtccccagggcctgcagtcaagtttctatcaccttccccgtgagaaggaccttagttccatggagatgaagtgggtgaggttcaggtagaagccacaggggcaggcatccagaatgaggccccctgaggaaccctgagtgctgaccagtgccggcagaaatcagttccaccctgtggccctgacactatatgtcagggtgacaccaactgcagcaggcaggagccacaggaaggaagacgtcatccgatggagcctgacatccccaggttcccgccctggtgagcaaggtcttcatttggctttggtacatatgaccctatacagggaacctagtgtgtatcactcaccagcctctttctgtatctggggaaaccaaggcagtgaggtgactgcactcacctagcaataaagtaggcctttggtgcacttgcaggcatgtcctcctctggggcagagagcaggttccttgctgaagggcagatggtggcaaacatctccctcaactgtttccctgggccagtctttagggagcctagggacaagggcccaccctcccccttccacgtgtgccaaatcagcacctgaagtgaggcatttccagcaagcaactccacagacccgagaaaggaagggctctagtggaagagctagcatctcaccaccccaggtcccctggcctggtccagggcagccagctgcatgtgaccattctgttgccagctccccacacatccctcctgtcacccaggctccaagacattcgaccaactagactgaaaatgcaggcatccagctttgggagaccctgtgtgtgccacaccagggctaagctctcccagtgccctagcaaggtctttttttttttttctctccttattctactctacagtcttttgacagtattcccaaacgaggttgacacagctccagtccacaccagcataccaggcttccttcccagggcagtttagaggaagctccttctgggcaaggtcaggcggtcctccttccctctctccttcccctttgtcccagcctcaactgactctggctgtgggaggtgtggagggtccttaggcttccctccccaacctggcctccaccaacacccctaacaggaggcccgtggaaggctcagcctctcctccgcatccctcctccttcctgcctatcggagggagccagggtcccctaggctgaccctgaatcctcttcctcccttcatgggaggggggcaggaatccagaggaggatgaagccagcgggaccacatggcttggtggcttggacaaacaagctcagggaggaaatgaggaggcggcggctgcagaggaatgcaaccctgttgggcacagaccatgcaatctggggctggccctggggccagctgggtcctgtcctccacctgctcaaccgtgcttccaccaaccagaggaaacccatttactagtttttctaataaatcaataatgctcc

SEQ ID NO: 29652 - DNA, 10063 bp, Homo sapiens; identical to SEQ ID NO: 29651
  source 1..10063: mol_type = unassigned DNA

SEQ ID NO: 29653 - DNA, 6768 bp, Homo sapiens
  source 1..6768: mol_type = unassigned DNA
cgccacccccgggctcggggtggcccccgcttcagtcccagggcagggatccttccatgaagactgaggcaggcggagctgctaagagcctgctgacatgacatcggccacagagtttgaaaatgtgggcaaccagccaccttacagcaggatcaatgcccgctgggacgccccagacgacgagctggataatgacaacagctcagccaggctctttgagaggtcccggataaaggccttggcagatgagcgggaagttgttcagaaaaagaccttcacgaaatgggtgaactcgcacctggctcgagtgtcctgccgcatcaccgatctctacaaggacctgcgggatgggcgcatgctcatcaagctgctggaggtgctctctggagagatgctgccaaagcccaccaaggggaagatgcgcatccactgcctggagaatgtggacaaggctctccagttcctcaaggagcagcgtgtacacctggagaacatgggctcccacgacattgtagatggcaaccaccgcctggtcctgggcctcatctggaccatcatcctccgcttccagattcaggacattgtggtccaaactcaggaaggtcgtgaaacacgctcagccaaggatgcgttgctgttgtggtgtcagatgaagacggcaggctaccctcatgttaatgtcaccaactttacctccagctggaaggatggcttggcctttaatgccctgatacacaagcaccggcccgacctgatcgactttgataagctgaaggactccaatgcccggcacaacctggagcacgcattcaatgtggctgagcgccagctgggcatcatcccgctcctcgaccccgaagatgtctttacggaaaaccctgatgagaaatccatcatcacctatgtggtggccttttaccactacttctccaagatgaaggtgctggcagtggagggcaagcgtgtcggcaaggttattgaccatgccattgagactgagaagatgattgaaaagtacagcgggctagcctcggacctgctcacctggatcgagcagaccatcactgtcctgaacagccgcaagtttgccaactcgctgacgggcgtccagcagcagctgcaggccttcagcacctaccgcaccgtggagaagccgcccaagtttcaagagaaggggaatctggaagttctactttttaccatccagtcccggatgagagccaacaatcagaaagtgtacacaccccacgatgggaaactagtgtctgacatcaacagggcctgggaaagcctggaggaagctgagtatcggcgggagctggccctgagaaatgagctcattcggcaggagaagctagagcaactggcccggcgctttgaccggaaggccgcaatgagagagacctggctcagtgaaaaccagcgcctcgtggcccaggataactttgggtatgacctggcagctgtggaggccgccaagaagaagcatgaggccatcgagaccgacacggctgcctacgaggagcgggtgagagccctggaggacctggctcaggagctggagaaagagaactaccatgaccagaagcgcatcacggcccgcaaggacaatatactgcgcctatggagctacctgcaggagctgctgcagtcccggcgccagaggctcgagaccaccctggcactgcagaagctcttccaggacatgctgcacagcatcgactggatggatgagatcaaggctcacctcttgtctgccgagtttgggaagcacttgttggaggttgaagacctgctacagaagcacaagttgatggaagctgacatcgccatccaaggggacaaagtgaaggccatcaccgcagccaccctgaagttcaccgaggggaaagggtaccagccttgtgacccccaggtcatccaggaccgcatcagccacttggagcagtgctttgaggagctgagcaacatggcagctgggcggaaggcccaactggagcagtccaaacgactctggaagttcttctgggagatggatgaggctgagagctggatcaaggagaaggagcagatctattcttccctggactatggcaaagacctgaccagtgtgctcatcttacagcgcaagcacaaggcctttgaggatgagctccgtgggctggatgctcacctggagcagatcttccaggaggctcatggcatggttgcgcgcaagcagtttgggcacccgcagatcgaggcccgcataaaggaggtgtcggcacagtgggaccagctgaaggacctggctgccttctgcaagaagaacctccaggatgctgagaactttttccagttccagggcgatgcggatgacctgaaggcttggctgcaagacgcccaccggctgctctctggtgaagatgtggggcaggacgaaggggccacgcgggccctggggaaaaagcacaaggacttcctggaggagctggaggagagccgtggggtgatggagcacctggagcagcaggcccagggattccccgaagagtttcgggattccccagatgtgacccatcggctgcaggccctgcgggagctctaccaacaggtggtggcccaggcggacctgcgtcagcagaggctgcaggaagccctggacctgtacacggtgttcggggagacagacgcctgtgagctgtggatgggagagaaggagaagtggctggccgagatggaaatgccagacaccctggaggacctggaggtcgtgcagcacaggttcgacatcctggaccaggagatgaagaccttgatgactcagattgatggtgtgaacctcgctgccaacagcttggtagagagtggccacccacgcagcagggaggtgaagcagtaccaggaccatctgaacaccaggtggcaggcatttcagaccctggtgtcggagcggcgggaggctgtggactcagccctccgagtgcacaactactgcgtagattgcgaggagaccagcaagtggatcacggacaagacaaaggtagtggagtccacaaaagacctggggcgggacctggcaggtatcatcgccatccagaggaagttgtcagggctggagcgtgacgtggccgccatccaggcccgtgtggatgccctggagcgtgagtcccagcagctgatggactcgcaccctgagcagaaggaggatattggtcagcggcaaaaacacttggaggagctgtggcagggcctgcagcaatccctgcagggccaggaggacttgctgggggaagtcagccagctgcaggccttcctgcaggatctggatgacttccaggcctggctctccatcacccagaaggctgtggcctctgaggacatgcccgaatccctcccagaggctgagcagctcctgcagcagcatgcaggtatcaaggatgagattgacgggcaccaagacagctaccagcgtgttaaggagtctggggagaaagtgatccaaggccagacggacccagagtatctgcttctgggccagcggctggagggcctggatactggctggaatgccctgggcaggatgtgggagagccgcagccacaccctcgctcagtgccttggcttccaggagttccagaaagatgccaagcaggctgaagccatcctcagcaaccaggaatacactctggctcacttggagcccccagactccctggaagctgcagaggctgggatccggaagtttgaggatttcttggggtctatggagaacaaccgggataaggtcttgagtcctgtggactctggaaacaagctggtagctgagggaaacctatactcagacaagatcaaggagaaggtgcagctgattgaggacaggcacaggaagaacaacgagaaggcccaggaggcctctgtcctactgagagacaacctggagctacagaacttcctccagaactgccaggagctcactctctggatcaacgacaagctgctgacatctcaggatgtctcctatgatgaagcacgaaaccttcacaataaatggctaaagcaccaggcgtttgtggcagagctggcttcccatgaagggtggctagagaacatcgatgcggaaggaaagcagctgatggatgagaagccccagtttacagccctggtgtcccaaaagctggaagccctgcaccggctctgggacgagctgcaggccaccacaaaggagaagacccagcacctctcggctgccaggagctccgacctgcgcttgcagacccatgctgacctcaacaagtggatcagcgccatggaggaccagctgcggtcagacgacccgggcaaggacctgaccagtgtcaatcggatgttggctaagctgaagcgagtggaggaccaagtgaatgtgcgaaaagaggagctgggggagctgtttgcccaggtgccttcaatgggagaggagggaggagatgcagacttgagcatcgagaagcggttcctggacctcctggaacccctaggaaggaggaagaagcagctggaatcatccagagccaagctgcagatcagccgggacttagaggatgagacgctttgggtggaggagaggctgcctctggcccagtcagccgactatggcactaatctgcaaactgtgcaactgttcatgaagaagaaccagacactgcagaatgagattctgggccatacgccgcgggttgaggatgtgctgcagagagggcagcagctggtggaggcggcggagatcgactgccaggaccttgaggagcgcctggggcacctgcagagctcctgggacaggctgcgggaggcagcggccgggaggctgcagcgactgagggacgccaacgaggcacagcagtactacctggatgcagacgaggctgaggcctggattggcgagcaggagctctacgtcatctccgatgagatccccaaggatgaagagggcgccattgtgatgctgaagcgacatttgcggcagcagcgtgcggtggaggactacggccggaacatcaagcagctggccagccgggcccagggcctgctgtctgcaggccaccctgagggggaacagatcatcagacttcaggggcaagtggacaagcactacgcagggctgaaggacgtggcggaagagcgcaagcgcaagctggagaacatgtaccacctgttccagctcaagcgggagaccgacgacctggagcagtggatttcagaaaaggagctagtggcctcttccccggaaatggggcaagactttgaccacgtgactcttctgcgggacaagttccgggactttgcccgggagaccggggcgattgggcaggagcgggtggacaatgtgaatgccttcatcgagcgactcatcgacgcgggccacagcgaggcggccaccatcgccgagtggaaggacgggctgaacgagatgtgggcagacctcctggagctcattgacacgcgcatgcagctgctggccgcctcctatgacctgcaccgctacttctacacgggtgccgagatcctgggcctcatcgacgagaagcaccgcgagctgcccgaggacgtggggctggacgccagcacggccgagtccttccaccgggtgcacacagccttcgagcgggagctccacctgctgggtgtccaggtgcagcagttccaggacgtggccacccgtctgcagacagcatatgctggggagaaggcagaggccatccagaacaaggagcaggaggtgtctgccgcgtggcaggcgctgctcgatgcctgtgccgggcgccggacccagctagtggacacggcggataaattccgcttcttcagcatggcccgtgacctcctctcctggatggagagcatcatccggcagatcgagacccaggagaggcccagggatgtctcctctgtggaactgctcatgaagtatcaccagggcatcaatgcagagattgaaacccggagcaagaacttcagtgcctgcctggagcttggcgagtccctgctgcagcggcagcaccaggcctcagaggagatccgcgagaaactgcagcaggtgatgtccaggaggaaagagatgaatgagaagtgggaagcccgctgggagcggctccgcatgttgctggaggtgtgccagttctcgagggatgcctctgtggctgaggcgtggctgattgcccaggagccctacctggccagcggggactttggacacacagtggacagtgtggagaagctcatcaagaggcatgaggcttttgagaagtccacggccagctgggcagagcgctttgctgccctggagaagcccaccacgcttgagctgaaagaacgccagattgcagagagacccgcagaggagactgggcctcaagaggaggaaggcgagacagcaggggaggctccagtttcccaccatgcggccaccgagagaacgtccccggtcagtctctggtctcgtttgtctagttcctgggagtcactgcagccagagccctctcacccctactaggctcagcccaggtggaggcgagatgagctggcgcagccccgccctccatcctccccacatccctgcagccacctcccagcagagcaggctacgtcctcactgaggtgttcttcatgagagtactagcctcctccactcctccccacagcgcagaggaaacaggccagcccagtgacatgacgttattagttttgttttacctaatgtaataaattttattgtataaatatatcaccatttacatgaggggaaacact

SEQ ID NO: 29654 - DNA, 7481 bp, Homo sapiens
  source 1..7481: mol_type = unassigned DNA
gtgccaggagccccgcgctgccctcctccccctgcgccgccgccgccgccacccccgggctcggggtggcccccgcttcagtcccagggcagggatccttccatgaagactgaggcaggcggagctgctaagagcctgctgacatgacatcggccacagagtttgaaaatgtgggcaaccagccaccttacagcaggatcaatgcccgctgggacgccccagacgacgagctggataatgacaacagctcagccaggctctttgagaggtcccggataaaggccttggcagatgagcgggaagttgttcagaaaaagaccttcacgaaatgggtgaactcgcacctggctcgagtgtcctgccgcatcaccgatctctacaaggacctgcgggatgggcgcatgctcatcaagctgctggaggtgctctctggagagatgctgccaaagcccaccaaggggaagatgcgcatccactgcctggagaatgtggacaaggctctccagttcctcaaggagcagcgtgtacacctggagaacatgggctcccacgacattgtagatggcaaccaccgcctggtcctgggcctcatctggaccatcatcctccgcttccagattcaggacattgtggtccaaactcaggaaggtcgtgaaacacgctcagccaaggatgcgttgctgttgtggtgtcagatgaagacggcaggctaccctcatgttaatgtcaccaactttacctccagctggaaggatggcttggcctttaatgccctgatacacaagcaccggcccgacctgatcgactttgataagctgaaggactccaatgcccggcacaacctggagcacgcattcaatgtggctgagcgccagctgggcatcatcccgctcctcgaccccgaagatgtctttacggaaaaccctgatgagaaatccatcatcacctatgtggtggccttttaccactacttctccaagatgaaggtgctggcagtggagggcaagcgtgtcggcaaggttattgaccatgccattgagactgagaagatgattgaaaagtacagcgggctagcctcggacctgctcacctggatcgagcagaccatcactgtcctgaacagccgcaagtttgccaactcgctgacgggcgtccagcagcagctgcaggccttcagcacctaccgcaccgtggagaagccgcccaagtttcaagagaaggggaatctggaagttctactttttaccatccagtcccggatgagagccaacaatcagaaagtgtacacaccccacgatgggaaactagtgtctgacatcaacagggcctgggaaagcctggaggaagctgagtatcggcgggagctggccctgagaaatgagctcattcggcaggagaagctagagcaactggcccggcgctttgaccggaaggccgcaatgagagagacctggctcagtgaaaaccagcgcctcgtggcccaggataactttgggtatgacctggcagctgtggaggccgccaagaagaagcatgaggccatcgagaccgacacggctgcctacgaggagcgggtgagagccctggaggacctggctcaggagctggagaaagagaactaccatgaccagaagcgcatcacggcccgcaaggacaatatactgcgcctatggagctacctgcaggagctgctgcagtcccggcgccagaggctcgagaccaccctggcactgcagaagctcttccaggacatgctgcacagcatcgactggatggatgagatcaaggctcacctcttgtctgccgagtttgggaagcacttgttggaggttgaagacctgctacagaagcacaagttgatggaagctgacatcgccatccaaggggacaaagtgaaggccatcaccgcagccaccctgaagttcaccgaggggaaagggtaccagccttgtgacccccaggtcatccaggaccgcatcagccacttggagcagtgctttgaggagctgagcaacatggcagctgggcggaaggcccaactggagcagtccaaacgactctggaagttcttctgggagatggatgaggctgagagctggatcaaggagaaggagcagatctattcttccctggactatggcaaagacctgaccagtgtgctcatcttacagcgcaagcacaaggcctttgaggatgagctccgtgggctggatgctcacctggagcagatcttccaggaggctcatggcatggttgcgcgcaagcagtttgggcacccgcagatcgaggcccgcataaaggaggtgtcggcacagtgggaccagctgaaggacctggctgccttctgcaagaagaacctccaggatgctgagaactttttccagttccagggcgatgcggatgacctgaaggcttggctgcaagacgcccaccggctgctctctggtgaagatgtggggcaggacgaaggggccacgcgggccctggggaaaaagcacaaggacttcctggaggagctggaggagagccgtggggtgatggagcacctggagcagcaggcccagggattccccgaagagtttcgggattccccagatgtgacccatcggctgcaggccctgcgggagctctaccaacaggtggtggcccaggcggacctgcgtcagcagaggctgcaggaagccctggacctgtacacggtgttcggggagacagacgcctgtgagctgtggatgggagagaaggagaagtggctggccgagatggaaatgccagacaccctggaggacctggaggtcgtgcagcacaggttcgacatcctggaccaggagatgaagaccttgatgactcagattgatggtgtgaacctcgctgccaacagcttggtagagagtggccacccacgcagcagggaggtgaagcagtaccaggaccatctgaacaccaggtggcaggcatttcagaccctggtgtcggagcggcgggaggctgtggactcagccctccgagtgcacaactactgcgtagattgcgaggagaccagcaagtggatcacggacaagacaaaggtagtggagtccacaaaagacctggggcgggacctggcaggtatcatcgccatccagaggaagttgtcagggctggagcgtgacgtggccgccatccaggcccgtgtggatgccctggagcgtgagtcccagcagctgatggactcgcaccctgagcagaaggaggatattggtcagcggcaaaaacacttggaggagctgtggcagggcctgcagcaatccctgcagggccaggaggacttgctgggggaagtcagccagctgcaggccttcctgcaggatctggatgacttccaggcctggctctccatcacccagaaggctgtggcctctgaggacatgcccgaatccctcccagaggctgagcagctcctgcagcagcatgcaggtatcaaggatgagattgacgggcaccaagacagctaccagcgtgttaaggagtctggggagaaagtgatccaaggccagacggacccagagtatctgcttctgggccagcggctggagggcctggatactggctggaatgccctgggcaggatgtgggagagccgcagccacaccctcgctcagtgccttggcttccaggagttccagaaagatgccaagcaggctgaagccatcctcagcaaccaggaatacactctggctcacttggagcccccagactccctggaagctgcagaggctgggatccggaagtttgaggatttcttggggtctatggagaacaaccgggataaggtcttgagtcctgtggactctggaaacaagctggtagctgagggaaacctatactcagacaagatcaaggagaaggtgcagctgattgaggacaggcacaggaagaacaacgagaaggcccaggaggcctctgtcctactgagagacaacctggagctacagaacttcctccagaactgccaggagctcactctctggatcaacgacaagctgctgacatctcaggatgtctcctatgatgaagcacgaaaccttcacaataaatggctaaagcaccaggcgtttgtggcagagctggcttcccatgaagggtggctagagaacatcgatgcggaaggaaagcagctgatggatgagaagccccagtttacagccctggtgtcccaaaagctggaagccctgcaccggctctgggacgagctgcaggccaccacaaaggagaagacccagcacctctcggctgccaggagctccgacctgcgcttgcagacccatgctgacctcaacaagtggatcagcgccatggaggaccagctgcggtcagacgacccgggcaaggacctgaccagtgtcaatcggatgttggctaagctgaagcgagtggaggaccaagtgaatgtgcgaaaagaggagctgggggagctgtttgcccaggtgccttcaatgggagaggagggaggagatgcagacttgagcatcgagaagcggttcctggacctcctggaacccctaggaaggaggaagaagcagctggaatcatccagagccaagctgcagatcagccgggacttagaggatgagacgctttgggtggaggagaggctgcctctggcccagtcagccgactatggcactaatctgcaaactgtgcaactgttcatgaagaagaaccagacactgcagaatgagattctgggccatacgccgcgggttgaggatgtgctgcagagagggcagcagctggtggaggcggcggagatcgactgccaggaccttgaggagcgcctggggcacctgcagagctcctgggacaggctgcgggaggcagcggccgggaggctgcagcgactgagggacgccaacgaggcacagcagtactacctggatgcagacgaggctgaggcctggattggcgagcaggagctctacgtcatctccgatgagatccccaaggatgaagagggcgccattgtgatgctgaagcgacatttgcggcagcagcgtgcggtggaggactacggccggaacatcaagcagctggccagccgggcccagggcctgctgtctgcaggccaccctgagggggaacagatcatcagacttcaggggcaagtggacaagcactacgcagggctgaaggacgtggcggaagagcgcaagcgcaagctggagaacatgtaccacctgttccagctcaagcgggagaccgacgacctggagcagtggatttcagaaaaggagctagtggcctcttccccggaaatggggcaagactttgaccacgtgactcttctgcgggacaagttccgggactttgcccgggagaccggggcgattgggcaggagcgggtggacaatgtgaatgccttcatcgagcgactcatcgacgcgggccacagcgaggcggccaccatcgccgagtggaaggacgggctgaacgagatgtgggcagacctcctggagctcattgacacgcgcatgcagctgctggccgcctcctatgacctgcaccgctacttctacacgggtgccgagatcctgggcctcatcgacgagaagcaccgcgagctgcccgaggacgtggggctggacgccagcacggccgagtccttccaccgggtgcacacagccttcgagcgggagctccacctgctgggtgtccaggtgcagcagttccaggacgtggccacccgtctgcagacagcatatgctggggagaaggcagaggccatccagaacaaggagcaggaggtgtctgccgcgtggcaggcgctgctcgatgcctgtgccgggcgccggacccagctagtggacacggcggataaattccgcttcttcagcatggcccgtgacctcctctcctggatggagagcatcatccggcagatcgagacccaggagaggcccagggatgtctcctctgtggaactgctcatgaagtatcaccagggcatcaatgcagagattgaaacccggagcaagaacttcagtgcctgcctggagcttggcgagtccctgctgcagcggcagcaccaggcctcagaggagatccgcgagaaactgcagcaggtgatgtccaggaggaaagagatgaatgagaagtgggaagcccgctgggagcggctccgcatgttgctggaggtgtgccagttctcgagggatgcctctgtggctgaggcgtggctgattgcccaggagccctacctggccagcggggactttggacacacagtggacagtgtggagaagctcatcaagaggcatgaggcttttgagaagtccacggccagctgggcagagcgctttgctgccctggagaagcccaccacgcttgagctgaaagaacgccagattgcagagagacccgcagaggagactgggcctcaagaggaggaaggcgagacagcaggggaggctccagtttcccaccatgcggccaccgagagaacgtccccgggggaagaagagggaacgtggcctcagaacctgcagcagccaccaccgccgggtcagcacaaggatgggcagaaatccactggggatgagaggcccaccacggagcccctctttaaggtcctagatacgcctctgagcgagggtgatgagcccgcaacgctgccggccccgcgggaccatgggcagagtgtgcagatggaaggctacctgggccgcaagcatgacctggaggggcccaacaagaaggcttccaacaggtcctggaacaacctgtactgtgtgctcaggaacagtgagctaaccttctacaaggatgccaagaacctggccctggggatgccctaccatggggaggaacccctggccctgagacatgccatctgtgagattgctgccaactacaagaagaagaagcacgtctttaagctgaggctgagtaatggcagcgagtggctcttccatggcaaggatgaggaggagatgctgtcctggctgcagggcgtgagcaccgccatcaacgagtcccagagcatccgcgtcaaggcgcagagcctgcccctgccttccctctccggccccgacgccagcctcggcaagaaagacaaggagaagagattcagcttcttccccaaaaagaagtagcaggtggggctggcgggcgcggcggagtcgggacgcgcagagaccgggcagcccaggccttggcctcctctcgccgccgcccgccggtcgaatcgagatgagtcgagtcgcgggccgggcccccgggccccacgctgcactgcaaaagctgccttcgcccgcgtgtcctgggccgacgccccctccatgccctcgcccgcgctggctccgctccagggacaggggctcccagctcctctggcgcctttggggcctccaggcctgggggcaggaaacggttctctgaggcacacgccctcctctcccaccctcctcctgagccgagggggcacaggccccttacccccaacc

SEQ ID NO: 29655 - DNA, 9075 bp, Homo sapiens
  source 1..9075: mol_type = unassigned DNA
ggtgtgcgcgctgcgcccgcgagctcccgggctcggcaaccgtggcatgcttaggattggccatatttaaaagttctgaagtagaacctgcgcctcctctctgcttctccctcctcctcagtaatttatttcgagcttccaggcaagggccacggaagaagggaaagcaagaaattagatgcctgtgtggtaactcctcgcggagctaaggtggactctcttgcagccaacttcccatcagatcaccctgctggacttgcagaccggaatggggctcgcctaaggagccgagcgctgcggaggctgctgcgtgttggatgggagtgggagggggctggagcgagatttccagggcgcagtcctccggggcgttacgccgggcataatggaattgcagaggacgtctagtatctccgggccgctgtcgccggcgtacacggggcaggtgccttacaactacaaccagctggaaggcagattcaagcagctgcaagatgagcgtgaagccgtgcagaagaagaccttcaccaagtgggtcaattcccaccttgcccgtgtgtcctgccggatcacagacctgtacactgaccttcgagatggacggatgctcatcaagctgctggaggtcctctctggagagaggctgcctaaacccaccaagggacgaatgcgcatccactgcttagagaatgtggacaaggcccttcagttcctgaaggagcagagagtccatcttgagaacatggggtcccatgacatcgtggatggaaaccaccggctgacccttggcctcatctggaccatcatcctgcgcttccagatccaggatatcagtgtggaaactgaagacaacaaagagaagaaatctgccaaggatgcattgctgttgtggtgccagatgaagacagctgggtaccccaatgtcaacattcacaatttcaccactagctggagggacggcatggccttcaatgcactgatacacaaacaccggcctgacctgatagattttgacaaactaaagaaatctaacgcacactacaacctgcagaatgcatttaatctggcagaacagcacctcggcctcactaaactgttggaccccgaagacatcagcgtggaccatcctgatgagaagtccataatcacttatgtggtgacttattaccactacttctctaagatgaaggccttagctgttgaaggaaaacgaattggaaaggtgcttgacaatgctattgaaacagaaaaaatgattgaaaagtatgaatcacttgcctctgaccttctggaatggattgaacaaaccatcatcattctgaacaatcgcaaatttgccaattcactggtcggggttcaacagcagcttcaggcattcaacacttaccgcactgtggagaaaccacccaaatttactgagaaggggaacttggaagtgctgctcttcaccattcagagcaagatgagggccaacaaccagaaggtctacatgccccgggaggggaagctcatctctgacatcaacaaggcctgggaaagactggaaaaagcggaacacgaaagagaactggctttgcggaatgagctcataagacaggagaaactggaacagctcgcccgcagatttgatcgcaaggcagctatgagggagacttggctgagcgaaaaccagcgtctggtgtctcaggacaactttgggtttgaccttcctgcagttgaggccgccacaaaaaagcacgaggccattgagacagacattgccgcatacgaggagcgtgtgcaggctgtggtagccgtggccagggagctcgaggccgagaattaccacgacatcaagcgcatcacagcgaggaaggacaatgtcatccggctctgggaatacctactggaactgctcagggcccggagacagcggctcgagatgaacctggggctgcagaagatattccaggaaatgctctacattatggactggatggatgaaatgaaggtgctagtattgtctcaagactatggcaaacacttacttggtgtggaagacctgttacagaagcacaccctggttgaagcagacattggcatccaggcagagcgggtgagaggtgtcaatgcctccgcccagaagttcgcaacagacggggaaggttacaagccctgtgacccccaggtgatccgagaccgcgtggcccacatggagttctgttatcaagagctttgccagctggcggctgagcgcagggcccgtctggaagagtcccgccgcctctggaagttcttctgggagatggcagaagaggaaggctggatacgggagaaggagaagatcctgtcctcggacgattacgggaaagacctgaccagcgtcatgcgcctgctcagcaagcaccgggcgttcgaggacgagatgagcggccgcagtggccactttgagcaggccatcaaggaaggcgaagacatgatcgcggaggagcacttcgggtcggagaagatccgtgagaggatcatttacatccgggagcagtgggccaacctagagcagctctcggccattcggaagaagcgcctggaggaggcctccctgctgcaccagttccaggcagatgctgatgacattgatgcctggatgctggacatcctcaagattgtctccagcagcgacgtgggccacgatgagtattccacacagtctctggtcaagaaacacaaggacgtggcggaagagatcgccaattacaggcccacccttgacacgctgcacgaacaagccagcgccctcccccaggagcatgccgagtctccagacgtgaggggcaggctgtcgggcatcgaggagcggtataaggaggtggcagagctgacgcggctgcggaagcaggcactccaggacactctggccctgtacaagatgttcagcgaggctgatgcctgtgagctctggatcgacgagaaggagcagtggctcaacaacatgcagatcccagagaagctggaggatctggaggtcatccagcacagatttgagagcctagaaccagaaatgaacaaccaggcttcccgggttgcagtggtgaaccagattgcacgccagctgatgcacagcggccacccaagtgagaaggaaatcaaagcccagcaggacaaactcaacacaaggtggagccagttcagagaactggttgacaggaagaaggatgccctcctgtctgccctgagcatccagaactaccacctcgagtgcaatgaaaccaaatcctggattcgggaaaagaccaaggtcatcgagtccacccaggacctgggcaatgacctggctggcgtcatggccctgcagcgcaagctgaccggcatggagcgggacttggtggccattgaggcaaagctgagtgacctgcagaaggaggcggagaagctggagtccgagcaccccgaccaggcccaggccatcctgtctcggctggccgagatcagcgacgtgtgggaggagatgaagaccaccctgaaaaaccgagaggcctccctgggagaggccagcaagctgcagcagttcctacgggacttggacgacttccagtcctggctctctaggacccagacagcgatcgcctcggaggacatgccaaacaccctgaccgaggctgagaagctgctcacgcagcacgagaacatcaagaacgagatcgacaactacgaggaggactaccagaagatgagggacatgggcgagatggtcacccaggggcagaccgatgcccagtacatgtttctgcggcagcggctgcaggccctggacactggatggaacgagctccacaagatgtgggagaacagacaaaatctcctatcccagtcacatgcctaccagcagttcctcagagacacgaagcaagccgaagcctttcttaacaaccaggagtatgttctggctcacactgaaatgcctaccaccttggaaggagctgaagcagcaattaaaaagcaagaggacttcatgaccaccatggacgccaatgaggagaagatcaatgctgtggtggagactggccggaggctggtgagcgatgggaacatcaactcagatcgcatccaggagaaggtggactctattgatgacagacataggaagaatcgtgagacagccagtgaacttttgatgaggttgaaggacaacagggatctacagaaattcctgcaagattgtcaagagctgtctctctggatcaatgagaagatgctcacagcccaggacatgtcttacgatgaagccagaaatctgcacagtaaatggttgaagcatcaagcatttatggcagaacttgcatccaacaaagaatggcttgacaaaatcgagaaggaaggaatgcagctcatttcagaaaagcctgagacggaagctgtggtgaaggagaaactcactggtttacataaaatgtgggaagtccttgaatccactacccagacaaaggcccagcggctctttgatgcaaacaaggccgaacttttcacccagagctgtgcagatctagacaaatggctgcacggcctggagagtcagattcagtctgatgactatggcaaagacctgaccagtgtcaatatcctgctgaaaaagcaacagatgctggagaatcagatggaagtgcggaagaaggagatcgaagagctccaaagccaagcccaggccctgagtcaggaagggaagagcaccgacgaggtagacagcaagcgcctcaccgtgcagaccaagttcatggagttgctggagcccttgaacgagaggaagcataacctgctggcctccaaagagatccatcagttcaacagggatgtggaggacgagatcttgtgggttggagagaggatgcctttggcaacttccacggatcatggccacaacctccagactgtgcagctgttaataaagaaaaatcagaccctccagaaagaaatccaggggcaccagcctcgcattgacgacatctttgagaggagccaaaacatcgtcactgacagcagcagcctcagcgctgaggccatcagacagaggcttgccgacctgaagcagctgtggggtctcctcattgaggagacagagaaacgccacaggcggctggaggaggcgcacagggcccagcagtactactttgacgctgctgaggccgaagcctggatgagcgagcaggagctgtacatgatgtcagaggagaaggccaaggatgagcagagtgctgtctccatgttgaagaagcaccagatcttagaacaagctgtggaggactatgcagagaccgtgcatcagctctccaagaccagccgggccctggtggccgacagccatcctgaaagtgagcgcattagcatgcggcagtccaaagtggataaactgtacgctggtctgaaagaccttgctgaagagagaagaggcaagctggatgagagacacaggttattccagctcaaccgggaggtggacgacctggagcagtggatcgctgagagggaggtggtcgcagggtcccatgaactgggacaggactatgagcatgtcacgatgttacaagaacgattccgggagtttgcccgagacaccgggaacattgggcaggagcgcgtggacacggtcaatcacctggcagatgagctcatcaactctggacattcagatgccgccaccatcgctgaatggaaggatggcctcaatgaagcctgggccgacctcctggagctcattgacacaagaacacagattcttgccgcttcctatgaactgcacaagttttaccacgatgccaaggagatctttgggcgtatacaggacaaacacaagaaactccctgaggagcttgggagagatcagaacacagtggagaccttacagagaatgcacactacatttgagcatgacatccaggctctgggcacacaggtgaggcagctgcaggaggatgcagcccgcctccaggcggcctatgcgggtgacaaggccgacgatatccagaagcgcgagaacgaggtcctggaagcctggaagtccctcctggacgcctgtgagagccgcagggtgcggctggtggacacaggggacaagttccgcttcttcagcatggtgcgcgacctcatgctctggatggaggatgtcatccggcagatcgaggcccaggagaagccaagggatgtatcatctgttgaactcttaatgaataatcatcaaggcatcaaagctgaaattgatgcacgtaatgacagtttcacaacctgcattgaacttgggaaatccctgttggcgagaaaacactatgcatctgaggagatcaaggaaaaattactgcagttgacggaaaagaggaaagaaatgatcgacaagtgggaagaccgatgggaatggttaagactgattctggaggtccatcagttctcaagagacgccagtgtggccgaggcctggctgcttggacaggagccgtacctatccagccgagagataggccagagcgtggacgaggtggagaagctcatcaagcgccacgaggcatttgaaaagtctgcagcaacctgggatgagaggttctctgccctggaaaggctgactacattggagttactggaagtgcgcagacagcaagaggaagaggagaggaagaggcggccgccttctcccgagccgagcacgaaggtttcagaggaagccgagtcccagcagcagtgggatacttcaaaaggagaacaagtttcccaaaacggtttgccagctgaacagggatctccacgggttagttaccgctctcaaacctaccaaaactacaaaaactttaatagcagacggacagccagtgaccagccatggtctggactgtgaagttcactaccatttgtcaagaatcaccctttccaaatcctctgggttttgactttttggcttccacttcacccaaaatgttaaaatttttacttaattcatagccttccttggtttcatatttgtttgcatttaattcatgtttgagtctcttaactgatggatgcccacttgccttaaagcagcatacttattttttgtttatttattgtgagctttttactttattaagattttacagcgaaacccttacatgagtaattgaaatgaaattaaatgagattacagcataatgaagaagaaaactagaatctaacaggtatgacacattcagttattctaacagggcacagtactgtgctatatgtagccgcctttacagatgttattaacctatagtagtttactattaactaggaagactggtgtatgaggagggagacattctgtaataagattaaaacctaaagtcagctgtgtaacattccatgaaagatgcattcatttattgaagatgacaaaaaagggagtcagatatattctggaagctattttaattttaggcacacaatctcatacattttgagacccttgggtcatttattactttttacaaactagttcctctctttttttctgccaagtcctgaattgaaaactgtaggcttccttgcacagatgttgcagccagcctcaggagtaaagtgcccgctgactgctgccgccacctctgtctcgctccctgtcagtgctgctggcacgtgggacgcggcaggtgacagccgttctcagcatgttttagaagcttgcctcacagacttccatgcctctccattcagccgatgacttcagggtgtcaaactgttttaatttttcaaacaaatggaacagaagccattgtggttcatcctgattacttgaacgttgcacttggtggaccgtgcctgggagcgctcgcatgccccctggcttcagaagtcatgtcagtgtctctgtagacaaactccactgtacatcttggattaatcttctgattcattgttcattttctcaagactttttgtggaattctctgataaaggaagcttttaggatggtatctatcaggccaccagcaggaattgaaaatgttttcacaaaaatccttttccttagaaataaaagctggtgacagagatggtttccttgtaccgataaaaacaaaaccaaatccatattatacatcaaaaccttgtgagacattcacttgctcttttgccatatttagatgtgtcagtggaatcagaaacctgttttgatatgtgttctctatgagttaagtctgatttgtctttttatttcatgatgcatgtcttttttttcttttgtcaggataacgtcatatagcatcttgtttgtttttccttatctctatgtacatatctatctacttctgactgtagatgggtatatagatagatgccaagcttcttatgttctgggggtagtatgcatcattattgggtctctgccttaaaacacatcaaaattcattttagacaaaaaaacttctgctttgtctttggtcattagggagctctaatgtgtgtttgtggctccaagttacattttgtgtttcattgatctatatgtatatatgtgatgttttcatatatatatgtgtgtgtgtttaaattttgtatcatcaggactgacacccaatttgacactttttgtatctagaagaccctccaaaaaaggaaccacataagcacacaagaaaagagtgctatgatgttcttagcatttgctatcatgcctatttttatctagatttttaaatgtagcttgtcataacaaaattttaattacaattggcttgtatgagaagaaaaagtatttttattgttttgagtgatgacgcagagactcagtgaacttgaaaatagcattgcttcgtgcactttgaataccaatcaggtgttttctgtgctactagttgtcacgttgcattcatgttcacctcctgatttaagtatctcgggtgtgcccagccactaaagcactctggactaatcgctaaagagaagcaacgtggggggtggggttgcgagggatgtgttcacatgtacccatcatttgatcatagcactgtgattgcttttgatgtgtgtctctagtggtgtgctgtctgttggcatgcttaaagcacatgtccattaaaattcattttgttcctttta

SEQ ID NO: 29656 - DNA, 8482 bp, Homo sapiens
  source 1..8482: mol_type = unassigned DNA
ggaatcagtgccgctgttgccgtgcaggctgcggattcctccagtccctccctcggccgcctctcctcccggagcgagcgcgcagccctgcgcagcagcgcccactggtcccgtcctgtgagccccggccccagccgcggacagacccgcggagtcgcctcccggcccacccgcccggccgccgaggagcgggaggaggacgggaccccggcgcccccaccccatccccgggagaactctaagaaggagctgatgtggaggagcagctgagacagttcaagatgacgaccacagtagccacagactatgacaacattgagatccagcagcagtacagtgatgtcaacaaccgctgggatgtcgacgactgggacaatgagaacagctctgcgcggctttttgagcggtcccgcatcaaggctctggcagatgagcgtgaagccgtgcagaagaagaccttcaccaagtgggtcaattcccaccttgcccgtgtgtcctgccggatcacagacctgtacactgaccttcgagatggacggatgctcatcaagctgctggaggtcctctctggagagaggctgcctaaacccaccaagggacgaatgcgcatccactgcttagagaatgtggacaaggcccttcagttcctgaaggagcagagagtccatcttgagaacatggggtcccatgacatcgtggatggaaaccaccggctgacccttggcctcatctggaccatcatcctgcgcttccagatccaggatatcagtgtggaaactgaagacaacaaagagaagaaatctgccaaggatgcattgctgttgtggtgccagatgaagacagctgggtaccccaatgtcaacattcacaatttcaccactagctggagggacggcatggccttcaatgcactgatacacaaacaccggcctgacctgatagattttgacaaactaaagaaatctaacgcacactacaacctgcagaatgcatttaatctggcagaacagcacctcggcctcactaaactgttggaccccgaagacatcagcgtggaccatcctgatgagaagtccataatcacttatgtggtgacttattaccactacttctctaagatgaaggccttagctgttgaaggaaaacgaattggaaaggtgcttgacaatgctattgaaacagaaaaaatgattgaaaagtatgaatcacttgcctctgaccttctggaatggattgaacaaaccatcatcattctgaacaatcgcaaatttgccaattcactggtcggggttcaacagcagcttcaggcattcaacacttaccgcactgtggagaaaccacccaaatttactgagaaggggaacttggaagtgctgctcttcaccattcagagcaagatgagggccaacaaccagaaggtctacatgccccgggaggggaagctcatctctgacatcaacaaggcctgggaaagactggaaaaagcggaacacgaaagagaactggctttgcggaatgagctcataagacaggagaaactggaacagctcgcccgcagatttgatcgcaaggcagctatgagggagacttggctgagcgaaaaccagcgtctggtgtctcaggacaactttgggtttgaccttcctgcagttgaggccgccacaaaaaagcacgaggccattgagacagacattgccgcatacgaggagcgtgtgcaggctgtggtagccgtggccagggagctcgaggccgagaattaccacgacatcaagcgcatcacagcgaggaaggacaatgtcatccggctctgggaatacctactggaactgctcagggcccggagacagcggctcgagatgaacctggggctgcagaagatattccaggaaatgctctacattatggactggatggatgaaatgaaggtgctagtattgtctcaagactatggcaaacacttacttggtgtggaagacctgttacagaagcacaccctggttgaagcagacattggcatccaggcagagcgggtgagaggtgtcaatgcctccgcccagaagttcgcaacagacggggaaggttacaagccctgtgacccccaggtgatccgagaccgcgtggcccacatggagttctgttatcaagagctttgccagctggcggctgagcgcagggcccgtctggaagagtcccgccgcctctggaagttcttctgggagatggcagaagaggaaggctggatacgggagaaggagaagatcctgtcctcggacgattacgggaaagacctgaccagcgtcatgcgcctgctcagcaagcaccgggcgttcgaggacgagatgagcggccgcagtggccactttgagcaggccatcaaggaaggcgaagacatgatcgcggaggagcacttcgggtcggagaagatccgtgagaggatcatttacatccgggagcagtgggccaacctagagcagctctcggccattcggaagaagcgcctggaggaggcctccctgctgcaccagttccaggcagatgctgatgacattgatgcctggatgctggacatcctcaagattgtctccagcagcgacgtgggccacgatgagtattccacacagtctctggtcaagaaacacaaggacgtggcggaagagatcgccaattacaggcccacccttgacacgctgcacgaacaagccagcgccctcccccaggagcatgccgagtctccagacgtgaggggcaggctgtcgggcatcgaggagcggtataaggaggtggcagagctgacgcggctgcggaagcaggcactccaggacactctggccctgtacaagatgttcagcgaggctgatgcctgtgagctctggatcgacgagaaggagcagtggctcaacaacatgcagatcccagagaagctggaggatctggaggtcatccagcacagatttgagagcctagaaccagaaatgaacaaccaggcttcccgggttgcagtggtgaaccagattgcacgccagctgatgcacagcggccacccaagtgagaaggaaatcaaagcccagcaggacaaactcaacacaaggtggagccagttcagagaactggttgacaggaagaaggatgccctcctgtctgccctgagcatccagaactaccacctcgagtgcaatgaaaccaaatcctggattcgggaaaagaccaaggtcatcgagtccacccaggacctgggcaatgacctggctggcgtcatggccctgcagcgcaagctgaccggcatggagcgggacttggtggccattgaggcaaagctgagtgacctgcagaaggaggcggagaagctggagtccgagcaccccgaccaggcccaggccatcctgtctcggctggccgagatcagcgacgtgtgggaggagatgaagaccaccctgaaaaaccgagaggcctccctgggagaggccagcaagctgcagcagttcctacgggacttggacgacttccagtcctggctctctaggacccagacagcgatcgcctcggaggacatgccaaacaccctgaccgaggctgagaagctgctcacgcagcacgagaacatcaagaacgagatcgacaactacgaggaggactaccagaagatgagggacatgggcgagatggtcacccaggggcagaccgatgcccagtacatgtttctgcggcagcggctgcaggccctggacactggatggaacgagctccacaagatgtgggagaacagacaaaatctcctatcccagtcacatgcctaccagcagttcctcagagacacgaagcaagccgaagcctttcttaacaaccaggagtatgttctggctcacactgaaatgcctaccaccttggaaggagctgaagcagcaattaaaaagcaagaggacttcatgaccaccatggacgccaatgaggagaagatcaatgctgtggtggagactggccggaggctggtgagcgatgggaacatcaactcagatcgcatccaggagaaggtggactctattgatgacagacataggaagaatcgtgagacagccagtgaacttttgatgaggttgaaggacaacagggatctacagaaattcctgcaagattgtcaagagctgtctctctggatcaatgagaagatgctcacagcccaggacatgtcttacgatgaagccagaaatctgcacagtaaatggttgaagcatcaagcatttatggcagaacttgcatccaacaaagaatggcttgacaaaatcgagaaggaaggaatgcagctcatttcagaaaagcctgagacggaagctgtggtgaaggagaaactcactggtttacataaaatgtgggaagtccttgaatccactacccagacaaaggcccagcggctctttgatgcaaacaaggccgaacttttcacccagagctgtgcagatctagacaaatggctgcacggcctggagagtcagattcagtctgatgactatggcaaagacctgaccagtgtcaatatcctgctgaaaaagcaacagatgctggagaatcagatggaagtgcggaagaaggagatcgaagagctccaaagccaagcccaggccctgagtcaggaagggaagagcaccgacgaggtagacagcaagcgcctcaccgtgcagaccaagttcatggagttgctggagcccttgaacgagaggaagcataacctgctggcctccaaagagatccatcagttcaacagggatgtggaggacgagatcttgtgggttggagagaggatgcctttggcaacttccacggatcatggccacaacctccagactgtgcagctgttaataaagaaaaatcagaccctccagaaagaaatccaggggcaccagcctcgcattgacgacatctttgagaggagccaaaacatcgtcactgacagcagcagcctcagcgctgaggccatcagacagaggcttgccgacctgaagcagctgtggggtctcctcattgaggagacagagaaacgccacaggcggctggaggaggcgcacagggcccagcagtactactttgacgctgctgaggccgaagcctggatgagcgagcaggagctgtacatgatgtcagaggagaaggccaaggatgagcagagtgctgtctccatgttgaagaagcaccagatcttagaacaagctgtggaggactatgcagagaccgtgcatcagctctccaagaccagccgggccctggtggccgacagccatcctgaaagtgagcgcattagcatgcggcagtccaaagtggataaactgtacgctggtctgaaagaccttgctgaagagagaagaggcaagctggatgagagacacaggttattccagctcaaccgggaggtggacgacctggagcagtggatcgctgagagggaggtggtcgcagggtcccatgaactgggacaggactatgagcatgtcacgatgttacaagaacgattccgggagtttgcccgagacaccgggaacattgggcaggagcgcgtggacacggtcaatcacctggcagatgagctcatcaactctggacattcagatgccgccaccatcgctgaatggaaggatggcctcaatgaagcctgggccgacctcctggagctcattgacacaagaacacagattcttgccgcttcctatgaactgcacaagttttaccacgatgccaaggagatctttgggcgtatacaggacaaacacaagaaactccctgaggagcttgggagagatcagaacacagtggagaccttacagagaatgcacactacatttgagcatgacatccaggctctgggcacacaggtgaggcagctgcaggaggatgcagcccgcctccaggcggcctatgcgggtgacaaggccgacgatatccagaagcgcgagaacgaggtcctggaagcctggaagtccctcctggacgcctgtgagagccgcagggtgcggctggtggacacaggggacaagttccgcttcttcagcatggtgcgcgacctcatgctctggatggaggatgtcatccggcagatcgaggcccaggagaagccaagggatgtatcatctgttgaactcttaatgaataatcatcaaggcatcaaagctgaaattgatgcacgtaatgacagtttcacaacctgcattgaacttgggaaatccctgttggcgagaaaacactatgcatctgaggagatcaaggaaaaattactgcagttgacggaaaagaggaaagaaatgatcgacaagtgggaagaccgatgggaatggttaagactgattctggaggtccatcagttctcaagagacgccagtgtggccgaggcctggctgcttggacaggagccgtacctatccagccgagagataggccagagcgtggacgaggtggagaagctcatcaagcgccacgaggcatttgaaaagtctgcagcaacctgggatgagaggttctctgccctggaaaggctgactacattggagttactggaagtgcgcagacagcaagaggaagaggagaggaagaggcggccgccttctcccgagccgagcacgaaggtttcagaggaagccgagtcccagcagcagtgggatacttcaaaaggagaacaagtttcccaaaacggtttgccagctgaacagggatctccacggatggcagaaacggtggacacaagcgaaatggtcaacggcgctacagaacaaaggacgagctctaaagagtccagccccatcccctccccgacctctgatcgtaaagccaagactgccctcccagcccagagtgccgccaccttaccagccagaacccaggagacaccttcggcccagatggaaggcttcctcaatcggaaacacgagtgggaggcccacaataagaaagcctcaagcaggtcctggcacaatgtttattgtgtcataaataaccaagaaatgggtttctacaaagatgcaaagactgctgcttctggaattccctaccacagcgaggtccctgtgagtttgaaagaagctgtctgcgaagtggcccttgattacaaaaagaagaaacacgtattcaagctaagactaaatgatggcaatgagtacctcttccaagccaaagacgatgaggaaatgaacacatggatccaggctatctcttccgccatctcctctgataaacacgaggtgtctgccagcacccagagcacgccagcatccagccgcgcgcagaccctccccaccagcgtcgtcaccatcaccagcgagtccagtcccggcaagcgggaaaaggacaaagagaaagacaaagagaagcggttcagcctttttggcaaaaagaaatgaactcctttccttcacctcctgcccttctcttaccttttcagtgaaattccagcatgcaagctcagaaccaacacattactctctgtgcctaatgttcctcaatgtggttgatttttttttttttttaatttatagagcatttcggggggggtgggggaaacacacctaaacactttatctccaagttacaaaagtttgaggtgcagagggaaggccagattttttttttaatgaaattatatagattagatctcagtatttaaactgttcctcaattttgtgaggctgtgttggaaataacccgcctctagtgctgttggtatgcaaggcagcggtgcttaatcaatatttcctgtgctcaccagaggcaaaatgtaccaatatcctgacaccattctctctccatttacttctggtggttaccctgactcttgactcttagaagtgcccgagatggggctaacctttattaaacagatcgcatattatgatcttgctgcagccacagtgcagctccacattaactctacagaccaaaccatttgtatctggcatcacttactaacacacgacatgcggcttttctgcatcaactgctatgacggttaagaatgtcagtatacaagaaggaatagaaaactgatactgttttaaataatctgtaatttcaattttttttttttgctgaaatacattatattgtacgtttgagataattctagtacaaagtataataaaactagatgtataataaaccctttaaatcattggtaagtgtacaagtggtggaactgaagcatttactggacaaagtaatgttactctaatggttacttgctcgtgcgttgccacactgtgttataatttgcttcatttccttgctatttgatacatagtgtgcatttctctgtcactgtaactattgtaatgacaaattttcatcttactgcacaatcaaaatgacattgataggaatgaactccagaggctgggcctgaacagggaggtggtcgctcaggcctggtgctcagtcgtacgacctgtacctctcaacttttgccctatctgttaaatatatgctatgtcattaaatgcttttaaatcta

SEQ ID NO: 29657 - DNA, 2164 bp, Homo sapiens
  source 1..2164: mol_type = unassigned DNA
cttcaacaggtttgtctcagcgcagggaccctccgggcctgctttggaactctaagaaggagctgatgtggaggagcagctgagacagttcaagatgacgaccacagtagccacagactatgacaacattgagatccagcagcagtacagtgatgtcaacaaccgctgggatgtcgacgactgggacaatgagaacagctctgcgcggctttttgagcggtcccgcatcaaggctctggcagatgagcgtgaagccgtgcagaagaagaccttcaccaagtgggtcaattcccaccttgcccgtgtgtcctgccggatcacagacctgtacactgaccttcgagatggacggatgctcatcaagctgctggaggtcctctctggagagaggctgcctaaacccaccaagggacgaatgcgcatccactgcttagagaatgtggacaaggcccttcagttcctgaaggagcagagagtccatcttgagaacatggggtcccatgacatcgtggatggaaaccaccggctgacccttggcctcatctggaccatcatcctgcgcttccagatccaggatatcagtgtggaaactgaagacaacaaagagaagaaatctgccaaggatgcattgctgttgtggtgccagatgaagacagctgggtaccccaatgtcaacattcacaatttcaccactagctggagggacggcatggccttcaatgcactgatacacaaacaccggcctgacctgatagattttgacaaactaaagaaatctaacgcacactacaacctgcagaatgcatttaatctggcagaacagcacctcggcctcactaaactgttggaccccgaagacatcagcgtggaccatcctgatgagaagtccataatcacttatgtggtgacttattaccactacttctctaagatgaaggccttagctgttgaaggaaaacgaattggaaaggtgcttgacaatgctattgaaacagaaaaaatgattgaaaagtatgaatcacttgcctctgaccttctggaatggattgaacaaaccatcatcattctgaacaatcgcaaatttgccaattcactggtcggggttcaacagcagcttcaggcattcaacacttaccgcactgtggagaaaccacccaaatttactgagaaggggaacttggaagtgctgctcttcaccattcagagcaagatgagggccaacaaccagaaggtctacatgccccgggaggggaagctcatctctgacatcaacaaggcctgggaaagactggaaaaagcggaacacgaaagagaactggctttgcggaatgagctcataagacaggagaaactggaacagctcgcccgcagatttgatcgcaaggcagctatgagggagacttggctgagcgaaaaccagcgtctggtgtctcaggacaactttgggtttgaccttcctgcagttgaggccgccacaaaaaagcacgaggccattgagacagacattgccgcatacgaggagcgtgtgcaggctgtggtagccgtggccagggagctcgaggccgagaattaccacgacatcaagcgcatcacagcgaggaaggacaatgtcatccggctctgggaatacctactggaactgctcagggcccggagacagcggctcgagatgaacctggggctgcagaagatattccaggaaatgctctacattatggactggatggatgaaatgaaggtgctagtattgtctcaagactatggcaaacacttacttggtgtggaagacctgttacagaagcacaccctggttgaagcagacattggcatccaggcagagcgggtgagaggtgtcaatgcctccgcccagaagttcgcaacagacggggaaggttacaagccctgtgacccccaggtgatccgagaccgcgtggcccacatggagttctgttatcaagagctttgccagctggcggctgagcgcagggcccgtctggaagagtcccgccgcctctggaagttcttctgggagatggcagaagaggaaggctggatacgggagaaggagaagatcctgtcctcggacgattacgggaaagacctgaccagcgtcatgcgcctgctcagcaagcaccgggcgttcgaggacgagatgagcggccgc

SEQ ID NO: 29658 - DNA, 7866 bp, Homo sapiens
  source 1..7866: mol_type = unassigned DNA
ccactgagcagccaaccgcagcctctggccacaaggagagcggagcacaggagcaggaagccgcctaccaccatgagcagcacgctgtcacccacagactttgacagcttggaaatccagggccagtacagtgacatcaacaaccgctgggaccttcctgactcggactgggacaatgacagcagctcggcccgcctctttgagaggtctcgcattaaggctctggcagatgaacgagaagctgtgcagaagaaaaccttcaccaagtgggtaaactcgcacctggcccgggtcacgtgccgggtgggggacctgtacagcgacctccgggacggacgcaacctgctgaggctcctcgaggtgctctcgggagagatactgccaaagcctacaaagggccgcatgcggatccactgcctggagaacgtggacaaggcactgcagttcctcaaggagcagaaagtgcacttggaaaacatgggctcccatgacattgtggacggaaaccaccgactgacccttgggctggtctggaccatcatccttcgattccagatccaagacatcagtgtggagacagaagacaacaaggagaagaagtcagccaaggatgccctgcttctgtggtgccagatgaagactgcaggttatcccaacgtcaatgtacacaacttcaccaccagctggagagatggactagctttcaacgccatcgtgcataaacaccggccagacctgctggattttgagtctctgaagaagtgtaatgcacactataatctgcagaatgcattcaatctggctgaaaaggaactgggacttaccaagctgctggatcccgaagacgtgaatgtggaccagccagatgagaagtcaatcattacctatgtggctacttactaccattacttctccaagatgaaggccctggccgtggaaggcaagagaattggcaaggtgctggaccatgccatggaggcagagcgcctggtggagaaatacgagtccctggcctcggagctgctgcagtggatcgagcaaacgatcgtgaccctcaatgaccggcagttggccaactcccttagcggggtccagaaccagctgcagtccttcaactcctaccgcaccgtggagaagccgcccaagtttaccgagaaagggaacttggaagtgctgctcttcaccatccagagcaagcttcgggccaacaaccagaaggtctacacgccccgcgagggccggctcatctcggacatcaacaaggcttgggagcggctggagaaggcggagcacgagcgtgagctggccctgcgcaccgagctcatccgccaggagaagctggagcagctggccgcccgcttcgaccgcaaggctgccatgcgggagacctggctcagcgagaaccagcgcctcgtgtcccaggacaactttgggctggagctggcagctgtcgaggcagcagtacggaagcacgaagccattgagacggacatcgtggcctacagcggccgggtgcaggcagtggacgccgtggctgcagagctggccgccgagcgctaccacgacatcaagcgcatcgccgctcggcagcacaacgtggcacggctctgggacttcttgcggcagatggtggccgcccggcgggagcggctcctcctcaacctggagctgcagaaggtgttccaggacctgctctacctcatggactggatggaagagatgaagggccggctgcagtctcaggacctgggcaggcacctagcaggagtggaggacctgctgcagctgcacgagctggtggaggcagacatcgccgtgcaggccgagagggtgcgggccgtcagcgcctctgccctgcgcttctgcaacccagggaaagagtatagaccttgcgacccgcagctggtgtcggagcgggtggccaagctagagcagagctatgaggcactgtgcgagttggcagcggcgcggcgggcccggctggaggaatcacggcggctctggcgtttcctctgggaggtgggtgaagctgaggcctgggtgcgggagcagcagcacctcctggcctcagccgacacgggccgagacctgaccggtgccctccgcctgctcaacaagcacacagccctgcggggcgagatgagcggccggctggggcccctgaagctcaccctggagcagggccagcagttggtggccgagggtcaccctggggcaagccaggcctctgcccgtgcagctgaactccaagcccagtgggagcggctagaggccctggccgaggagcgtgcccagcggctggcccaagccgccagcctctaccagttccaggccgatgcaaacgacatggaggcctggttggttgacgcactgcgcctggtgtccagccccgagctggggcacgacgagttctccacgcaggctctagccaggcagcatcgggccctggaggaggagattcgaagccaccggccaaccctggacgccttgagggaacaggcagcagccctgccccccacactgagccgcacgcccgaggtgcagagccgggtgcccaccctggagcggcactacgaggagctgcaggcccgggcaggcgagcgagcgcgggccttggaggcagccctggcgctctacaccatgctcagcgaggccggggcctgtggactctgggtggaggagaaggagcagtggctcaacgggctggccctgcctgaacgcctggaggacctggaggtcgtgcagcagaggttcgagaccctggagcctgaaatgaacacccttgcagcacaaatcaccgcggtgaatgacattgccgagcagttactgaaggccaaccccccaggcaaagaccgcattgtcaacacccaggagcagctcaaccacaggtggcagcagtttcggcgtctggcagacggcaagaaggcagctctcacctcagccctgagcatccagaactaccacttagagtgcacggagacccaggcctggatgagagagaagaccaaagtcatcgagtccacccagggcctaggcaacgatctggctggggtgctggccctgcagcgcaagctggccggcacggagcgggacctggaggccatcgccgcccgggtgggcgaactgactcgagaggcaaatgccctggctgccggccatcccgctcaggcagtggccatcaacgcccggctgagagaggtgcagaccggctgggaggacctcagggccaccatgcggcgtcgagaagagtcgctgggggaggcgcggcggctgcaggacttcttgcgcagcttggatgacttccaggcctggctaggccgcactcagactgctgtggcctctgaagaagggccggccaccctgcctgaggcagaggccctcctggcccaacatgcagccctgcggggagaggtggagcgggcccagagcgagtatagccggctgcgagccctgggcgaggaggtgacccgggaccaggctgacccccagtgcctcttcctacgacagcgactggaggccctgggaactggctgggaggagctgggccgaatgtgggagagccggcaaggtcgcctggcccaggcccacggcttccagggattcctgcgggatgctcgtcaggctgagggcgtgctcagcagccaggaatatgttctgtctcacacggagatgccagggacactccaggctgctgatgctgccattaaaaaactggaggacttcatgagcaccatggacgccaatggggaacggatccacgggctcctggaggctggccgccagctggtatctgaaggcaacatccacgccgacaagattcgggaaaaggcagactccattgagaggaggcacaagaagaatcaagacgcagcgcagcaatttctgggccgtcttcgggacaaccgggagcagcagcatttcctgcaagattgtcacgagctgaagctctggatcgacgagaagatgctgacagcccaggacgtgtcctatgacgaggcccgcaacctgcatactaagtggcagaagcaccaggcattcatggccgagctggctgccaacaaagactggctggacaaggtggacaaggaagggcgagagctcacccttgagaagccagagctgaaagccctggtgtcggagaagctgagagacctgcacaggcgctgggacgagctggagaccaccacccaagccaaggcccgcagcctctttgatgccaaccgagctgagctgtttgcccagagctgctgtgccctggagagctggctggagagcctgcaggcccagctgcactcggatgactacggcaaggacctcaccagcgtcaacatcctgctcaagaagcagcagatgctggaatgggagatggctgtgagagagaaggaggtggaggcaatccaggcccaggccaaagcactggcccaggaggaccagggtgcaggggaggtggagagaacctcgagggccgtggaggagaagttcagggccttgtgccagcccatgcgggaacgctgccggcgcctgcaggcttctcgcgagcagcaccagttccaccgcgatgtggaagatgagattttgtgggtgacagagcggctgcccatggccagctccatggagcatggcaaggacctgcccagcgtccagcttctcatgaagaaaaaccagaccctgcagaaagagattcagggccatgagccccggatcgcggacctgagggagcggcagcgtgctctaggtgcagcagcagcaggtccagagctggctgagctgcaggaaatgtggaaacgcctgggccacgagctggaacttcgagggaagcgactggaggatgccctgcgagcccagcagttctaccgcgatgccgccgaggcggaggcctggatgggcgagcaggaattacacatgatgggccaggagaaggccaaggatgagctgagtgcccaggcagaggtgaagaagcaccaggtgctggagcaagccctggccgactacgcgcagaccatccaccagctggcggccagcagccaggacatgattgaccacgagcacccagagagcactcggatatccatccgccaagcccaggtggacaagctgtatgccggcctgaaggagctggctggagagcggcgggagcgcctgcaggagcacctccggctgtgccagctccgccgcgagctggatgacctggaacagtggatccaggagcgcgaggtggtggcggcctcccacgagctgggccaggactacgagcatgtgactatgctccgagacaaattccgagagttctcccgggacacaagcaccatcggtcaggagcgcgtagatagcgccaatgcgctggccaatgggctcattgctgggggccatgctgcacgggccaccgtggccgagtggaaggacagtctcaacgaggcctgggctgacctgcttgagctgctggacacacggggtcaggtgctggccgcggcgtacgagctgcagcgcttcctgcacggggcacgccaagccctggcgcgggtgcagcacaagcagcagcagcttccggacgggactggccgcgacctcaacgctgccgaggccctgcagcgccgacactgtgcctacgagcatgacattcaggccctcagcccccaggtccagcaggtgcaggacgacggccaccggctccagaaggcctacgctggagacaaggctgaggagatcggccgccacatgcaggccgtggccgaggcctgggcccagcttcagggaagctctgccgcccgccggcagctgctgctggacaccacagacaagttccgcttcttcaaggctgtccgggaactgatgctctggatggatgaggtcaacctgcagatggatgcccaggagcgtccccgggatgtgtcctccgcggatctagtcatcaagaaccagcaaggcatcaaggcagagatagaggcccgggcagaccgcttctcctcctgcatcgacatggggaaggagctgctggccaggagccactatgcggccgaggagatctcagagaagctgtctcagctgcaggcacggcgccaggagacagctgagaagtggcaggagaagatggactggcttcagctggttttggaggtgcttgtgtttggaagagatgcagggatggcagaggcctggctctgcagccaggagccactggtgcgcagcgctgagctgggttgcacggtcgacgaagttgagagcctcatcaagcggcacgaggccttccagaagtcagcagtggcctgggaggagcgattctgtgcgctggagaagcttactgcgctagaggagcgggagaaggagcgaaagagaaagagggaggaggaggagcggcggaaacagccgcctgctcccgaacccacagccagtgtgcctccaggggacctggtgggcggccagacagcttctgacaccacctgggacggaacccagccacggccaccaccatccacacaagcacccagtgttaatggagtctgcacagatggagagccctcacagcccctgctgggacaacagagacttgagcacagcagcttccccgaagggccgggacctggctcaggggacgaagccaatgggccccggggagagaggcagacccggactcggggcccggccccatctgcaatgccccagagcaggtctaccgagtcagcccatgctgccaccctgccgcctcgaggcccagagccatctgcccaggagcagatggaggggatgctgtgccgcaagcaggagatggaggccttcgggaagaaggctgccaacaggtcctggcagaacgtgtactgtgtcctgcggcgtgggagcctcggcttttacaaggatgccaaggcagccagcgcgggagtgccataccacggagaagtgcctgtcagcctggccagggcccagggcagcgtcgcctttgattaccgaaagcgcaaacatgtcttcaagctgggcttacaggatggaaaagaatatttattccaggccaaggatgaggcagagatgagctcgtggctacgggtggtgaatgcagccattgccacagcgtcttctgcctctggagagcctgaagagccggtggtgcccagcaccacccggggcatgacccgggccatgaccatgcccccagtgtcacccgtcggggctgaggggcctgttgtgctccgcagcaaagacggcagagaacgagagcgagaaaaacgcttcagcttctttaagaagaacaagtagttgggggcaaggtcccaggccaactccctccctccgttcaggaaactgccagggacagtcgacagggaccgccctcttgtcaggacaactgcctgctgctagggtctgttgccaaggtcaacccatcaccaggaactgtcactggggacgagtccatgttcccaagggcagcccttctcttctgctgtttaattccagactggtggtgggacccaggtaaccccctctcccacccccgccgacttctcccctttccccagcctcgtgcctctgtccctcaccacggtgtggacagtgccgcaccctcaacataggccatgtggggagtggctgcccctgcctcagggtcattctcctgccatgcgagggcactcgccttctgccttctggttcctcacccctcagaccagccaggaacctctcagagctgaagcaggccctgggggcagaagtgccagatgacagtcagaggcgcaggagccctccctccccacccccaccctgtaactccagctgccactccatctccagctgctctcaatggcttccaggtgtgttgttcggggacagccaccgccttgagtctggccaaggaggtgattaaacagctcagcttctctc

SEQ ID NO: 29659 - DNA, 2890 bp, Homo sapiens
  source 1..2890: mol_type = unassigned DNA
cacaaggagagcggagcacaggagcaggaagccgcctaccaccatgagcagcacgctgtcacccacagactttgacagcttggaaatccagggccagtacagtgacatcaacaaccgctgggaccttcctgactcggactgggacaatgacagcagctcggcccgcctctttgagaggtctcgcattaaggctctggcagatgaacgagaagctgtgcagaagaaaaccttcaccaagtgggtaaactcgcacctggcccgggtcacgtgccgggtgggggacctgtacagcgacctccgggacggacgcaacctgctgaggctcctcgaggtgctctcgggagagatactgccaaagcctacaaagggccgcatgcggatccactgcctggagaacgtggacaaggcactgcagttcctcaaggagcagaaagtgcacttggaaaacatgggctcccatgacattgtggacggaaaccaccgactgacccttgggctggtctggaccatcatccttcgattccagatccaagacatcagtgtggagacagaagacaacaaggagaagaagtcagccaaggatgccctgcttctgtggtgccagatgaagactgcaggttatcccaacgtcaatgtacacaacttcaccaccagctggagagatggactagctttcaacgccatcgtgcataaacaccggccagacctgctggattttgagtctctgaagaagtgtaatgcacactataatctgcagaatgcattcaatctggctgaaaaggaactgggacttaccaagctgctggatcccgaagacgtgaatgtggaccagccagatgagaagtcaatcattacctatgtggctacttactaccattacttctccaagatgaaggccctggccgtggaaggcaagagaattggcaaggtgctggaccatgccatggaggcagagcgcctggtggagaaatacgagtccctggcctcggagctgctgcagtggatcgagcaaacgatcgtgaccctcaatgaccggcagttggccaactcccttagcggggtccagaaccagctgcagtccttcaactcctaccgcaccgtggagaagccgcccaagtttaccgagaaagggaacttggaagtgctgctcttcaccatccagagcaagcttcgggccaacaaccagaaggtctacacgccccgcgagggccggctcatctcggacatcaacaaggcttgggagcggctggagaaggcggagcacgagcgtgagctggccctgcgcaccgagctcatccgccaggagaagctggagcagctggccgcccgcttcgaccgcaaggctgccatgcgggagacctggctcagcgagaaccagcgcctcgtgtcccaggacaactttgggctggagctggcagctgtcgaggcagcagtacggaagcacgaagccattgagacggacatcgtggcctacagcggccgggtgcaggcagtggacgccgtggctgcagagctggccgccgagcgctaccacgacatcaagcgcatcgccgctcggcagcacaacgtggcacggctctgggacttcttgcggcagatggtggccgcccggcgggagcggctcctcctcaacctggagctgcagaaggtgttccaggacctgctctacctcatggactggatggaagagatgaagggccggctgcagtctcaggacctgggcaggcacctagcaggagtggaggacctgctgcagctgcacgagctggtggaggcagacatcgccgtgcaggccgagagggtgcgggccgtcagcgcctctgccctgcgcttctgcaacccagggaaagagtatagaccttgcgacccgcagctggtgtcggagcgggtggccaagcttactgcgctagaggagcgggagaaggagcgaaagagaaagagggaggaggaggagcggcggaaacagccgcctgctcccgaacccacagccagtgtgcctccaggggacctggtgggcggccagacagcttctgacaccacctgggacggaacccagccacggccaccaccatccacacaagcacccagtgttaatggagtctgcacagatggagagccctcacagcccctgctgggacaacagagacttgagcacagcagcttccccgaagggccgggacctggctcaggggacgaagccaatgggccccggggagagaggcagacccggactcggggcccggccccatctgcaatgccccagagcaggtctaccgagtcagcccatgctgccaccctgccgcctcgaggcccagagccatctgcccaggagcagatggaggggatgctgtgccgcaagcaggagatggaggccttcgggaagaaggctgccaacaggtcctggcagaacgtgtactgtgtcctgcggcgtgggagcctcggcttttacaaggatgccaaggcagccagcgcgggagtgccataccacggagaagtgcctgtcagcctggccagggcccagggcagcgtcgcctttgattaccgaaagcgcaaacatgtcttcaagctgggcttacaggatggaaaagaatatttattccaggccaaggatgaggcagagatgagctcgtggctacgggtggtgaatgcagccattgccacagcgtcttctgcctctggagagcctgaagagccggtggtgcccagcaccacccggggcatgacccgggccatgaccatgcccccagtgtcacccgtcggggctgaggggcctgttgtgctccgcagcaaagacggcagagaacgagagcgagaaaaacgcttcagcttctttaagaagaacaagtagttgggggcaaggtcccaggccaactccctccctccgttcagg

SEQ ID NO: 29660 - DNA, 859 bp, Homo sapiens
  source 1..859: mol_type = unassigned DNA
tgatttgggcataattccttcctctcctaagcaggcagcagttcaccttggttaaggaccttggaccttagaccactcagacgctaacaaaccaaggagaaacccagccgtgtcaggcctagaaatgtctgcccccacccccacccccctcaagacggtgactaggccggaattctcctggttgataaatgagaggagctgagaagcgctgagatgcctgtttggagcatctgatctgtagaagacgaatcttcactgtgccatggagatgttctgggagggagagccggcccagctgcctgaaggaggacgcgagagcgaggggacgggtgagaggaatgcttagcggagacggactggaggtgcccggagaggaaaggggaacggaggctggatctcgggaaacctcgtcggcagtgtcattagaggaaggatcgcgtgtctcggggatacggattttggaggaaaagcagaatagggacaaaggagcaggaagccgcctaccaccatgagcagcacgctgtcacccacagactttgacagcttggaaatccagggccagtacagtgacatcaacaaccgctgggaccttcctgactcggactgggacaatgacagcagctcggcccgcctctttgagaggtctcgcattaaggctctggcagatgaacgagaagctgtgcagaagaaaaccttcaccaagtgggtaaactcgcacctggcccgggtcacgtgccgggtgggggacctgtacagcgacctccgggacggacgcaacctgctgaggctcctcgaggtgctctcgggagagatactgccaaagcctacaaagggccgcatgcggatccactgcctggag

SEQ ID NO: 29661 - DNA, 8085 bp, Homo sapiens
  source 1..8085: mol_type = unassigned DNA
atgagcagcacgctgtcacccacagactttgacagcttggaaatccagggccagtacagtgacatcaacaaccgctgggaccttcctgactcggactgggacaatgacagcagctcggcccgcctctttgagaggtctcgcattaaggctctggcagatgaacgagaagctgtgcagaagaaaaccttcaccaagtgggtaaactcgcacctggcccgggtcacgtgccgggtgggggacctgtacagcgacctccgggacggacgcaacctgctgaggctcctcgaggtgctctcgggagagatactgccaaagcctacaaagggccgcatgcggatccactgcctggagaacgtggacaaggcactgcagttcctcaaggagcagaaagtgcacttggaaaacatgggctcccatgacattgtggacggaaaccaccgactgacccttgggctggtctggaccatcatccttcgattccagatccaagacatcagtgtggagacagaagacaacaaggagaagaagtcagccaaggatgccctgcttctgtggtgccagatgaagactgcaggttatcccaacgtcaatgtacacaacttcaccaccagctggagagatggactagctttcaacgccatcgtgcataaacaccggccagacctgctggattttgagtctctgaagaagtgtaatgcacactataatctgcagaatgcattcaatctggctgaaaaggaactgggacttaccaagctgctggatcccgaagacgtgaatgtggaccagccagatgagaagtcaatcattacctatgtggctacttactaccattacttctccaagatgaaggccctggccgtggaaggcaagagaattggcaaggtgctggaccatgccatggaggcagagcgcctggtggagaaatacgagtccctggcctcggagctgctgcagtggatcgagcaaacgatcgtgaccctcaatgaccggcagttggccaactcccttagcggggtccagaaccagctgcagtccttcaactcctaccgcaccgtggagaagccgcccaagtttaccgagaaagggaacttggaagtgctgctcttcaccatccagagcaagcttcgggccaacaaccagaaggtctacacgccccgcgagggccggctcatctcggacatcaacaaggcttgggagcggctggagaaggcggagcacgagcgtgagctggccctgcgcaccgagctcatccgccaggagaagctggagcagctggccgcccgcttcgaccgcaaggctgccatgcgggagacctggctcagcgagaaccagcgcctcgtgtcccaggacaactttgggctggagctggcagctgtcgaggcagcagtacggaagcacgaagccattgagacggacatcgtggcctacagcggccgggtgcaggcagtggacgccgtggctgcagagctggccgccgagcgctaccacgacatcaagcgcatcgccgctcggcagcacaacgtggcacggctctgggacttcttgcggcagatggtggccgcccggcgggagcggctcctcctcaacctggagctgcagaaggtgttccaggacctgctctacctcatggactggatggaagagatgaagggccggctgcagtctcaggacctgggcaggcacctagcaggagtggaggacctgctgcagctgcacgagctggtggaggcagacatcgccgtgcaggccgagagggtgcgggccgtcagcgcctctgccctgcgcttctgcaacccagggaaagagtatagaccttgcgacccgcagctggtgtcggagcgggtggccaagctagagcagagctatgaggcactgtgcgagttggcagcggcgcggcgggcccggctggaggaatcacggcggctctggcgtttcctctgggaggtgggtgaagctgaggcctgggtgcgggagcagcagcacctcctggcctcagccgacacgggccgagacctgaccggtgccctccgcctgctcaacaagcacacagccctgcggggcgagatgagcggccggctggggcccctgaagctcaccctggagcagggccagcagttggtggccgagggtcaccctggggcaagccaggcctctgcccgtgcagctgaactccaagcccagtgggagcggctagaggccctggccgaggagcgtgcccagcggctggcccaagccgccagcctctaccagttccaggccgatgcaaacgacatggaggcctggttggttgacgcactgcgcctggtgtccagccccgagctggggcacgacgagttctccacgcaggctctagccaggcagcatcgggccctggaggaggagattcgaagccaccggccaaccctggacgccttgagggaacaggcagcagccctgccccccacactgagccgcacgcccgaggtgcagagccgggtgcccaccctggagcggcactacgaggagctgcaggcccgggcaggcgagcgagcgcgggccttggaggcagccctggcgctctacaccatgctcagcgaggccggggcctgtggactctgggtggaggagaaggagcagtggctcaacgggctggccctgcctgaacgcctggaggacctggaggtcgtgcagcagaggttcgagaccctggagcctgaaatgaacacccttgcagcacaaatcaccgcggtgaatgacattgccgagcagttactgaaggccaaccccccaggcaaagaccgcattgtcaacacccaggagcagctcaaccacaggtggcagcagtttcggcgtctggcagacggcaagaaggcagctctcacctcagccctgagcatccagaactaccacttagagtgcacggagacccaggcctggatgagagagaagaccaaagtcatcgagtccacccagggcctaggcaacgatctggctggggtgctggccctgcagcgcaagctggccggcacggagcgggacctggaggccatcgccgcccgggtgggcgaactgactcgagaggcaaatgccctggctgccggccatcccgctcaggcagtggccatcaacgcccggctgagagaggtgcagaccggctgggaggacctcagggccaccatgcggcgtcgagaagagtcgctgggggaggcgcggcggctgcaggacttcttgcgcagcttggatgacttccaggcctggctaggccgcactcagactgctgtggcctctgaagaagggccggccaccctgcctgaggcagaggccctcctggcccaacatgcagccctgcggggagaggtggagcgggcccagagcgagtatagccggctgcgagccctgggcgaggaggtgacccgggaccaggctgacccccagtgcctcttcctacgacagcgactggaggccctgggaactggctgggaggagctgggccgaatgtgggagagccggcaaggtcgcctggcccaggcccacggcttccagggattcctgcgggatgctcgtcaggctgagggcgtgctcagcagccaggaatatgttctgtctcacacggagatgccagggacactccaggctgctgatgctgccattaaaaaactggaggacttcatgagcaccatggacgccaatggggaacggatccacgggctcctggaggctggccgccagctggtatctgaaggcaacatccacgccgacaagattcgggaaaaggcagactccattgagaggaggcacaagaagaatcaagacgcagcgcagcaatttctgggccgtcttcgggacaaccgggagcagcagcatttcctgcaagattgtcacgagctgaagctctggatcgacgagaagatgctgacagcccaggacgtgtcctatgacgaggcccgcaacctgcatactaagtggcagaagcaccaggcattcatggccgagctggctgccaacaaagactggctggacaaggtggacaaggaagggcgagagctcacccttgagaagccagagctgaaagccctggtgtcggagaagctgagagacctgcacaggcgctgggacgagctggagaccaccacccaagccaaggcccgcagcctctttgatgccaaccgagctgagctgtttgcccagagctgctgtgccctggagagctggctggagagcctgcaggcccagctgcactcggatgactacggcaaggacctcaccagcgtcaacatcctgctcaagaagcagcagatgctggaatgggagatggctgtgagagagaaggaggtggaggcaatccaggcccaggccaaagcactggcccaggaggaccagggtgcaggggaggtggagagaacctcgagggccgtggaggagaagttcagggccttgtgccagcccatgcgggaacgctgccggcgcctgcaggcttctcgcgagcagcaccagttccaccgcgatgtggaagatgagattttgtgggtgacagagcggctgcccatggccagctccatggagcatggcaaggacctgcccagcgtccagcttctcatgaagaaaaaccagaccctgcagaaagagattcagggccatgagccccggatcgcggacctgagggagcggcagcgtgctctaggtgcagcagcagcaggtccagagctggctgagctgcaggaaatgtggaaacgcctgggccacgagctggaacttcgagggaagcgactggaggatgccctgcgagcccagcagttctaccgcgatgccgccgaggcggaggcctggatgggcgagcaggaattacacatgatgggccaggagaaggccaaggatgagctgagtgcccaggcagaggtgaagaagcaccaggtgctggagcaagccctggccgactacgcgcagaccatccaccagctggcggccagcagccaggacatgattgaccacgagcacccagagagcactcggatatccatccgccaagcccaggtggacaagctgtatgccggcctgaaggagctggctggagagcggcgggagcgcctgcaggagcacctccggctgtgccagctccgccgcgagctggatgacctggaacagtggatccaggagcgcgaggtggtggcggcctcccacgagctgggccaggactacgagcatgtgactatgctccgagacaaattccgagagttctcccgggacacaagcaccatcggtcaggagcgcgtagatagcgccaatgcgctggccaatgggctcattgctgggggccatgctgcacgggccaccgtggccgagtggaaggacagtctcaacgaggcctgggctgacctgcttgagctgctggacacacggggtcaggtgctggccgcggcgtacgagctgcagcgcttcctgcacggggcacgccaagccctggcgcgggtgcagcacaagcagcagcagcttccggacgggactggccgcgacctcaacgctgccgaggccctgcagcgccgacactgtgcctacgagcatgacattcaggccctcagcccccaggtccagcaggtgcaggacgacggccaccggctccagaaggcctacgctggagacaaggctgaggagatcggccgccacatgcaggccgtggccgaggcctgggcccagcttcagggaagctctgccgcccgccggcagctgctgctggacaccacagacaagttccgcttcttcaaggctgtccgggaactgatgctctggatggatgaggtcaacctgcagatggatgcccaggagcgtccccgggatgtgtcctccgcggatctagtcatcaagaaccagcaaggcatcaaggcagagatagaggcccgggcagaccgcttctcctcctgcatcgacatggggaaggagctgctggccaggagccactatgcggccgaggagatctcagagaagctgtctcagctgcaggcacggcgccaggagacagctgagaagtggcaggagaagatggactggcttcagctggttttggaggtgcttgtgtttggaagagatgcagggatggcagaggcctggctctgcagccaggagccactggtgcgcagcgctgagctgggttgcacggtcgacgaagttgagagcctcatcaagcggcacgaggccttccagaagtcagcagtggcctgggaggagcgattctgtgcgctggagaagcttactgcgctagaggagcgggagaaggagcgaaagagaaagagggaggaggaggagcggcggaaacagccgcctgctcccgaacccacagccagtgtgcctccaggggacctggtgggcggccagacagcttctgacaccacctgggacggaacccagccacggccaccaccatccacacaagcacccagtgttaatggagtctgcacagatggagagccctcacagcccctgctgggacaacagagacttgagcacagcagcttccccgaagggccgggacctggctcaggggacgaagccaatgggccccggggagagaggcagacccggactcggggcccggccccatctgcaatgccccagagcaggtctaccgagtcagcccatgctgccaccctgccgcctcgaggcccagagccatctgcccaggagcagatggaggggatgctgtgccgcaagcaggagatggaggccttcgggaagaaggctgccaacaggtcctggcagaacgtgtactgtgtcctgcggcgtgggagcctcggcttttacaaggatgccaaggcagccagcgcgggagtgccataccacggagaagtgcctgtcagcctggccagggcccagggcagcgtcgcctttgattaccgaaagcgcaaacatgtcttcaagctgggcttacaggatggaaaagaatatttattccaggccaaggatgaggtgagctgtccttcgtgttcctctctgtccgtgccattccagaagcttccagctgcagactccccttctttccctgtcctccctctttttcctggtcttgtcctttgtggtaagactggatgtgtgcgacggccgcaccaggccgcactccctgtctaagccggccacattctcctaatagcatgaaacagtcagctcactttctgcctcctcctcttacacttccctgctgtccactgcggccaactcagcacagtgtccttgaagctgattgagggtctttccatccacaggcagagatgagctcgtggctacgggtggtgaatgcagccattgccacagcgtcttctgcctctggagagcctgaagagccggtggtgcccagcaccacccggggcatgacccgggccatgaccatgcccccagtgtcacccgtcggggctgaggggcctgttgtgctccgcagcaaagacggcagagaacgagagcgagaaaaacgcttcagcttctttaagaagaacaagtagttgggggcaaggtcccaggccaactccctccctccgttcaggaaactgccagggacagtcgacagggaccgccctcttgtcaggacaactgcctgctgctagggtctgttgccaaggtcaacccatcaccaggaactgtcactggggacgagtccatgttcccaagggcagcccttctcttctgctgtttaattccagactggtggtgggacccaggtaaccccctctcccacccccgccgacttctcccctttccccagcctcgtgcctctgtccctcaccacggtgtggacagtgccgcaccctcaacataggccatgtggggagtggctgcccctgcctcagggtcattctcctgccatgcgagggcactcgccttctgccttctggttcctcacccctcagaccagccaggaacctctcagagctgaagcaggccctgggggcagaagtgccagatgacagtcagaggcgcaggagccctccctccccacccccaccctgtaactccagctgccactccatctccagctgctctcaatggcttccaggtgtgttgttcggggacagccaccgccttgagtctggccaaggaggtgattaaacagctcagcttctc

SEQ ID NO: 29662 - DNA, 8128 bp, Homo sapiens
  source 1..8128: mol_type = unassigned DNA
gatgttctgggagggagagccggcccagctgcctgaaggaggacgcgagagcgaggggacgggtgagaggaatgcttagcggagacggactggaggtgcccggagaggaaaggggaacggaggctggatctcgggaaacctcgtcggcagtgtcattagaggaaggatcgcgtgtctcggggatacggattttggaggaaaagcagaatagggacaaaggcttcccaggtggcttcccctcttcccctgggggctgatttccactgagcagccaaccgcagcctctggccacaaggagagcggagcacaggagcaggaagccgcctaccaccatgagcagcacgctgtcacccacagactttgacagcttggaaatccagggccagtacagtgacatcaacaaccgctgggaccttcctgactcggactgggacaatgacagcagctcggcccgcctctttgagaggtctcgcattaaggctctggcagatgaacgagaagctgtgcagaagaaaaccttcaccaagtgggtaaactcgcacctggcccgggtcacgtgccgggtgggggacctgtacagcgacctccgggacggacgcaacctgctgaggctcctcgaggtgctctcgggagagatactgccaaagcctacaaagggccgcatgcggatccactgcctggagaacgtggacaaggcactgcagttcctcaaggagcagaaagtgcacttggaaaacatgggctcccatgacattgtggacggaaaccaccgactgacccttgggctggtctggaccatcatccttcgattccagatccaagacatcagtgtggagacagaagacaacaaggagaagaagtcagccaaggatgccctgcttctgtggtgccagatgaagactgcaggttatcccaacgtcaatgtacacaacttcaccaccagctggagagatggactagctttcaacgccatcgtgcataaacaccggccagacctgctggattttgagtctctgaagaagtgtaatgcacactataatctgcagaatgcattcaatctggctgaaaaggaactgggacttaccaagctgctggatcccgaagacgtgaatgtggaccagccagatgagaagtcaatcattacctatgtggctacttactaccattacttctccaagatgaaggccctggccgtggaaggcaagagaattggcaaggtgctggaccatgccatggaggcagagcgcctggtggagaaatacgagtccctggcctcggagctgctgcagtggatcgagcaaacgatcgtgaccctcaatgaccggcagttggccaactcccttagcggggtccagaaccagctgcagtccttcaactcctaccgcaccgtggagaagccgcccaagtttaccgagaaagggaacttggaagtgctgctcttcaccatccagagcaagcttcgggccaacaaccagaaggtctacacgccccgcgagggccggctcatctcggacatcaacaaggcttgggagcggctggagaaggcggagcacgagcgtgagctggccctgcgcaccgagctcatccgccaggagaagctggagcagctggccgcccgcttcgaccgcaaggctgccatgcgggagacctggctcagcgagaaccagcgcctcgtgtcccaggacaactttgggctggagctggcagctgtcgaggcagcagtacggaagcacgaagccattgagacggacatcgtggcctacagcggccgggtgcaggcagtggacgccgtggctgcagagctggccgccgagcgctaccacgacatcaagcgcatcgccgctcggcagcacaacgtggcacggctctgggacttcttgcggcagatggtggccgcccggcgggagcggctcctcctcaacctggagctgcagaaggtgttccaggacctgctctacctcatggactggatggaagagatgaagggccggctgcagtctcaggacctgggcaggcacctagcaggagtggaggacctgctgcagctgcacgagctggtggaggcagacatcgccgtgcaggccgagagggtgcgggccgtcagcgcctctgccctgcgcttctgcaacccagggaaagagtatagaccttgcgacccgcagctggtgtcggagcgggtggccaagctagagcagagctatgaggcactgtgcgagttggcagcggcgcggcgggcccggctggaggaatcacggcggctctggcgtttcctctgggaggtgggtgaagctgaggcctgggtgcgggagcagcagcacctcctggcctcagccgacacgggccgagacctgaccggtgccctccgcctgctcaacaagcacacagccctgcggggcgagatgagcggccggctggggcccctgaagctcaccctggagcagggccagcagttggtggccgagggtcaccctggggcaagccaggcctctgcccgtgcagctgaactccaagcccagtgggagcggctagaggccctggccgaggagcgtgcccagcggctggcccaagccgccagcctctaccagttccaggccgatgcaaacgacatggaggcctggttggttgacgcactgcgcctggtgtccagccccgagctggggcacgacgagttctccacgcaggctctagccaggcagcatcgggccctggaggaggagattcgaagccaccggccaaccctggacgccttgagggaacaggcagcagccctgccccccacactgagccgcacgcccgaggtgcagagccgggtgcccaccctggagcggcactacgaggagctgcaggcccgggcaggcgagcgagcgcgggccttggaggcagccctggcgctctacaccatgctcagcgaggccggggcctgtggactctgggtggaggagaaggagcagtggctcaacgggctggccctgcctgaacgcctggaggacctggaggtcgtgcagcagaggttcgagaccctggagcctgaaatgaacacccttgcagcacaaatcaccgcggtgaatgacattgccgagcagttactgaaggccaaccccccaggcaaagaccgcattgtcaacacccaggagcagctcaaccacaggtggcagcagtttcggcgtctggcagacggcaagaaggcagctctcacctcagccctgagcatccagaactaccacttagagtgcacggagacccaggcctggatgagagagaagaccaaagtcatcgagtccacccagggcctaggcaacgatctggctggggtgctggccctgcagcgcaagctggccggcacggagcgggacctggaggccatcgccgcccgggtgggcgaactgactcgagaggcaaatgccctggctgccggccatcccgctcaggcagtggccatcaacgcccggctgagagaggtgcagaccggctgggaggacctcagggccaccatgcggcgtcgagaagagtcgctgggggaggcgcggcggctgcaggacttcttgcgcagcttggatgacttccaggcctggctaggccgcactcagactgctgtggcctctgaagaagggccggccaccctgcctgaggcagaggccctcctggcccaacatgcagccctgcggggagaggtggagcgggcccagagcgagtatagccggctgcgagccctgggcgaggaggtgacccgggaccaggctgacccccagtgcctcttcctacgacagcgactggaggccctgggaactggctgggaggagctgggccgaatgtgggagagccggcaaggtcgcctggcccaggcccacggcttccagggattcctgcgggatgctcgtcaggctgagggcgtgctcagcagccaggaatatgttctgtctcacacggagatgccagggacactccaggctgctgatgctgccattaaaaaactggaggacttcatgagcaccatggacgccaatggggaacggatccacgggctcctggaggctggccgccagctggtatctgaaggcaacatccacgccgacaagattcgggaaaaggcagactccattgagaggaggcacaagaagaatcaagacgcagcgcagcaatttctgggccgtcttcgggacaaccgggagcagcagcatttcctgcaagattgtcacgagctgaagctctggatcgacgagaagatgctgacagcccaggacgtgtcctatgacgaggcccgcaacctgcatactaagtggcagaagcaccaggcattcatggccgagctggctgccaacaaagactggctggacaaggtggacaaggaagggcgagagctcacccttgagaagccagagctgaaagccctggtgtcggagaagctgagagacctgcacaggcgctgggacgagctggagaccaccacccaagccaaggcccgcagcctctttgatgccaaccgagctgagctgtttgcccagagctgctgtgccctggagagctggctggagagcctgcaggcccagctgcactcggatgactacggcaaggacctcaccagcgtcaacatcctgctcaagaagcagcagatgctggaatgggagatggctgtgagagagaaggaggtggaggcaatccaggcccaggccaaagcactggcccaggaggaccagggtgcaggggaggtggagagaacctcgagggccgtggaggagaagttcagggccttgtgccagcccatgcgggaacgctgccggcgcctgcaggcttctcgcgagcagcaccagttccaccgcgatgtggaagatgagattttgtgggtgacagagcggctgcccatggccagctccatggagcatggcaaggacctgcccagcgtccagcttctcatgaagaaaaaccagaccctgcagaaagagattcagggccatgagccccggatcgcggacctgagggagcggcagcgtgctctaggtgcagcagcagcaggtccagagctggctgagctgcaggaaatgtggaaacgcctgggccacgagctggaacttcgagggaagcgactggaggatgccctgcgagcccagcagttctaccgcgatgccgccgaggcggaggcctggatgggcgagcaggaattacacatgatgggccaggagaaggccaaggatgagctgagtgcccaggcagaggtgaagaagcaccaggtgctggagcaagccctggccgactacgcgcagaccatccaccagctggcggccagcagccaggacatgattgaccacgagcacccagagagcactcggatatccatccgccaagcccaggtggacaagctgtatgccggcctgaaggagctggctggagagcggcgggagcgcctgcaggagcacctccggctgtgccagctccgccgcgagctggatgacctggaacagtggatccaggagcgcgaggtggtggcggcctcccacgagctgggccaggactacgagcatgtgactatgctccgagacaaattccgagagttctcccgggacacaagcaccatcggtcaggagcgcgtagatagcgccaatgcgctggccaatgggctcattgctgggggccatgctgcacgggccaccgtggccgagtggaaggacagtctcaacgaggcctgggctgacctgcttgagctgctggacacacggggtcaggtgctggccgcggcgtacgagctgcagcgcttcctgcacggggcacgccaagccctggcgcgggtgcagcacaagcagcagcagcttccggacgggactggccgcgacctcaacgctgccgaggccctgcagcgccgacactgtgcctacgagcatgacattcaggccctcagcccccaggtccagcaggtgcaggacgacggccaccggctccagaaggcctacgctggagacaaggctgaggagatcggccgccacatgcaggccgtggccgaggcctgggcccagcttcagggaagctctgccgcccgccggcagctgctgctggacaccacagacaagttccgcttcttcaaggctgtccgggaactgatgctctggatggatgaggtcaacctgcagatggatgcccaggagcgtccccgggatgtgtcctccgcggatctagtcatcaagaaccagcaaggcatcaaggcagagatagaggcccgggcagaccgcttctcctcctgcatcgacatggggaaggagctgctggccaggagccactatgcggccgaggagatctcagagaagctgtctcagctgcaggcacggcgccaggagacagctgagaagtggcaggagaagatggactggcttcagctggttttggaggtgcttgtgtttggaagagatgcagggatggcagaggcctggctctgcagccaggagccactggtgcgcagcgctgagctgggttgcacggtcgacgaagttgagagcctcatcaagcggcacgaggccttccagaagtcagcagtggcctgggaggagcgattctgtgcgctggagaagcttactgcgctagaggagcgggagaaggagcgaaagagaaagagggaggaggaggagcggcggaaacagccgcctgctcccgaacccacagccagtgtgcctccaggggacctggtgggcggccagacagcttctgacaccacctgggacggaacccagccacggccaccaccatccacacaagcacccagtgttaatggagtctgcacagatggagagccctcacagcccctgctgggacaacagagacttgagcacagcagcttccccgaagggccgggacctggctcaggggacgaagccaatgggccccggggagagaggcagacccggactcggggcccggccccatctgcaatgccccagagcaggtctaccgagtcagcccatgctgccaccctgccgcctcgaggcccagagccatctgcccaggagcagatggaggggatgctgtgccgcaagcaggagatggaggccttcgggaagaaggctgccaacaggtcctggcagaacgtgtactgtgtcctgcggcgtgggagcctcggcttttacaaggatgccaaggcagccagcgcgggagtgccataccacggagaagtgcctgtcagcctggccagggcccagggcagcgtcgcctttgattaccgaaagcgcaaacatgtcttcaagctgggcttacaggatggaaaagaatatttattccaggccaaggatgaggcagagatgagctcgtggctacgggtggtgaatgcagccattgccacagcgtcttctgcctctggagagcctgaagagccggtggtgcccagcaccacccggggcatgacccgggccatgaccatgcccccagtgtcacccgtcggggctgaggggcctgttgtgctccgcagcaaagacggcagagaacgagagcgagaaaaacgcttcagcttctttaagaagaacaagtagttgggggcaaggtcccaggccaactccctccctccgttcaggaaactgccagggacagtcgacagggaccgccctcttgtcaggacaactgcctgctgctagggtctgttgccaaggtcaacccatcaccaggaactgtcactggggacgagtccatgttcccaagggcagcccttctcttctgctgtttaattccagactggtggtgggacccaggtaaccccctctcccacccccgccgacttctcccctttccccagcctcgtgcctctgtccctcaccacggtgtggacagtgccgcaccctcaacataggccatgtggggagtggctgcccctgcctcagggtcattctcctgccatgcgagggcactcgccttctgccttctggttcctcacccctcagaccagccaggaacctctcagagctgaagcaggccctgggggcagaagtgccagatgacagtcagaggcgcaggagccctccctccccacccccaccctgtaactccagctgccactccatctccagctgctctcaatggcttccaggtgtgttgttcggggacagccaccgccttgagtctggccaaggaggtgattaaacagctcagcttctctcac

SEQ ID NO: 29663 - DNA, 6567 bp, Homo sapiens
  source 1..6567: mol_type = unassigned DNA
ggccgggccgggcagcggacgccgacagggagggcggtcggtcgcggcgagcagcggagacagcgacgctggcggccgcgggcccaggcctcaccttccccgatggcgcaggtaccaggggaagtggacaacatggagggcctgcctgctcctaacaacaaccctgctgcccgctgggagagtccggatcggggctgggagcgggagcagccggctgcgtccaccgcagcggcctcgctctttgagtgctcccggatcaaggccttggcagatgagcgggaagccgtgcagaagaaaaccttcaccaagtgggtgaactcgcacctcgcccgcgtgggctgccacatcggggacctctatgtggacctccgggacggcttcgtgctcacgcggctcctggaagtgctgtctggggagcagctgcccaggcccacgcgcggccgcatgcggatccactcactggagaacgtggacaaggcgctgcagtttctgaaggagcagcgcgtgcacctggagaacgtgggttcgcatgacatcgtggatgggaatcaccggctgacgctggggctggtctggaccatcatcctgcgcttccagattcaagtcatcaaaattgagactgaggacaacagagagacacgctcagccaaggatgctctgctcttgtggtgtcagatgaagacagctggttaccctgaggtaaacatccagaatttcaccaccagctggcgggatggcttggccttcaatgccctcattcaccggcacaggcctgatctcgtggacttcagcaaactcaccaagtccaatgccaactacaacctgcagagagccttccgcacagctgagcagcacctggggctggcgcggctgctggatcctgaagatgtgaacatggaggctccagatgagaagtccatcatcacctacgtggtctctttctaccactatttctccaagatgaaggctctggctgtggaggggaagcgtatcgggaaggtcttggaccaggtattggaggtggggaagatcatagaacgctacgaggagctggcggctgagctgctggcctggatccaccgcaccgtgggcctcatcagcaatcagaaatttgccaactccttaagtggggtgcagcagcaactccaggctttcacggcctattgcacgctggagaagcctgtcaagttccaggagaaggggaacctagaggtgctgctcttcagcatccagagcaaactgcgtgcctgcaaccgtcgcctctttgtgcctcgggagggctgtggcatctgggatattgacaaggcatggggtgagctggagaaggctgagcatgagcgggaggctgccctacgggctgagctgattcggcaggagaagctggaactactggcacagaggtttgaccacaaggtggctatgagggagagctggctgaatgagaaccagcgtctggtctcccaggacaactttgggtatgagctgcccgcagtggaggcagccatgaagaaacacgaagcgatcgaggcagacattgcggcctacgaggagcgggtgcagggtgtggcggagctggcccaggcattggcagccgaaggctactacgatatccggcgggtggcagcccagcgtgacagcgtcctgcgccagtgggccctgctaactgggcttgtgggtgcccggcggacacgacttgagcagaaccttgccctgcagaaggtcttccaggagatggtgtacatggtggactggatggaggagatgcaggctcagctgctgtcccgggagtgtgggcagcacctggtggaggcagacgacctgttgcagaagcatggactgctggagggagacattgccgcccagagcgagcgggtggaggctctcaatgccgctgccctgcgcttctcccagctgcagggctaccagccctgcgacccgcaggtcatctgcaaccgcgtgaaccacgtgcacggctgcctggcggagctgcaggagcaggcagcgcggcgacgcgcggagctggaggcttcgcggagcctgtgggcgctgctgcaggagctggaggaggccgagagctgggcgcgcgacaaggagcgtctcctggaggctgcgggcggcggcggtgcggcgggcgcagcgggcgcagcgggaacagcgggcggcgcgcatgacctgtccagcacagcgcgcctcctggcccagcacaagatcctgcagggcgagctgggcgggcggcgagcgttgctgcagcaggccctgcggtgtggcgaggagctggttgcggccggcggtgccgtcggcccgggagcagacaccgtgcacctggtaggcctggcggagcgcgcggcgagcgcccggcgccgctggcagaggctggaagaggcggcggcgcggcgagagcggcggctgcaggaggcgcgggcgctgcaccagttcggcgctgacctcgacgggctgctggactggcttcgcgacgcttaccgcctggcagccgccggtgacttcggccacgacgaagcttccagccgccgcctggcgcgccagcaccgcgcgctcaccggggaggtggaggcacatcgcgggcccgtgagcggcctgcggcgccagctggcgacactcgggggtgccagtggcgcagggccactggtggtggcgctgcaggtgcgcgtggtggaagcagagcagttgttcgctgaggtgaccgaagtggcggcgctgaggcgccagtggctgcgggacgcgctcgctgtctaccgcatgtttggcgaggtgcacgcgtgtgagctgtggatcggcgagaaggagcaatggctgctctccatgcgtgtgccggattcactcgacgacgtcgaggtggtgcagcaccgattcgagagcctggaccaagagatgaacagcctgatgggccgcgttctggacgtgaaccacacagtccaggagctggtggaaggaggccaccccagttcagatgaggtgcgttcctgccaggaccacctcaacagcaggtggaaccgcatcgtggagctagtggaacagcgcaaagaggaaatgagcgcggtgctgctggtggagaaccacgtgctggaggtggccgaggtgcgcgcccaggtgcgtgagaagcggagagctgtggagagcgcgccccgggccggcggcgccctgcagtggcgtcttagcggcctagaggccgctctgcaggcgctggagccgcgccaggcggcccttctggaggaggcagccctgctggctgagcgcttcccggcgcaggcggcgcggctgcaccagggcgcggaggagctgggcgccgagtggggcgcgctagctagcgcggctcaggcctgcggcgaggcggtggcggcagcagggcgcctgcagcgcttcctacatgacctcgacgctttcctggactggctcgtgcgcgcccaggaggcggcgggcggcagcgaggggcccctgcccaacagcctagaagaggcggacgcgctgctggcgcgccacgctgcgctcaaggaggaggtggaccagcgcgaggaagactatgctcgcatcgtggcggccagcgaggcgctgctggccgccgacggcgcagagctgggcccgggcctggcactagacgagtggctgccacacctcgaacttggctggcataaactgctcggcttgtgggaggcgcgcagggaggcgctggtccaggcgcacatctaccagctcttcctgcgggatctacgccaggcgctcgtggtgctgcgtaaccaggagatggcgctgtctggtgcggagctcccgggcacagtggaatcggtggaggaggccttgaaacagcaccgtgactttctcaccaccatggagctgagccagcaaaagatgcaggtggccgtgcaggctgcagagggcctgctgaggcagggcaacatctacggggagcaggctcaggaggctgtgacccggctgctggagaagaaccaagaaaaccagttacgggcccagcaatggatgcaaaagctacatgaccaacttgagctgcagcacttcctccgagactgccacgagctggatggctggatccatgagaagatgctgatggcgcgggatggcacgcgggaggacaaccacaagctgcataagagatggctccggcaccaggcattcatggccgagctggctcagaataaggagtggctggagaagatcgagcgggagggccagcaactgatgcaggagaagcccgaactggcggcctccgtgcggaagaagctgggcgagatccgccagtgctgggcggagctggagagcaccacccaggccaaggcacggcagctctttgaggccagcaaagcagaccagctggtgcagagctttgctgagctggacaagaagctccttcacatggagagccagctgcaagacgtggaccctggaggagacctggccactgtcaacagtcagctcaagaagctgcagtccatggagtcgcaggtggaggagtggtaccgcgaggtgggagagctgcaggcgcagacggcggcgctgccgctggagccggcgagcaaggagctggtgggtgagcggcagaacgcggtgggcgagcgcctggtgcgcctgctcgagccgttgcaggagcgccgccgcttgctgctggcttccaaggagttgcaccaggtggcgcacgacctggacgacgagctggcatgggttcaggagcggctgccactggccatgcagacagagcgaggcaacggtttgcaggcggtccagcagcacatcaaaaagaaccagggcctgcggcgggagatccaggcgcatgggccgcgcctggaggaggtgctggagcgcgcgggcgcgctggcgtcgctgcgcagcccggaggcagaggcagtgcgccggggcctggagcagctgcagagcgcctgggccggactgcgggaggctgccgagcgacggcagcaggtgctggacgccgccttccaggtggagcagtactacttcgacgtggctgaggtggaggcgtggctgggcgagcaggagctgctcatgatgagtgaggacaagggcaaggacgaacagagcaccctgcagctgctcaagaaacacctgcagctggagcaaggcgtggagaactacgaggaaagcatcgcgcagctgtcgcgccagtgccgggcgctgctggagatggggcacccggacagcgagcagatcagccggcggcagtctcaggtggaccgcctgtacgtggcgctcaaggagctgggtgaggagcgccgggtggctctggaacagcagtactggctgtaccagctcagccgccaggtgagcgagcttgagcactggattgccgagaaggaggtggtggctggctcacccgagctcggccaggactttgagcatgtctcggtgctgcaggagaaattctcagagtttgccagcgagacaggtatggcagggcgggaacggctggcagctgtgaaccagatggtggatgagctgatcgagtgtggccatacagcagcggccaccatggccgagtggaaggacggactgaacgaggcctgggctgagctgctggagctcatgggcacacgggcccagctgctggccgcctctcgggagcttcataagttcttcagtgacgcccgagagcttcagggacagattgaggagaagcggaggcggctgccccgcctgaccaccccgcctgagccgagacccagtgccagttccatgcagcggaccctgagagcctttgagcatgacctgcagctcctcgtgtcccaggtacggcagctgcaggagggggcggcccagctgcggacggtgtatgcgggtgaacatgccgaggccatcgctagccgggagcaggaggtgctgcagggttggaaagagctgctgtcagcctgtgaggatgcccgcctgcatgtcagctccacagccgacgccctgcgcttccacagccaagtccgcgacctgctctcctggatggatggcatcgccagccagattggggcagccgacaagcccagggacgtgtcatcagtggaggtgctcatgaactaccaccagggcctgaagactgagctggaggcgcgggtgcctgagctgaccacctgccaggagctggggcgatctctgctgctcaacaaaagtgccatggctgatgagatccaggcacagctggacaagctgggaaccaggaaggaggaggtgtcggaaaagtgggaccgccattgggagtggctgcagcagatgctggaggtgcaccagtttgcccaggaggcggtggtggctgatgcctggctgacagcccaggagccgctcctgcagagccgggagctgggcagcagcgtggatgaggtggagcagcttatccggcgacatgaggccttccgcaaagcggctgcagcctgggaagagaggttcagctctctgcggcgcctgaccacgcctaggcgggaggatcacttgaacccaggagttcaagaccagccttggcaacatactgagaagccgtctctaccaaaaccaaaagcaaacaaagaaaaaacagccaggcgtgatggcacgtgcctgtag

SEQ ID NO: 29664 - DNA, 4032 bp, Homo sapiens
  source 1..4032: mol_type = unassigned DNA
ggccgggccgggcagcggacgccgacagggagggcggtcggtcgcggcgagcagcggagacagcgacgctggcggccgcgggcccaggcctcaccttccccgatggcgcaggtaccaggggaagtggacaacatggagggcctgcctgctcctaacaacaaccctgctgcccgctgggagagtccggatcggggctgggagcgggagcagccggctgcgtccaccgcagcggcctcgctctttgagtgctcccggatcaaggccttggcagatgagcgggaagccgtgcagaagaaaaccttcaccaagtgggtgaactcgcacctcgcccgcgtgggctgccacatcggggacctctatgtggacctccgggacggcttcgtgctcacgcggctcctggaagtgctgtctggggagcagctgcccaggcccacgcgcggccgcatgcggatccactcactggagaacgtggacaaggcgctgcagtttctgaaggagcagcgcgtgcacctggagaacgtgggttcgcatgacatcgtggatgggaatcaccggctgacgctggggctggtctggaccatcatcctgcgcttccagattcaagtcatcaaaattgagactgaggacaacagagagacacgctcagccaaggatgctctgctcttgtggtgtcagatgaagacagctggttaccctgaggtaaacatccagaatttcaccaccagctggcgggatggcttggccttcaatgccctcattcaccggcacaggcctgatctcgtggacttcagcaaactcaccaagtccaatgccaactacaacctgcagagagccttccgcacagctgagcagcacctggggctggcgcggctgctggatcctgaagatgtgaacatggaggctccagatgagaagtccatcatcacctacgtggtctctttctaccactatttctccaagatgaaggctctggctgtggaggggaagcgtatcgggaaggtcttggaccaggtattggaggtggggaagatcatagaacgctacgaggagctggcggctgagctgctggcctggatccaccgcaccgtgggcctcatcagcaatcagaaatttgccaactccttaagtggggtgcagcagcaactccaggctttcacggcctattgcacgctggagaagcctgtcaagttccaggagaaggggaacctagaggtgctgctcttcagcatccagagcaaactgcgtgcctgcaaccgtcgcctctttgtgcctcgggagggctgtggcatctgggatattgacaaggcatggggtgagctggagaaggctgagcatgagcgggaggctgccctacgggctgagctgattcggcaggagaagctggaactactggcacagaggtttgaccacaaggtggctatgagggagagctggctgaatgagaaccagcgtctggtctcccaggacaactttgggtatgagctgcccgcagtggaggcagccatgaagaaacacgaagcgatcgaggcagacattgcggcctacgaggagcgggtgcagggtgtggcggagctggcccaggcattggcagccgaaggctactacgatatccggcgggtggcagcccagcgtgacagcgtcctgcgccagtgggccctgctaactgggcttgtgggtgcccggcggacacgacttgagcagaaccttgccctgcagaaggtcttccaggagatggtgtacatggtggactggatggaggagatgcaggctcagctgctgtcccgggagtgtgggcagcacctggtggaggcagacgacctgttgcagaagcatggactgctggagggagacattgccgcccagagcgagcgggtggaggctctcaatgccgctgccctgcgcttctcccagctgcagggctaccagccctgcgacccgcaggtcatctgcaaccgcgtgaaccacgtgcacggctgcctggcggagctgcaggagcaggcagcgcggcgacgcgcggagctggaggcttcgcggagcctgtgggcgctgctgcaggagctggaggaggccgagagctgggcgcgcgacaaggagcgtctcctggaggctgcgggcggcggcggtgcggcgggcgcagcgggcgcagcgggaacagcgggcggcgcgcatgacctgtccagcacagcgcgcctcctggcccagcacaagatcctgcagggcgagctgggcgggcggcgagcgttgctgcagcaggccctgcggtgtggcgaggagctggttgcggccggcggtgccgtcggcccgggagcagacaccgtgcacctggtaggcctggcggagcgcgcggcgagcgcccggcgccgctggcagaggctggaagaggcggcggcgcggcgagagcggcggctgcaggaggcgcgggcgctgcaccagttcggcgctgacctcgacgggctgctggactggcttcgcgacgcttaccgcctggcagccgccggtgacttcggccacgacgaagcttccagccgccgcctggcgcgccagcaccgcgcgctcaccggggaggtggaggcacatcgcgggcccgtgagcggcctgcggcgccagctggcgacactcgggggtgccagtggcgcagggccactggtggtggcgctgcaggtgcgcgtggtggaagcagagcagttgttcgctgaggtgaccgaagtggcggcgctgaggcgccagtggctgcgggacgcgctcgctgtctaccgcatgtttggcgaggtgcacgcgtgtgagctgtggatcggcgagaaggagcaatggctgctctccatgcgtgtgccggattcactcgacgacgtcgaggtggtgcagcaccgattcgagagcctggaccaagagatgaacagcctgatgggccgcgttctggacgtgaaccacacagtccaggagctggtggaaggaggccaccccagttcagatgaggtgcgttcctgccaggaccacctcaacagcaggtggaaccgcatcgtggagctagtggaacagcgcaaagaggaaatgagcgcggtgctgctggtggagaaccacgtgctggaggtggccgaggtgcgcgcccaggtgcgtgagaagcggagagctgtggagagcgcgccccgggccggcggcgccctgcagtggcgtcttagcggcctagaggccgctctgcaggcgctggagccgcgccaggcggcccttctggaggaggcagccctgctggctgagcgcttcccggcgcaggcggcgcggctgcaccagggcgcggaggagctgggcgccgagtggggcgcgctagctagcgcggctcaggcctgcggcgaggcggtggcggcagcagggcgcctgcagcgcttcctacatgacctcgacgctttcctggactggctcgtgcgcgcccaggaggcggcgggcggcagcgaggggcccctgcccaacagcctagaagaggcggacgcgctgctggcgcgccacgctgcgctcaaggaggaggtggaccagcgcgaggaagactatgctcgcatcgtggcggccagcgaggcgctgctggccgccgacggcgcagagctgggcccgggcctggcactagacgagtggctgccacacctcgaacttggctggcataaactgctcggcttgtgggaggcgcgcagggaggcgctggtccaggcgcacatctaccagctcttcctgcgggatctacgccaggcgctcgtggtgctgcgtaaccaggagatggcgctgtctggtgcggagctcccgggcacagtggaatcggtggaggaggccttgaaacagcaccgtgactttctcaccaccatggagctgagccagcaaaagatgcaggtggccgtgcaggctgcagagggcctgctgaggcagggcaacatctacggggagcaggctcaggaggctgtgacccggctgctggagaaatgcctcattatccatcctgctcttctgcaccctccttgggaacccccagacctccccagatccagcagctag

SEQ ID NO: 29665 - DNA, 8686 bp, Homo sapiens
  source 1..8686: mol_type = unassigned DNA
ggccgggccgggcagcggacgccgacagggagggcggtcggtcgcggcgagcagcggagacagcgacgctggcggccgcgggcccaggcctcaccttccccgatggcgcaggtaccaggggaagtggacaacatggagggcctgcctgctcctaacaacaaccctgctgcccgctgggagagtccggatcggggctgggagcgggagcagccggctgcgtccaccgcagcggcctcgctctttgagtgctcccggatcaaggccttggcagatgagcgggaagccgtgcagaagaaaaccttcaccaagtgggtgaactcgcacctcgcccgcgtgggctgccacatcggggacctctatgtggacctccgggacggcttcgtgctcacgcggctcctggaagtgctgtctggggagcagctgcccaggcccacgcgcggccgcatgcggatccactcactggagaacgtggacaaggcgctgcagtttctgaaggagcagcgcgtgcacctggagaacgtgggttcgcatgacatcgtggatgggaatcaccggctgacgctggggctggtctggaccatcatcctgcgcttccagattcaagtcatcaaaattgagactgaggacaacagagagacacgctcagccaaggatgctctgctcttgtggtgtcagatgaagacagctggttaccctgaggtaaacatccagaatttcaccaccagctggcgggatggcttggccttcaatgccctcattcaccggcacaggcctgatctcgtggacttcagcaaactcaccaagtccaatgccaactacaacctgcagagagccttccgcacagctgagcagcacctggggctggcgcggctgctggatcctgaagatgtgaacatggaggctccagatgagaagtccatcatcacctacgtggtctctttctaccactatttctccaagatgaaggctctggctgtggaggggaagcgtatcgggaaggtcttggaccaggtattggaggtggggaagatcatagaacgctacgaggagctggcggctgagctgctggcctggatccaccgcaccgtgggcctcatcagcaatcagaaatttgccaactccttaagtggggtgcagcagcaactccaggctttcacggcctattgcacgctggagaagcctgtcaagttccaggagaaggggaacctagaggtgctgctcttcagcatccagagcaaactgcgtgcctgcaaccgtcgcctctttgtgcctcgggagggctgtggcatctgggatattgacaaggcatggggtgagctggagaaggctgagcatgagcgggaggctgccctacgggctgagctgattcggcaggagaagctggaactactggcacagaggtttgaccacaaggtggctatgagggagagctggctgaatgagaaccagcgtctggtctcccaggacaactttgggtatgagctgcccgcagtggaggcagccatgaagaaacacgaagcgatcgaggcagacattgcggcctacgaggagcgggtgcagggtgtggcggagctggcccaggcattggcagccgaaggctactacgatatccggcgggtggcagcccagcgtgacagcgtcctgcgccagtgggccctgctaactgggcttgtgggtgcccggcggacacgacttgagcagaaccttgccctgcagaaggtcttccaggagatggtgtacatggtggactggatggaggagatgcaggctcagctgctgtcccgggagtgtgggcagcacctggtggaggcagacgacctgttgcagaagcatggactgctggagggagacattgccgcccagagcgagcgggtggaggctctcaatgccgctgccctgcgcttctcccagctgcagggctaccagccctgcgacccgcaggtcatctgcaaccgcgtgaaccacgtgcacggctgcctggcggagctgcaggagcaggcagcgcggcgacgcgcggagctggaggcttcgcggagcctgtgggcgctgctgcaggagctggaggaggccgagagctgggcgcgcgacaaggagcgtctcctggaggctgcgggcggcggcggtgcggcgggcgcagcgggcgcagcgggaacagcgggcggcgcgcatgacctgtccagcacagcgcgcctcctggcccagcacaagatcctgcagggcgagctgggcgggcggcgagcgttgctgcagcaggccctgcggtgtggcgaggagctggttgcggccggcggtgccgtcggcccgggagcagacaccgtgcacctggtaggcctggcggagcgcgcggcgagcgcccggcgccgctggcagaggctggaagaggcggcggcgcggcgagagcggcggctgcaggaggcgcgggcgctgcaccagttcggcgctgacctcgacgggctgctggactggcttcgcgacgcttaccgcctggcagccgccggtgacttcggccacgacgaagcttccagccgccgcctggcgcgccagcaccgcgcgctcaccggggaggtggaggcacatcgcgggcccgtgagcggcctgcggcgccagctggcgacactcgggggtgccagtggcgcagggccactggtggtggcgctgcaggtgcgcgtggtggaagcagagcagttgttcgctgaggtgaccgaagtggcggcgctgaggcgccagtggctgcgggacgcgctcgctgtctaccgcatgtttggcgaggtgcacgcgtgtgagctgtggatcggcgagaaggagcaatggctgctctccatgcgtgtgccggattcactcgacgacgtcgaggtggtgcagcaccgattcgagagcctggaccaagagatgaacagcctgatgggccgcgttctggacgtgaaccacacagtccaggagctggtggaaggaggccaccccagttcagatgaggtgcgttcctgccaggaccacctcaacagcaggtggaaccgcatcgtggagctagtggaacagcgcaaagaggaaatgagcgcggtgctgctggtggagaaccacgtgctggaggtggccgaggtgcgcgcccaggtgcgtgagaagcggagagctgtggagagcgcgccccgggccggcggcgccctgcagtggcgtcttagcggcctagaggccgctctgcaggcgctggagccgcgccaggcggcccttctggaggaggcagccctgctggctgagcgcttcccggcgcaggcggcgcggctgcaccagggcgcggaggagctgggcgccgagtggggcgcgctagctagcgcggctcaggcctgcggcgaggcggtggcggcagcagggcgcctgcagcgcttcctacatgacctcgacgctttcctggactggctcgtgcgcgcccaggaggcggcgggcggcagcgaggggcccctgcccaacagcctagaagaggcggacgcgctgctggcgcgccacgctgcgctcaaggaggaggtggaccagcgcgaggaagactatgctcgcatcgtggcggccagcgaggcgctgctggccgccgacggcgcagagctgggcccgggcctggcactagacgagtggctgccacacctcgaacttggctggcataaactgctcggcttgtgggaggcgcgcagggaggcgctggtccaggcgcacatctaccagctcttcctgcgggatctacgccaggcgctcgtggtgctgcgtaaccaggagatggcgctgtctggtgcggagctcccgggcacagtggaatcggtggaggaggccttgaaacagcaccgtgactttctcaccaccatggagctgagccagcaaaagatgcaggtggccgtgcaggctgcagagggcctgctgaggcagggcaacatctacggggagcaggctcaggaggctgtgacccggctgctggagaagaaccaagaaaaccagttacgggcccagcaatggatgcaaaagctacatgaccaacttgagctgcagcacttcctccgagactgccacgagctggatggctggatccatgagaagatgctgatggcgcgggatggcacgcgggaggacaaccacaagctgcataagagatggctccggcaccaggcattcatggccgagctggctcagaataaggagtggctggagaagatcgagcgggagggccagcaactgatgcaggagaagcccgaactggcggcctccgtgcggaagaagctgggcgagatccgccagtgctgggcggagctggagagcaccacccaggccaaggcacggcagctctttgaggccagcaaagcagaccagctggtgcagagctttgctgagctggacaagaagctccttcacatggagagccagctgcaagacgtggaccctggaggagacctggccactgtcaacagtcagctcaagaagctgcagtccatggagtcgcaggtggaggagtggtaccgcgaggtgggagagctgcaggcgcagacggcggcgctgccgctggagccggcgagcaaggagctggtgggtgagcggcagaacgcggtgggcgagcgcctggtgcgcctgctcgagccgttgcaggagcgccgccgcttgctgctggcttccaaggagttgcaccaggtggcgcacgacctggacgacgagctggcatgggttcaggagcggctgccactggccatgcagacagagcgaggcaacggtttgcaggcggtccagcagcacatcaaaaagaaccagggcctgcggcgggagatccaggcgcatgggccgcgcctggaggaggtgctggagcgcgcgggcgcgctggcgtcgctgcgcagcccggaggcagaggcagtgcgccggggcctggagcagctgcagagcgcctgggccggactgcgggaggctgccgagcgacggcagcaggtgctggacgccgccttccaggtggagcagtactacttcgacgtggctgaggtggaggcgtggctgggcgagcaggagctgctcatgatgagtgaggacaagggcaaggacgaacagagcaccctgcagctgctcaagaaacacctgcagctggagcaaggcgtggagaactacgaggaaagcatcgcgcagctgtcgcgccagtgccgggcgctgctggagatggggcacccggacagcgagcagatcagccggcggcagtctcaggtggaccgcctgtacgtggcgctcaaggagctgggtgaggagcgccgggtggctctggaacagcagtactggctgtaccagctcagccgccaggtgagcgagcttgagcactggattgccgagaaggaggtggtggctggctcacccgagctcggccaggactttgagcatgtctcggtgctgcaggagaaattctcagagtttgccagcgagacaggtatggcagggcgggaacggctggcagctgtgaaccagatggtggatgagctgatcgagtgtggccatacagcagcggccaccatggccgagtggaaggacggactgaacgaggcctgggctgagctgctggagctcatgggcacacgggcccagctgctggccgcctctcgggagcttcataagttcttcagtgacgcccgagagcttcagggacagattgaggagaagcggaggcggctgccccgcctgaccaccccgcctgagccgagacccagtgccagttccatgcagcggaccctgagagcctttgagcatgacctgcagctcctcgtgtcccaggtacggcagctgcaggagggggcggcccagctgcggacggtgtatgcgggtgaacatgccgaggccatcgctagccgggagcaggaggtgctgcagggttggaaagagctgctgtcagcctgtgaggatgcccgcctgcatgtcagctccacagccgacgccctgcgcttccacagccaagtccgcgacctgctctcctggatggatggcatcgccagccagattggggcagccgacaagcccagggacgtgtcatcagtggaggtgctcatgaactaccaccagggcctgaagactgagctggaggcgcgggtgcctgagctgaccacctgccaggagctggggcgatctctgctgctcaacaaaagtgccatggctgatgagatccaggcacagctggacaagctgggaaccaggaaggaggaggtgtcggaaaagtgggaccgccattgggagtggctgcagcagatgctggaggtgcaccagtttgcccaggaggcggtggtggctgatgcctggctgacagcccaggagccgctcctgcagagccgggagctgggcagcagcgtggatgaggtggagcagcttatccggcgacatgaggccttccgcaaagcggctgcagcctgggaagagaggttcagctctctgcggcgcctgaccacgatcgagaaaatcaaagcggaacagagcaagcagccgcctaccccactgctggggcgcaagttctttggggaccccacggaactggcggccaaggcggcgcccctgctgcggccagggggctatgaaaggggcttggagcccctggcccgccgagcctcggacacgctctcggccgaggtgcggactcgggtggggtatgtgcgccaggagctcaagcccgagcgcctccagccgcgcattgaccggctgccggagatcccggggagggtggagcccgcggccctgccggccgcaccagaggacgcggcggagacccccgcgacccccgcggcggcggagcaggtgcggccacgaccggagcgccaggagtcagctgatcgcgcggaggagctgcccaggaggcggcggcctgagcggcaagagtcagtcgatcaatccgaggaggctgcgcggaggcggcggccggagcggcaggagtcagcggagcacgaggcggcacacagccttaccctgggccgctatgagcagatggagcggcggcgcgagcggcgtgagcggcgcttggagcggcaggagtccagcgaacaggagatgcccatcagaggagacctggtcaaggggaaggccaccctggctgacattgtggaacagctgcaggagaaagaggcaggcccagggctgcctgctgggccgtcgctgcctcagccacgcgagcttcccccaggtcgcctgcccaacgggcttgagctgcccgagcggacacctcggccggaccggccccgggcgcgggaccggcccaagccgcgacggcggccgcggcccagagagggtggtgagggcgggggaagccggcgctcgcgctccgccccggcccagggcggctccgcccccgcgcctccgccaccgcccactcacacagtgcagcacgagggcttcctactgcgcaagcgcgagctcgacgctaaccgcaagtcgtccaaccggtcgtgggtgagcctgtactgtgtgcttagtaagggggaactgggcttctacaaggactccaagggcccggcatccgggagcacacacggtggggaaccgctgctcagcctgcacaaggccaccagcgaggtggctagtgactacaagaaaaagaagcatgtcttcaagctccagacccaggatggcagtgagtttttgctccaggcaaaagatgaggaggagatgaacggctggctggaggctgtagcttcctcggtggcggaacacgcagagatcgcccgctggggccagacactacccactacttcatccacagatgagggcaaccctaagagggaaggcggagatcgcagggccagcgggcgcaggaagtgacttcccacccccaggacctgacacatctcgtctcccctcttttccgcactgtgggcacaaagacactttttcttccgcaggggcgggagcccctagttccaacactgaggacgcgtgacatggtgggcaccggaaaggaggggacttctcctgcaccccaagaagtggtggggagattgctgcccctatagccatatctcggccccttcccactcaccacccccaccccaggtgctgggggtcccttatttttatgcaataactgagcttgatgggggtgggcagggggccagttgagccaagcccccagccccgatctgcagatcctgccccaagaagctggggtggtgggggcagtaattcctgcccccctctctgccctagggatgggcacgggggcgctggtgaggtcccctggaccatccagggtgctagggggcagggaggggacaccccctccccgcctttacctcacttccaatgctgccttgatctctgtctgggaggggggagtgaaggggccctagccccctgcactccgccgcctcagagccatgcggttaattcctgacttagtttatttttgcaaaacgtcgatctcctcctcccccgccccgcatccgcgaaggcttttaatgggaggggcgtcaaagctcaaaactgttttcctctctcctcccccctccagttgtaaatgccacttcatgaggggaggggcgaggggaagcccacccctgcatgcttctggctggagcacctccctggggagtcgggggattgggttgtgggcagtccccatggccgcctggagaagccgctggggcccgggggtgtggggcggtgtggcgggcgcacactgtatgtacctataataaaccctttggctttg

SEQ ID NO: 29666 - DNA, 2419 bp, Homo sapiens
  source 1..2419: mol_type = unassigned DNA
ggagcctcagccttcgccgccgctgccgctgccgtcgcagttgaggggcgagcacccgcccgcccgctgcagggacgccccgccaacgccactgccgcttcagctggatggctggatccatgagaagatgctgatggcgcgggatggcacgcgggaggacaaccacaagctgcataagagatggctccggcaccaggcattcatggccgagctggctcagaataaggagtggctggagaagatcgagcgggagggccagcaactgatgcaggagaagcccgaactggcggcctccgtgcggaagaagctgggcgagatccgccagtgctgggcggagctggagagcaccacccaggccaaggcacggcagctctttgaggccagcaaagcagaccagctggtgcagagctttgctgagctggacaagaagctccttcacatggagagccagctgcaagacgtggaccctggaggagacctggccactgtcaacagtcagctcaagaagctgcagtccatggagtcgcaggtggaggagtggtaccgcgaggtgggagagctgcaggcgcagacggcggcgctgccgctggagccggcgagcaaggagctggtgggtgagcggcagaacgcggtgggcgagcgcctggtgcgcctgctcgagccgttgcaggagcgccgccgcttgctgctggcttccaaggagttgcaccaggtggcgcacgacctggacgacgagctggcatgggttcaggagcggctgccactggccatgcagacagagcgaggcaacggtttgcaggcggtccagcagcacatcaaaaagaaccagggcctgcggcgggagatccaggcgcatgggccgcgcctggaggaggtgctggagcgcgcgggcgcgctggcgtcgctgcgcagcccggaggcagaggcagtgcgccggggcctggagcagctgcagagcgcctgggccggactgcgggaggctgccgagcgacggcagcaggtgctggacgccgccttccaggtggagcagtactacttcgacgtggctgaggtggaggcgtggctgggcgagcaggagctgctcatgatgagtgaggacaagggcaaggacgaacagagcaccctgcagctgctcaagaaacacctgcagctggagcaaggcgtggagaactacgaggaaagcatcgcgcagctgtcgcgccagtgccgggcgctgctggagatggggcacccggacagcgagcagatcagccggcggcagtctcaggtggaccgcctgtacgtggcgctcaaggagctgggtgaggagcgccgggtggctctggaacagcagtactggctgtaccagctcagccgccaggtgagcgagcttgagcactggattgccgagaaggaggtggtggctggctcacccgagctcggccaggactttgagcatgtctcggtgctgcaggagaaattctcagagtttgccagcgagacaggtatggcagggcgggaacggctggcagctgtgaaccagatggtggatgagctgatcgagtgtggccatacagcagcggccaccatggccgagtggaaggacggactgaacgaggcctgggctgagctgctggagctcatgggcacacgggcccagctgctggccgcctctcgggagcttcataagttcttcagtgacgcccgagagcttcagggacagattgaggagaagcggaggcggctgccccgcctgaccaccccgcctgagccgagacccagtgccagttccatgcagcggaccctgagagcctttgagcatgacctgcagctcctcgtgtcccaggtacggcagctgcaggagggggcggcccagctgcggacggtgtatgcgggtgaacatgccgaggccatcgctagccgggagcaggaggtgctgcagggttggaaagagctgctgtcagcctgtgaggatgcccgcctgcatgtcagctccacagccgacgccctgcgcttccacagccaagtccgcgacctgctctcctggatggatggcatcgccagccagattggggcagccgacaagcccaggtgcccctcatccctcctcgggcttcctgcctccccctggtggcctaccccagccacccccagcccattgacagcccccttctcaatggaatgacaacagccaatatctgtgtggcgcctctgtgtgctaggcactgttctaggtgcttcgtgtgtattcagaccccttttttaggcctgtcattggggacttcggtcatggggcatccttctgtccgctgtccttcccagttgcctattattaccctctccatgggatgtcacagcatgaaacaggctaaagacaggatgggcaagggaggtgtgggactgtatttgtgagggtgggtgaagaattctaacaattcca

SEQ ID NO: 29667 - DNA, 4813 bp, Homo sapiens
  source 1..4813: mol_type = unassigned DNA
atgcctcattatccatcctgctcttctgcaccctccttgggaacccccagacctccccagatccagcagctagaggccaggcacaggaaccaagaaaaccagttacgggcccagcaatggatgcaaaagctacatgaccaacttgagctgcagcacttcctccgagactgccacgagctggatggctggatccatgagaagatgctgatggcgcgggatggcacgcgggaggacaaccacaagctgcataagagatggctccggcaccaggcattcatggccgagctggctcagaataaggagtggctggagaagatcgagcgggagggccagcaactgatgcaggagaagcccgaactggcggcctccgtgcggaagaagctgggcgagatccgccagtgctgggcggagctggagagcaccacccaggccaaggcacggcagctctttgaggccagcaaagcagaccagctggtgcagagctttgctgagctggacaagaagctccttcacatggagagccagctgcaagacgtggaccctggaggagacctggccactgtcaacagtcagctcaagaagctgcagtccatggagtcgcaggtggaggagtggtaccgcgaggtgggagagctgcaggcgcagacggcggcgctgccgctggagccggcgagcaaggagctggtgggtgagcggcagaacgcggtgggcgagcgcctggtgcgcctgctcgagccgttgcaggagcgccgccgcttgctgctggcttccaaggagttgcaccaggtggcgcacgacctggacgacgagctggcatgggttcaggagcggctgccactggccatgcagacagagcgaggcaacggtttgcaggcggtccagcagcacatcaaaaagaaccagggcctgcggcgggagatccaggcgcatgggccgcgcctggaggaggtgctggagcgcgcgggcgcgctggcgtcgctgcgcagcccggaggcagaggcagtgcgccggggcctggagcagctgcagagcgcctgggccggactgcgggaggctgccgagcgacggcagcaggtgctggacgccgccttccaggtggagcagtactacttcgacgtggctgaggtggaggcgtggctgggcgagcaggagctgctcatgatgagtgaggacaagggcaaggacgaacagagcaccctgcagctgctcaagaaacacctgcagctggagcaaggcgtggagaactacgaggaaagcatcgcgcagctgtcgcgccagtgccgggcgctgctggagatggggcacccggacagcgagcagatcagccggcggcagtctcaggtggaccgcctgtacgtggcgctcaaggagctgggtgaggagcgccgggtggctctggaacagcagtactggctgtaccagctcagccgccaggtgagcgagcttgagcactggattgccgagaaggaggtggtggctggctcacccgagctcggccaggactttgagcatgtctcggtgctgcaggagaaattctcagagtttgccagcgagacaggtatggcagggcgggaacggctggcagctgtgaaccagatggtggatgagctgatcgagtgtggccatacagcagcggccaccatggccgagtggaaggacggactgaacgaggcctgggctgagctgctggagctcatgggcacacgggcccagctgctggccgcctctcgggagcttcataagttcttcagtgacgcccgagagcttcagggacagattgaggagaagcggaggcggctgccccgcctgaccaccccgcctgagccgagacccagtgccagttccatgcagcggaccctgagagcctttgagcatgacctgcagctcctcgtgtcccaggtacggcagctgcaggagggggcggcccagctgcggacggtgtatgcgggtgaacatgccgaggccatcgctagccgggagcaggaggtgctgcagggttggaaagagctgctgtcagcctgtgaggatgcccgcctgcatgtcagctccacagccgacgccctgcgcttccacagccaagtccgcgacctgctctcctggatggatggcatcgccagccagattggggcagccgacaagcccagggacgtgtcatcagtggaggtgctcatgaactaccaccagggcctgaagactgagctggaggcgcgggtgcctgagctgaccacctgccaggagctggggcgatctctgctgctcaacaaaagtgccatggctgatgagatccaggcacagctggacaagctgggaaccaggaaggaggaggtgtcggaaaagtgggaccgccattgggagtggctgcagcagatgctggaggtgcaccagtttgcccaggaggcggtggtggctgatgcctggctgacagcccaggagccgctcctgcagagccgggagctgggcagcagcgtggatgaggtggagcagcttatccggcgacatgaggccttccgcaaagcggctgcagcctgggaagagaggttcagctctctgcggcgcctgaccacgatcgagaaaatcaaagcggaacagagcaagcagccgcctaccccactgctggggcgcaagttctttggggaccccacggaactggcggccaaggcggcgcccctgctgcggccagggggctatgaaaggggcttggagcccctggcccgccgagcctcggacacgctctcggccgaggtgcggactcgggtggggtatgtgcgccaggagctcaagcccgagcgcctccagccgcgcattgaccggctgccggagatcccggggagggtggagcccgcggccctgccggccgcaccagaggacgcggcggagacccccgcgacccccgcggcggcggagcaggtgcggccacgaccggagcgccaggagtcagctgatcgcgcggaggagctgcccaggaggcggcggcctgagcggcaagagtcagtcgatcaatccgaggaggctgcgcggaggcggcggccggagcggcaggagtcagcggagcacgaggcggcacacagccttaccctgggccgctatgagcagatggagcggcggcgcgagcggcgtgagcggcgcttggagcggcaggagtccagcgaacaggagatgcccatcagaggagacctggtcaaggggaaggccaccctggctgacattgtggaacagctgcaggagaaagaggcaggcccagggctgcctgctgggccgtcgctgcctcagccacgcgagcttcccccaggtcgcctgcccaacgggcttgagctgcccgagcggacacctcggccggaccggccccgggcgcgggaccggcccaagccgcgacggcggccgcggcccagagagggtggtgagggcgggggaagccggcgctcgcgctccgccccggcccagggcggctccgcccccgcgcctccgccaccgcccactcacacagtgcagcacgagggcttcctactgcgcaagcgcgagctcgacgctaaccgcaagtcgtccaaccggtcgtgggtgagcctgtactgtgtgcttagtaagggggaactgggcttctacaaggactccaagggcccggcatccgggagcacacacggtggggaaccgctgctcagcctgcacaaggccaccagcgaggtggctagtgactacaagaaaaagaagcatgtcttcaagctccagacccaggatggcagtgagtttttgctccaggcaaaagatgaggaggagatgaacggctggctggaggctgtagcttcctcggtggcggaacacgcagagatcgcccgctggggccagacactacccactacttcatccacagatgagggcaaccctaagagggaaggcggagatcgcagggccagcgggcgcaggaagtgacttcccacccccaggacctgacacatctcgtctcccctcttttccgcactgtgggcacaaagacactttttcttccgcaggggcgggagcccctagttccaacactgaggacgcgtgacatggtgggcaccggaaaggaggggacttctcctgcaccccaagaagtggtggggagattgctgcccctatagccatatctcggccccttcccactcaccacccccaccccaggtgctgggggtcccttatttttatgcaataactgagcttgatgggggtgggcagggggccagttgagccaagcccccagccccgatctgcagatcctgccccaagaagctggggtggtgggggcagtaattcctgcccccctctctgccctagggatgggcacgggggcgctggtgaggtcccctggaccatccagggtgctagggggcagggaggggacaccccctccccgcctttacctcacttccaatgctgccttgatctctgtctgggaggggggagtgaaggggccctagccccctgcactccgccgcctcagagccatgcggttaattcctgacttagtttatttttgcaaaacgtcgatctcctcctcccccgccccgcatccgcgaaggcttttaatgggaggggcgtcaaagctcaaaactgttttcctctctcctcccccctccagttgtaaatgccacttcatgaggggaggggcgaggggaagcccacccctgcatgcttctggctggagcacctccctggggagtcgggggattgggttgtgggcagtccccatggccgcctggagaagccgctggggcccgggggtgtggggcggtgtggcgggcgcacactgtatgtacctataataaaccctttggctttg

SEQ ID NO: 29668 - DNA, 8671 bp, Homo sapiens
  source 1..8671: mol_type = unassigned DNA
tatgaccctgtgtgactcagtgacccggagggcaagcaggactgtgggtgacaccttgtgtcatcctctgagcctcaccttccccgatggcgcaggtaccaggggaagtggacaacatggagggcctgcctgctcctaacaacaaccctgctgcccgctgggagagtccggatcggggctgggagcgggagcagccggctgcgtccaccgcagcggcctcgctctttgagtgctcccggatcaaggccttggcagatgagcgggaagccgtgcagaagaaaaccttcaccaagtgggtgaactcgcacctcgcccgcgtgggctgccacatcggggacctctatgtggacctccgggacggcttcgtgctcacgcggctcctggaagtgctgtctggggagcagctgcccaggcccacgcgcggccgcatgcggatccactcactggagaacgtggacaaggcgctgcagtttctgaaggagcagcgcgtgcacctggagaacgtgggttcgcatgacatcgtggatgggaatcaccggctgacgctggggctggtctggaccatcatcctgcgcttccagattcaagtcatcaaaattgagactgaggacaacagagagacacgctcagccaaggatgctctgctcttgtggtgtcagatgaagacagctggttaccctgaggtaaacatccagaatttcaccaccagctggcgggatggcttggccttcaatgccctcattcaccggcacaggcctgatctcgtggacttcagcaaactcaccaagtccaatgccaactacaacctgcagagagccttccgcacagctgagcagcacctggggctggcgcggctgctggatcctgaagatgtgaacatggaggctccagatgagaagtccatcatcacctacgtggtctctttctaccactatttctccaagatgaaggctctggctgtggaggggaagcgtatcgggaaggtcttggaccaggtattggaggtggggaagatcatagaacgctacgaggagctggcggctgagctgctggcctggatccaccgcaccgtgggcctcatcagcaatcagaaatttgccaactccttaagtggggtgcagcagcaactccaggctttcacggcctattgcacgctggagaagcctgtcaagttccaggagaaggggaacctagaggtgctgctcttcagcatccagagcaaactgcgtgcctgcaaccgtcgcctctttgtgcctcgggagggctgtggcatctgggatattgacaaggcatggggtgagctggagaaggctgagcatgagcgggaggctgccctacgggctgagctgattcggcaggagaagctggaactactggcacagaggtttgaccacaaggtggctatgagggagagctggctgaatgagaaccagcgtctggtctcccaggacaactttgggtatgagctgcccgcagtggaggcagccatgaagaaacacgaagcgatcgaggcagacattgcggcctacgaggagcgggtgcagggtgtggcggagctggcccaggcattggcagccgaaggctactacgatatccggcgggtggcagcccagcgtgacagcgtcctgcgccagtgggccctgctaactgggcttgtgggtgcccggcggacacgacttgagcagaaccttgccctgcagaaggtcttccaggagatggtgtacatggtggactggatggaggagatgcaggctcagctgctgtcccgggagtgtgggcagcacctggtggaggcagacgacctgttgcagaagcatggactgctggagggagacattgccgcccagagcgagcgggtggaggctctcaatgccgctgccctgcgcttctcccagctgcagggctaccagccctgcgacccgcaggtcatctgcaaccgcgtgaaccacgtgcacggctgcctggcggagctgcaggagcaggcagcgcggcgacgcgcggagctggaggcttcgcggagcctgtgggcgctgctgcaggagctggaggaggccgagagctgggcgcgcgacaaggagcgtctcctggaggctgcgggcggcggcggtgcggcgggcgcagcgggcgcagcgggaacagcgggcggcgcgcatgacctgtccagcacagcgcgcctcctggcccagcacaagatcctgcagggcgagctgggcgggcggcgagcgttgctgcagcaggccctgcggtgtggcgaggagctggttgcggccggcggtgccgtcggcccgggagcagacaccgtgcacctggtaggcctggcggagcgcgcggcgagcgcccggcgccgctggcagaggctggaagaggcggcggcgcggcgagagcggcggctgcaggaggcgcgggcgctgcaccagttcggcgctgacctcgacgggctgctggactggcttcgcgacgcttaccgcctggcagccgccggtgacttcggccacgacgaagcttccagccgccgcctggcgcgccagcaccgcgcgctcaccggggaggtggaggcacatcgcgggcccgtgagcggcctgcggcgccagctggcgacactcgggggtgccagtggcgcagggccactggtggtggcgctgcaggtgcgcgtggtggaagcagagcagttgttcgctgaggtgaccgaagtggcggcgctgaggcgccagtggctgcgggacgcgctcgctgtctaccgcatgtttggcgaggtgcacgcgtgtgagctgtggatcggcgagaaggagcaatggctgctctccatgcgtgtgccggattcactcgacgacgtcgaggtggtgcagcaccgattcgagagcctggaccaagagatgaacagcctgatgggccgcgttctggacgtgaaccacacagtccaggagctggtggaaggaggccaccccagttcagatgaggtgcgttcctgccaggaccacctcaacagcaggtggaaccgcatcgtggagctagtggaacagcgcaaagaggaaatgagcgcggtgctgctggtggagaaccacgtgctggaggtggccgaggtgcgcgcccaggtgcgtgagaagcggagagctgtggagagcgcgccccgggccggcggcgccctgcagtggcgtcttagcggcctagaggccgctctgcaggcgctggagccgcgccaggcggcccttctggaggaggcagccctgctggctgagcgcttcccggcgcaggcggcgcggctgcaccagggcgcggaggagctgggcgccgagtggggcgcgctagctagcgcggctcaggcctgcggcgaggcggtggcggcagcagggcgcctgcagcgcttcctacatgacctcgacgctttcctggactggctcgtgcgcgcccaggaggcggcgggcggcagcgaggggcccctgcccaacagcctagaagaggcggacgcgctgctggcgcgccacgctgcgctcaaggaggaggtggaccagcgcgaggaagactatgctcgcatcgtggcggccagcgaggcgctgctggccgccgacggcgcagagctgggcccgggcctggcactagacgagtggctgccacacctcgaacttggctggcataaactgctcggcttgtgggaggcgcgcagggaggcgctggtccaggcgcacatctaccagctcttcctgcgggatctacgccaggcgctcgtggtgctgcgtaaccaggagatggcgctgtctggtgcggagctcccgggcacagtggaatcggtggaggaggccttgaaacagcaccgtgactttctcaccaccatggagctgagccagcaaaagatgcaggtggccgtgcaggctgcagagggcctgctgaggcagggcaacatctacggggagcaggctcaggaggctgtgacccggctgctggagaagaaccaagaaaaccagttacgggcccagcaatggatgcaaaagctacatgaccaacttgagctgcagcacttcctccgagactgccacgagctggatggctggatccatgagaagatgctgatggcgcgggatggcacgcgggaggacaaccacaagctgcataagagatggctccggcaccaggcattcatggccgagctggctcagaataaggagtggctggagaagatcgagcgggagggccagcaactgatgcaggagaagcccgaactggcggcctccgtgcggaagaagctgggcgagatccgccagtgctgggcggagctggagagcaccacccaggccaaggcacggcagctctttgaggccagcaaagcagaccagctggtgcagagctttgctgagctggacaagaagctccttcacatggagagccagctgcaagacgtggaccctggaggagacctggccactgtcaacagtcagctcaagaagctgcagtccatggagtcgcaggtggaggagtggtaccgcgaggtgggagagctgcaggcgcagacggcggcgctgccgctggagccggcgagcaaggagctggtgggtgagcggcagaacgcggtgggcgagcgcctggtgcgcctgctcgagccgttgcaggagcgccgccgcttgctgctggcttccaaggagttgcaccaggtggcgcacgactggacgacgagctgggcatgggttcaggagcggctgccactggccatgcagacagagcgaggcaacggtttgcaggcggtccagcagcacatcaaaaagaaccagggcctgcggcgggagatccaggcgcatgggccgcgcctggaggaggtgctggagcgcgcgggcgcgctggcgtcgctgcgcagcccggaggcagaggcagtgcgccggggcctggagcagctgcagagcgcctgggccggactgcgggaggctgccgagcgacggcagcaggtgctggacgccgccttccaggtggagcagtactacttcgacgtggctgaggtggaggcgtggctgggcgagcaggagctgctcatgatgagtgaggacaagggcaaggacgaacagagcaccctgcagctgctcaagaaacacctgcagctggagcaaggcgtggagaactacgaggaaagcatcgcgcagctgtcgcgccagtgccgggcgctgctggagatggggcacccggacagcgagcagatcagccggcggcagtctcaggtggaccgcctgtacgtggcgctcaaggagctgggtgaggagcgccgggtggctctggaacagcagtactggctgtaccagctcagccgccaggtgagcgagcttgagcactggattgccgagaaggaggtggtggctggctcacccgagctcggccaggactttgagcatgtctcggtgctgcaggagaaattctcagagtttgccagcgagacaggtatggcagggcgggaacggctggcagctgtgaaccagatggtggatgagctgatcgagtgtggccatacagcagcggccaccatggccgagtggaaggacggactgaacgaggcctgggctgagctgctggagctcatgggcacacgggcccagctgctggccgcctctcgggagcttcataagttcttcagtgacgcccgagagcttcagggacagattgaggagaagcggaggcggctgccccgcctgaccaccccgcctgagccgagacccagtgccagttccatgcagcggaccctgagagcctttgagcatgacctgcagctcctcgtgtcccaggtacggcagctgcaggagggggcggcccagctgcggacggtgtatgcgggtgaacatgccgaggccatcgctagccgggagcaggaggtgctgcagggttggaaagagctgctgtcagcctgtgaggatgcccgcctgcatgtcagctccacagccgacgccctgcgcttccacagccaagtccgcgacctgctctcctggatggatggcatcgccagccagattggggcagccgacaagcccagggacgtgtcatcagtggaggtgctcatgaactaccaccagggcctgaagactgagctggaggcgcgggtgcctgagctgaccacctgccaggagctggggcgatctctgctgctcaacaaaagtgccatggctgatgagatccaggcacagctggacaagctgggaaccaggaaggaggaggtgtcggaaaagtgggaccgccattgggagtggctgcagcagatgctggaggtgcaccagtttgcccaggaggcggtggtggctgatgcctggctgacagcccaggagccgctcctgcagagccgggagctgggcagcagcgtggatgaggtggagcagcttatccggcgacatgaggccttccgcaaagcggctgcagcctgggaagagaggttcagctctctgcggcgcctgaccacgatcgagaaaatcaaagcggaacagagcaagcagccgcctaccccactgctggggcgcaagttctttggggaccccacggaactggcggccaaggcggcgcccctgctgcggccagggggctatgaaaggggcttggagcccctggcccgccgagcctcggacacgctctcggccgaggtgcggactcgggtggggtatgtgcgccaggagctcaagcccgagcgcctccagccgcgcattgaccggctgccggagatcccggggagggtggagcccgcggccctgccggccgcaccagaggacgcggcggagacccccgcgacccccgcggcggcggagcaggtgcggccacgaccggagcgccaggagtcagctgatcgcgcggaggagctgcccaggaggcggcggcctgagcggcaagagtcagtcgatcaatccgaggaggctgcgcggaggcggcggccggagcggcaggagtcagcggagcacgaggcggcacacagccttaccctgggccgctatgagcagatggagcggcggcgcgagcggcgtgagcggcgcttggagcggcaggagtccagcgaacaggagatgcccatcagaggagacctggtcaaggggaaggccaccctggctgacattgtggaacagctgcaggagaaagaggcaggcccagggctgcctgctgggccgtcgctgcctcagccacgcgagcttcccccaggtcgcctgcccaacgggcttgagctgcccgagcggacacctcggccggaccggccccgggcgcgggaccggcccaagccgcgacggcggccgcggcccagagagggtggtgagggcgggggaagccggcgctcgcgctccgccccggcccagggcggctccgcccccgcgcctccgccaccgcccactcacacagtgcagcacgagggcttcctactgcgcaagcgcgagctcgacgctaaccgcaagtcgtccaaccggtcgtgggtgagcctgtactgtgtgcttagtaagggggaactgggcttctacaaggactccaagggcccggcatccgggagcacacacggtggggaaccgctgctcagcctgcacaaggccaccagcgaggtggctagtgactacaagaaaaagaagcatgtcttcaagctccagacccaggatggcagtgagtttttgctccaggcaaaagatgaggaggagatgaacggctggctggaggctgtagcttcctcggtggcggaacacgcagagatcgcccgctggggccagacactacccactacttcatccacagatgagggcaaccctaagagggaaggcggagatcgcagggccagcgggcgcaggaagtgacttcccacccccaggacctgacacatctcgtctcccctcttttccgcactgtgggcacaaagacactttttcttccgcaggggcgggagcccctagttccaacactgaggacgcgtgacatggtgggcaccggaaaggaggggacttctcctgcaccccaagaagtggtggggagattgctgcccctatagccatatctcggccccttcccactcaccacccccaccccaggtgctgggggtcccttatttttatgcaataactgagcttgatgggggtgggcagggggccagttgagccaagcccccagccccgatctgcagatcctgccccaagaagctggggtggtgggggcagtaattcctgcccccctctctgccctagggatgggcacgggggcgctggtgaggtcccctggaccatccagggtgctagggggcagggaggggacaccccctccccgcctttacctcacttccaatgctgccttgatctctgtctgggaggggggagtgaaggggccctagccccctgcactccgccgcctcagagccatgcggttaattcctgacttagtttatttttgcaaaacgtcgatctcctcctcccccgccccgcatccgcgaaggcttttaatgggaggggcgtcaaagctcaaaactgttttcctctctcctcccccctccagttgtaaatgccacttcatgaggggaggggcgaggggaagcccacccctgcatgcttctggctggagcacctccctggggagtcgggggattgggttgtgggcagtccccatggccgcctggagaagccgctggggcccgggggtgtggggcggtgtggcgggcgcacactgtatgtacctataataaaccctttggctttga

SEQ ID NO: 29669 - DNA, 11722 bp, Homo sapiens
  source 1..11722: mol_type = unassigned DNA
ggacaatgccgcctgtgtgccgtcaccccagcacgctggctcaaggggagggctgtggtgcagccctgctccagccttggcctctcctgatgtccctctccctccctccacagcccctgctatctgccatctccatccgtccagctgggccgcctctgtggaacccaggcatcaccaaggtttagggagccatccagcagctcctcatccccaaagtctgcagggctgatggctggtcagccccacagtccccgggagctcctcggggctgcagggcaccgcagcaggaggcccagcacagaactccgggtcccgcccagtccaagtctcaccatggactctcagtacgagacgggccacattcgcaagctacaggcccggcacatgcagatgcaggagaagactttcaccaagtggatcaataacgtcttccagtgcggccaggcgggcatcaagatccggaacctgtacacagagctggctgacggcatccacctcctgcggctgctggagctcatctcaggggaggccctgccacccccgagccggggccgcctgcgtgtgcacttcctggagaacagcagccgagctctggccttcctcagggccaaggtgccagtaccactcatcgggccagagaacatcgtggacggagaccagacactcatcctgggactcatctgggtcatcattctgcgtttccagatctcccacatctccttggacaaggaggagtttggggccagcgcagccctgctgtccaccaaggaagccctgctggtctggtgccagcggaagacagccagctacaccaacgtgaacattacagatttctcccgaagctggagcgatgggctgggcttcaatgccctcatccatgcccacaggccagacctgttggactacggctccctgcgtccagaccgcccactgcacaaccttgcttttgctttcctggtggctgagcaggagctgggcattgctcagctgctggaccccgaggacgtggcagccgcacagccagatgagcgctctatcatgacctacgtctccctctactaccactactgctcccgcctgcatcaggggcagactgtccagaggagactcactaagatcctgcttcagctccaggagacagagctgctgcagacccagtacgagcagctggtggctgaccttctacgctggattgcagagaagcagatgcagctggaggcgcgggattttccagactcgctgcccgccatgcggcagctactggcagcattcaccatcttccgcacccaggagaagccaccccggctacagcagcgaggggccgcagaggccctgctcttccggctacagacagcactccaagcccagaaccgcaggcccttcctgcctcatgagggcctgggccttgcagagctgtcccagtgctgggcagggctggagtgggcagaggctgcaaggagccaggccctgcagcagaggctactgcagctgcagcggctagaaaccctggcccggcgcttccagcacaaggcagccctccgggagagtttccttaaggatgcagagcaggtgctagaccaggccagagccccgccagccagcctggccacagtggaggcagccgtccagaggctgggcatgctggaggctggcatcctgccccaggaggggcgcttccaggccctggctgagatcgcagacatcctccggcaggagcagtaccacagctgggcagatgtggcccgcaggcaggaggaagttaccgtgcgctggcagaggctccttcagcatctacagggacagaggaagcaggtggcagacatgcaggctgtgctgagcctgctgcaggaggtggaggctgcctcccaccagctggaggagctgcaggagccggccaggtccaccgcctgtgggcagcagctggcagaagtggtggagctgctgcagaggcatgacctgctggaggctcaagtctcggcccacggagcccatgtgagccatcttgctcagcagacagcagagctggactcctccctgggcaccagtgtggaggtgctgcaggccaaggccaggacactggcccagctccaacagagcctggtggctcttgtcagggcccggcgggccctgctggagcagaccctgcagcgggcagagttcctgcgcaactgtgaggaggaggaagcctggctgaaggagtgcggacagcgggtggggaatgcggccctgggccgggatctcagccagatcgcaggcgccctgcagaaacacaaggccctggaagctgaggtccaccgccaccaggccgtgtgcgtagatctcgtgcggaggggacgcgacctcagcgcccgcaggcccccaacgcagccggatcccggggaacgggcagaggccgttcagggagggtggcagctgctccagacccgggtggtggggcggggcgcacggctgcagacagccctgctggtcctgcagtacttcgcggacgcggcggaggcggcttcgtggctgcgcgagcggcgatcctcgctggagagagcgtcctgcggtcaggaccaggcggccgccgagaccctgctgaggcgccacgtgcggctggagcgcgtcctgcgcgccttcgcggccgagctgcggcggctggaggagcaggggcgggcggcctcggcccgggcgtcgttattcacggtgaactctgccctgagccctccaggagaaagcctgaggaacccagggccctggagtgaggcttcctgccaccctggccctggggatgcctggaagatggccctcccagctgagcctgaccctgactttgatcccaacactatactccagacacaggaccacttgagtcaggactatgagagtctgcgggccctggcacagctccgcagggcccggttggaggaggccatggccctgttcggtttctgcagttcctgtggggagctccagttgtggctggagaagcagacagtgctgctccaaagggtgcagccccaggctgacaccctggaggtcatgcagctcaaatatgagaacttcctcactgccctggctgtgggaaagggcctctgggctgaggtcagcagctctgctgagcaactgaggcagagatatcctgggaactccacacaaatccaacgacagcaggaggaactgagccagaggtgggggcagctggaggccctgaagagggagaaggccgtgcagctggcacacagtgtggaagtgtgcagttttctgcaggagtgtggacccacacaggtccagctgcgagacgtgctcctccagctggaggccctgcagccagggagctcagaggacacctgccacgccctgcagctggcccagaagaagaccctggtgctggagaggagggtccacttcctccaaagtgtggtcgtaaaggtcgaggagccaggctacgcagagagccagcctctgcaaggacaggtggagacactgcaggggctgctgaagcaagtacaggaacaagtggcccaacgggcccggcgccaggctgagactcaggcccggcagagcttcctgcaagagagccagcaactgctactgtgggcagagagtgtccaggctcagctgcgcagcaaggaggtgtcagtggatgtggcctcggctcagcggctgctgagggagcaccaagacctgctggaggagatccacctgtggcaggagaggctgcagcagctggacgctcagagccagcccatggcagccttggactgcccagactcccaagaggtgcccaacactctgagggtcctggggcagcagggccaggagctgaaggttttgtgggagcagaggcagcagtggctgcaagaggggctggagctgcagaagtttggccgagaagtggatggtttcactgccacctgtgccaaccaccaggcctggctgcacctggacaaccttggggaggacgtgagggaggccctgagcctgctgcagcagcaccgggagtttgggcggctcctgagcaccctggggcctcgggcagaggctctgcgggcacacggcgagaagctggttcagagccagcacccagctgcacacacggtcagagagcagctgcagagtatccaggcacagtggaccaggctccaggggaggagtgagcagaggaggaggcagttgctggcttccctccagctccaggagtggaagcaggatgtggcagagctgatgcagtggatggaagagaaggggctgatggctgcgcatgagccctccggagcgcgcagaaacatcctgcagacactcaagcggcacgaagcagctgagagcgagctactcgccacccgcagacacgtggaggccctgcagcaggttgggagagagctgttgagtaggaggccctgtggccaggaggacatacagaccaggcttcaaggcctgagaagcaagtgggaagctttgaaccgcaagatgactgagcgtggggacgagctccagcaggctggacagcaggagcaactcctgaggcagctgcaggatgcaaaggagcagctggagcagctcgaaggggccctacagagctcggaaacagggcaggacctgcgctccagccagaggctgcagaaacggcaccaacagctggagagtgagagccggaccctggctgccaagatggctgccctcgcctccatggcccatggcatggccgcctccccggccatcctggaagagacccagaagcacctccggaggctggagcttctgcaggggcatctggccatccggggcctgcagctgcaggcctcagtggagctgcaccagttctgccacctgagcaacatggagctctcttgggtagccgagcacatgccccatggcagccccaccagctataccgagtgcttgaatggtgcccagagccttcaccgcaagcacaaggagctccaggtggaggtaaaagctcaccaggggcaggtgcaacgggtgctgagttctgggcggagcctggcagcctcagggcacccccaagcccaacacatcgtggagcagtgccaggagctggaaggccactgggcagagctggagagggcatgtgaagcgcgggcccagtgtctgcagcaggctgtcactttccagcagtactttctggatgtgtcagagctggagggctgggtggaggagaagcggccgctggtgagcagtcgggactatggcagagacgaggcagccaccctcaggctcattaacaagcaccaggctctacaggaggaactagccatttactggagctccatggaggagcttgaccagacggcccaaaccctcactggccccgaagtccctgagcagcagcgtgtggtgcaggagaggctccgggagcagctgcgggcactgcaggagttggcggccacacgggaccgggaactggaggggaccctgaggctgcatgagttcctgagggaggctgaggacctgcagggctggctggcaagccagaagcaggcagccaaaggaggggagagcctgggagaggaccccgagcacgccctgcacctctgcaccaagtttgcaaagtttcagcaccaagtggagatgggcagccagcgggtggccgcctgccggctgctggcggagagcctgctagagcgtgggcacagtgctggccccatggtccgtcagaggcagcaggatctgcagaccgcctggtcggagctgtgggagctgacccaggcccgaggccacgcgctccgagacaccgagaccaccctcagagttcacagagatctcttggaagtcctcacccaggtccaggagaaagccacgagcctccccaacaatgtggcacgggacctgtgtgggctggaggcgcagctgagaagccaccaggggctggagcgagaactcgtgggcaccgagcggcagctgcaggaactgctggagactgcaggcagggtgcagaagctgtgtccggggcctcaggcccatgcggtgcagcagaggcagcaagctgtgacgcaggcgtgggcagtgctgcagcgacgcatggagcagcgcagggcccagctggagcgggcacgcctcctggcccgcttccgcacggcggtgcgtgactatgcctcctgggcagcccgcgtgcgccaggacctgcaggtggaggagagttcgcaagagcctagcagtggcccgctgaagctcagtgcccaccagtggctccgggcggagctggaggcccgggagaagctgtggcagcaggccacccagctggggcagcaggcacttcttgctgcagggacacccaccaaggaggtccaggaagagcttcgagccctgcaggaccagcgggaccaggtgtatcagacctgggcacggaagcaagagaggctgcaggccgagcagcaggagcagctcttcctcagagagtgcggccgcctggaggagatcctcgcggcccaggaggtctccctgaaaaccagtgccttggggagctcggtggaagaggtagagcagttgattcgcaagcacgaggtcttcctgaaggttctgactgcccaggacaagaaggaggcagccctgcgtgagcggctgaagacgctccggcgcccccgggtgcgggaccggcttcccatcctgctgcagcgccggatgagagtgaaggagctggcggagagccggggacacgccctgcatgcctccctgctgatggccagcttcacccaggccgcaacccaggctgaggactggatccaggcgtgggcccagcagctgaaggagccggtccctcctggggacctgagagataagctgaagcccctgctgaaacaccaggcctttgaggctgaagtccaggcccatgaggaggtcatgacctctgttgccaagaagggagaggctctcctggcacagagtcaccctcgagccggagaggtctcccagcggctgcagggcctgcggaagcactgggaggacctgaggcaggcaatggccctcaggggccaggagctggaggacaggcggaacttcctggagttcctgcagagagtggaccttgcagaggcctggatccaggagaaggaggtgaagatgaatgttggtgacctgggccaggacctggagcactgcctgcagctccgacggcggctccgcgagttccgaggaaactcggccggggacacagtgggtgatgcctgcatcaggagcatcagtgacttgtcactgcagctcaagaaccgggaccctgaggaagtcaagatcatctgccagcggcgaagccagctcaacaacaggtgggcgagtttccatggcaacttgctccggtaccagcagcagctcgaaggggccttggagatacacgtgttgtcccgagagctggacaatgtcaccaagaggattcaggagaaggaagccctgatccaggccctggactgtgggaaagatctggagagcgtgcagaggctgctgcggaaacacgaggagctggagcgggaagtgcaccccatccaggcccaggtggagtccctagagcgtgaagtgggccgcctctgccaaagaagccccgaggcagcccacggcctcaggcacaggcagcaggaggtggctgagagctggtggcagctccggagcagggcccagaagcggagggaggcgctggatgccttgcaccaagctcagaaactccaggcaatgctgcaggaattgctggtcagcgcccagaggctgcgggctcagatggacacgagccccgctcctcgcagccctgtggaagcccggcgtatgttagaagagcatcaggagtgcaaggccgagctggactcctggacagacagcatcagcctggcccgaagcactgggcagcaactgctcacagcggggcaccccttcagctccgacattcgccaggtgctggctggcttagaacaggagctgagcagcctggaaggggcctggcaggagcatcagctacagctgcagcaggccctggagctacagctgtttctgagctcagtggagaagatggaacgttggctttgcagcaaggaagactccctagccagtgagggtctatgggaccccttggcccccatggagccccttctgtggaagcacaagatgctggagtgggacctggaggtgcaggcgggaaagatcagtgctctggaggccacggcccgcggcctgcaccagggtgggcaccccgaggcccagagtgccctgggcaggtgccaggccatgcttctgaggaaggaggcgctcttcaggcaagccgggacccgccgccatcgcctggaggagctccggcagctgcaggccttcctgcaggactcccaggaggtggctgcgtggctgagggagaagaacctggtggccttggaggagggtttgctggacacagccatgctgccagcacagttacagaagcagcagaatttccaggcggagctggacgcgagcatgcaccaacagcaggagctgcagcgggagggacagaggctgctgcaggggggccacccagcctcggaggccatccaggagcgactggaggagctgggagcactctggggtgagctgcaagacaactcccagaagaaggtggccaagctccagaaggcctgtgaggccctgcgtctgcggcggagcatggaggaactggagaactggctggagcccatcgaggttgagctgagagcccccactgtgggccaggccctgcctggggtgggcgagctcctgggcacacagagggagctggaggcagcagtggacaagaaggccaggcaggctgaggcactgctgggccaggcccaggcctttgtgagggaaggccactgccttgcccaagatgtggaagagcaggcccggcggctgcttcagaggttcaagagcctgagggagcccctgcaggagcgcaggacggccctggaggcccggagcctcctcttgaagttcttcagggacgccgacgaggaaatggcctgggtgcaggagaagctgcctctggccgctgcccaggactatggccagagcctgagtgcggtgcggcacctgcaggagcagcaccagaacctggagagtgagatgagcagccacgaggctctgacccgggtggtgctgggcactgggtacaagctggtgcaggctgggcactttgccgcccacgaggtggccgcccgggtgcagcagctggagaaggccatggcccacctgcgggcagaggcggcgcggaggcggcttctgctgcagcaggctcaggaggcccagcagtttctgactgagctcctggaggcgggatcctggctggctgagcggggccatgtcctggacagcgaggacatgggccacagtgctgaagccacacaggcccttctgcggcggctggaggccaccaagagagacctggaagcgttcagcccacgcatcgagcggctgcagcagacagcagcactcctggagagcaggaagaacccagaaagccccaaggtgctagcccagctgcaggcagttcgggaggcccacgcagagctgctgcggagggcggaggccagggggcacggcctgcaggagcagctgcagctacaccagctggagcgagagaccctgctcctcgacgcctggctgaccaccaaggcggccaccgccgagtcccaggactacgggcaggacctggagggtgtcaaggtgctggaagagaagtttgatgctttcagaaaggaagtgcagagcctgggccaggccaaggtgtatgccctgaggaagttggcaggcaccctggagcggggtgcacccaggcgctatccccacatccaagcccagaggagccgcattgaggctgcttgggagaggttggaccaagcaataaaagcccgcacagagaacttggctgcagcccatgaggtccacagctttcagcaggcagcagctgagctccagggaaggatgcaggagaagacggccctgatgaagggggaggacggaggccacagcctgtcatctgtgcggaccctgcagcaacagcacaggcgcctggagagagagctggaagctatggagaaggaggtggcacggctacagacggaggcctgccgactgggccagctacatcctgcagctccggggggcctggccaaggtgcaggaggcctgggccaccctgcaggcgaaggcccaggagcgaggccagtggctggcgcaggctgcacagggccatgccttcctcgggcgctgccaggaactgctagcatgggcacaggagaggcaggagctggcgtcctccgaggagctggctgaggacgtggcgggggctgagcagctccttgggcagcatgaagagctggggcaagaaatcagggagtgccgccttcaagcccaggacctgcggcaggaaggacagcagctggtggacaacagccacttcatgtctgcggaggtgacagagtgcctgcaggagctggaagggcggctgcaggagctggaggaggcttgggccctgcgctggcaacgctgtgccgagagctggggcctgcagaagcttcggcagaggctggagcaggctgaggcctggctggcctgctgggagggactcctgctgaagcccgactatgggcactcagtgtcagatgtggagttgctgctgcacagacaccaggacttagaaaagctgctggcagcccaggaagagaagtttgcccaaatgcaaaagacagagatggaacaggagctcctgctgcagccacaggagctgaagcccgggagagctggcagctcgctgacatcctttcagtggaggccctctggacaccaggggctaggagcacagctggctgagacgagggacccccaggatgcaaagggtacccccaccatggaggggtctttggagttcaagcagcacctgctgcctggcgggaggcagcctagctcgagctcctgggacagctgccgcgggaacttgcagggcagctctctgagcctgttcctggatgagaggatggcagcggagaaagtagcttccatagccctccttgacctcacgggagcccggtgtgagaggctgcggggccgccacggcaggaaacacacattctccttaaggctgaccagtggggcagagatcctgtttgcagcaccgtccgaagagcaggctgagagctggtggcgagccctgggcagcactgcagcccagagtctgagcccaaaactcaaagccaaacctgtcagctctctgaatgagtgcacgaccaaggatgcccggcctggatgtctactcaggtctgatccctgaggtgaaccccagtgcaacaccaaacttcaggggcacaagcgaggacacatctaagggaccagaataagactcagctacaggcaaaagggctccttcccgtggctgcttcaacccagttccccaggcccagcttctggaatagacagttccttctggttagatgggtcctaccatgtggcaggaaacagccattgcctggcctccccctgcattcctgtctgggtgaagaggagacgtgttacggcagagcaggtgggcaaggccagggctaccccaggcccatgtggcctcctccttgcttggaaggggtgactctgagcacaggtagacgcagacgtgtgcagagaatgtgctcttcggaggaagaacactgatgagcgagctctgtaccagcccttgccatgtacagccaagagcctagaatgacatggcccttctcagcagtaataacagatggtctcagcgcctc

SEQ ID NO: 29670 - DNA, 1801 bp, Homo sapiens
  source 1..1801: mol_type = unassigned DNA
agcgaccgacgagcaaccgtctgaggccaggagcgctgcgacggagccttgaccgccgttgcccggccctctcccgcgcagccccgggcttccgcagtccttccttcagaagggaaatttctgagggtcaggaaggggaatctgtacctcactccttgaacaccaaggaaggaatattgggaaaccaaaatgaggcacaatcagatgtgttgtgagacaccacctactgtcactgtttatgtaaaatcagggtcaaatagatcacatcagcctaaaaagcccattactctgaagcgtcctatttgtaaagataattggcaagcatttgaaaaaaatacacataataacaacaaatctaaacgccccaaaggaccttgtctggttatacagcgtcaggatatgactgctttctttaaattatttgatgacgatttaattcaagatttcttgtggatggactgctgctgtaaaattgcagacaagtatcttttggctatgacctttgtttatttcaagagggctaaatttactataagtgagcataccaggataaatttctttattgctctgtatctggctaatacagttgaagaagatgaagaagaaaccaagtacgaaatttttccatgggctttagggaaaaactggagaaaattgttccctaatttcttaaagttaagggaccagctctgggatagaattgactatagggctattgtaagcaggcgatgttgtgaggaggttatggccattgcaccaacccattatatctggcaaagagaacgttctgttcatcacagtggagctgtcagaaactacaacagagatgaagttcagctgccccggggacctagtgccacaccagtagattgttcactctgtggtaaaaaaagaagatatgttagactgggattgtcttcatcatcatctttatccagtcatacagcaggggtgacagaaaaacattctcaggactcatacaactcactgtcaatggacataataggtgatccttctcaagcttatactggttctgaagtagtcaatgaccatcaatcaaataaaggaaagaaaactaatttcttgaagaaagacaaatctatggagtggtttacaggaagtgaagaatgagatggcccaactaaaccaatttggaatcattaactacaaaatgtcaaactaactgcaagacaagtgtcaaaatgggatgtttaagcagttttgctatgttatacatcttttagttgttattttcaaaattatatgtataagttatataagtcatagtaatagctaaaaatgccaatctatggaagcagtgattttcaatataaagttctattttgatatttttccatcttcaagtcagttactgtcatctggagtactcagttaagttgtggtttgaccttcctcaacttgacaagaaaagctaatttaagagaagaaaaacataaagtcattatattaattaaaagaaaaaacaccatttaatatgttctgaaaacattactcacctgtatgaccaggttgccagtgtactggtctagcaacatagggaaatgatccatatggaaaatcagaatgcgattcttctgttgtaaaaaaatatatgtactataagctacataaaatattttctatttttttcacaaaactgttaaaatatgagttactctctttattgtaagttttttctttatttatttccttgcatatgttttagagctactctgccagttattatacagaaactatttgtcaatgattatgtaataaacatatgattttataaccaaat

SEQ ID NO: 29671 - DNA, 1759 bp, Homo sapiens
  source 1..1759: mol_type = unassigned DNA
gggagaccttagagcgggtaccgctgctggctagcgaccgacgagcaaccgtctgaggccaggagcgctgcgacggagccttgaccgccgttgcccggccctctcccgcgcagccccgggcttccgcaggaatattgggaaaccaaaatgaggcacaatcagatgtgttgtgagacaccacctactgtcactgtttatgtaaaatcagggtcaaatagatcacatcagcctaaaaagcccattactctgaagcgtcctatttgtaaagataattggcaagcatttgaaaaaaatacacataataacaacaaatctaaacgccccaaaggaccttgtctggttatacagcgtcaggatatgactgctttctttaaattatttgatgacgatttaattcaagatttcttgtggatggactgctgctgtaaaattgcagacaagtatcttttggctatgacctttgtttatttcaagagggctaaatttactataagtgagcataccaggataaatttctttattgctctgtatctggctaatacagttgaagaagatgaagaagaaaccaagtacgaaatttttccatgggctttagggaaaaactggagaaaattgttccctaatttcttaaagttaagggaccagctctgggatagaattgactatagggctattgtaagcaggcgatgttgtgaggaggttatggccattgcaccaacccattatatctggcaaagagaacgttctgttcatcacagtggagctgtcagaaactacaacagagatgaagttcagctgccccggggacctagtgccacaccagtagattgttcactctgtggtaaaaaaagaagatatgttagactgggattgtcttcatcatcatctttatccagtcatacagcaggggtgacagaaaaacattctcaggactcatacaactcactgtcaatggacataataggtgatccttctcaagcttatactggttctgaagtagtcaatgaccatcaatcaaataaaggaaagaaaactaatttcttgaagaaagacaaatctatggagtggtttacaggaagtgaagaatgagatggcccaactaaaccaatttggaatcattaactacaaaatgtcaaactaactgcaagacaagtgtcaaaatgggatgtttaagcagttttgctatgttatacatcttttagttgttattttcaaaattatatgtataagttatataagtcatagtaatagctaaaaatgccaatctatggaagcagtgattttcaatataaagttctattttgatatttttccatcttcaagtcagttactgtcatctggagtactcagttaagttgtggtttgaccttcctcaacttgacaagaaaagctaatttaagagaagaaaaacataaagtcattatattaattaaaagaaaaaacaccatttaatatgttctgaaaacattactcacctgtatgaccaggttgccagtgtactggtctagcaacatagggaaatgatccatatggaaaatcagaatgcgattcttctgttgtaaaaaaatatatgtactataagctacataaaatattttctatttttttcacaaaactgttaaaatatgagttactctctttattgtaagttttttctttatttatttccttgcatatgttttagagctactctgccagttattatacagaaactatttgtcaatgattatgtaataaacatatgattttataaccaaat

SEQ ID NO: 29672 - DNA, 758 bp, Homo sapiens
  source 1..758: mol_type = unassigned DNA
gttgcccggccctctcccgcgcagccccgggcttccgcaggtacctgtgctcgcccccgggaaggggcctcgcaggcgaatctccagtttcgagtgtgcccggtccctgggttcgctcgccggcgaccccaccgcccgccttagatgagaaggcagcgctccagcctcgtcctcacgccgcctcccgtgggcgccctcagctgccttcgcggcgacgacacacgcgctccccgcagcgggctctgggctgagggacctggcgagggaggcagtggccgcgcagtccttccttcagaagggaaatttctgagggtcaggaaggggaatctgtacctcactccttgaacaccaaggaaggaatattgggaaaccaaaatgaggcacaatcagatgtgttgtgagacaccacctactgtcactgtttatgtaaaatcagggtcaaatagatcacatcagcctaaaaagcccattactctgaagcgtcctatttgtaaagataattggcaagcatttgaaaaaaatacacataataacaacaaatctaaacgccccaaaggaccttgtctggttatacagcgtcaggatatgactgctttctttaaattatttgatgacgatttaattcaagatttcttgtggatggactgctgctgtaaaattgcagacaagtatcttttggctatgacctttgtttatttcaagagggctaaatttactataagtgagcataccaggataaatttctttattgctctgta

SEQ ID NO: 29673 - DNA, 991 bp, Homo sapiens
  source 1..991: mol_type = unassigned DNA
gaaggccctgattggtggacgggctgctttgggcagggccgccctcaggctatataagcgcactcgcggcggcgttggtgttatgctctgggccattcctgagctcgggtcaccctgccccatctccatctcctatgagatgagtgactcccaagaccccaccacttcccctgtagttaccacccaggtagagctggggggctgcagccggcaaggtgggggcaatgggttcctccgttttcgccagcaccaggaggtccaggccttcctcagccttctggaggacagttttgtccaggaattcctctccaaagacccctgcttccagatttcagataagtatctcctggccatggtgctggtctacttccagcgcgcccacctgaagctcagcgagtatacccacagcagcctgttcttggccctgtaccttgcaaacgacatggaggaggacctggagggccccaaatgtgagatttttccatgggccctgggaaaagattggtgtttacgagtggggaaattcctgcaccagagggataagctttgggcacggatgggtttccgggctgttgtgagccgccagtgctgtgaggaggtcatggcaaaggagccattccactgggcttggactcgggaccggcgcccccaccatggtggggttcagagggtctgtccacaggtccctgttcgccttccccggggccctggcctctcgccgccccactgttccccctgtggtttgccccagcactgcagcagccacttgcttaagcctgtgtcatccaagtgcccttctctgacctctgaatgtcatcgccctccctcccaaaattatctctcaagggtcaaaaacgcctggggtggggactttctcatcgtcttgcctccccagatgcaactggaaccaggcacctactccctccgcatcttcccaaagcctccggcacgccctgggcactgaagctctgcagggtgaagaacagcacgc

SEQ ID NO: 29674 - DNA, 2855 bp, Homo sapiens
  source 1..2855: mol_type = unassigned DNA
atgaatgtggataaatttctaattgtctgctatctcaagaaagaagtctgggggtttgagagttacagtttgtctgggactacttgcttccagtggaattattttgtctggtcactaagattttttttttcttgtggttcatctaaatatcatttgacacccttgcccattaagaaggtggattacccccataagaggggccaaaattggggaagttatgttcacaattctctccctagatttaattgggattataggtcgtgtttccacacttggaaaagggcttcagataacagggagcgtgcttatgaacatagtgcctatggacaccatgaacgggggacgggaggatttgatcggacaagacattacgatcaggattactatagagatcctcgagagcggactttacaacatgggctctattacgcttctcggagtcgaagtccaaatcgctttgatgctcatgacccccgatatgaacctagggctcgcgagcagtttacactgcccagtgtggtacacagggatatctacagggatgatattacccgggaggtacgaggcagaaggccagagcggaattaccagcacagcaggagtcggtcaccacattcatcccagtctagaaatcagtctcctcagagactggctagccaagcatctagacccacaaggtcccctagcggcagcggctctagaagtagatcctccagtagtgattcaatcagcagcagcagtagtaccagcagtgacagcagtgattccagcagtagttcaagtgatgattctccagctcgatcagttcagtctgcagcagtccctgcacccacttcccagttgctttcatctctggaaaaagatgagccccgtaaaagttttggcatcaaggtccagaatcttccagtacgctctacagatacaagccttaaagatggccttttccatgaatttaagaaatttggaaaagtaacttcagtgcagatacatggaacttcagaagagaggtatggtctggtattctttcggcagcaagaggaccaagaaaaagccttgactgcatcaaaaggaaaacttttctttggcatgcagattgaagtaacagcatggataggtccagaaacagaaagtgaaaatgaatttcgccccttggatgaaaggatagatgaatttcaccccaaagcaacaagaactctctttattggcaaccttgaaaaaaccactacttaccatgaccttcgcaacatcttccagcgctttggagaaattgtggatattgacattaagaaagtaaatggagttcctcagtatgcgtttctgcaatactgtgatattgctagcgtttgtaaagctattaagaagatggatggggaatatcttggaaataatcgcctcaagctgggttttggaaagagcatgcctacaaactgcgtgtggctagatgggctttcttcgaatgtgtcagatcagtatttaacacgacatttctgccgatatgggcctgtggtaaaggtggtgtttgaccgcttaaaaggcatggccctggttctctacaatgaaattgaatatgcacaagcagctgtaaaagagaccaaagggaggaaaatcggtgggaataaaattaaggtggattttgcaaatcgggaaagtcagctggctttttatcactgcatggagaaatctggtcaagacatcagagacttttatgaaatgttagccgaaagaagagaggaacgaagggcatcctacgactataaccaagatcgtacatattatgagagtgttcgaactccaggcacttatcctgaggattccaggcgggactatccagctcgagggagagagttttattcagaatgggaaacttaccaaggagactactatgaatcacgatactacgatgatcctcgggaatacagggattacaggaatgatccttatgaacaagatattagggaatatagttacaggcaaagggaacgagaaagagaacgtgaaagatttgagtctgaccgggacagagaccatgagaggaggccgattgaacgaagtcaaagtcctgttcacttgcgacgtccacagagtcctggagcgtctccctctcaggcagagaggttgccgagtgattctgagaggaggctttacagccgatcctcagaccggagtggaagctgtagctcactctcccctccaagatatgagaaactggacaagtctcgtttggagcgctatacaaaaaatgaaaagacagataaagaacgaacttttgatccggagagagtggagagagagagacgcttaatacggaaggaaaaagtggaaaaggacaaaactgacaagcagaaacgcaaaggaaaggttcactcccctagttctcagtcttcagaaacggaccaagaaaatgagcgagagcaaagccctgaaaagcccaggagttgtaataaactgagcagagagaaagctgacaaagagggaatagcgaaaaaccgcctggaactcatgccttgcgtggttttgactcgagtgaaagagaaagagggaaaggtcattgaccacactcctgtggaaaagttgaaagccaagcttgataatgacactgtcaaatcttctgccctggaccagaaacttcaggtctctcagacggagcctgcaaaatctgacttgtctaaactggaatcagttagaatgaaagtaccaaaggaaaaggggctttcaagccatgttgaagtggtggagaaggaaggcaggcttaaagccaggaagcacctcaagcctgagcagcctgcagatggggtaagtgctgtggatctggagaagctggaagccaggaaaaggcgctttgcagattccaattt

SEQ ID NO: 29675 - DNA, 12232 bp, Homo sapiens
  source 1..12232: mol_type = unassigned DNA
tgagctgcgaggcccgagagtcagaacctgggggagagggatggtctctgcacgggggggagccggaggagccgccgccgctgccgacgccaccgccgcagccgccgccgccgccgccccggcacccgcctcccggcgctgacggtctcgtacgaagccggcgagggggagccagcagcggcggtcgccggcacgccgcccagcatggtccgggaaaccaggcatctctgggtgggcaacttacccgagaacgtgcgggaagagaagatcatcgagcatttcaaacgatatggccgcgtggaaagtgtcaaaattcttcccaagaggggatctgaaggaggagtggctgcctttgtggattttgtggacatcaaaagtgcacagaaagctcacaactcggtcaacaaaatgggtgacagagacctacgcacggattataatgaaccaggcaccatcccgagtgctgctcggggattggatgatacagtttccatagcatctcgtagtagagaggtttctgggttcagaggaggtggtggagggcctgcttatggtcccccaccgtcacttcatgcacgagaaggacgttatgagcggagacttgatggggcttcagataacagggagcgtgcttatgaacatagtgcctatggacaccatgaacgggggacgggaggatttgatcggacaagacattacgatcaggattactatagagatcctcgagagcggactttacaacatgggctctattacgcttctcggagtcgaagtccaaatcgctttgatgctcatgacccccgatatgaacctagggctcgcgagcagtttacactgcccagtgtggtacacagggatatctacagggatgatattacccgggaggtacgaggcagaaggccagagcggaattaccagcacagcaggagtcggtcaccacattcatcccagtctagaaatcagtctcctcagagactggctagccaagcatctagacccacaaggtcccctagcggcagcggctctagaagtagatcctccagtagtgattcaatcagcagcagcagtagtaccagcagtgacagcagtgattccagcagtagttcaagtgatgattctccagctcgatcagttcagtctgcagcagtccctgcacccacttcccagttgctttcatctctggaaaaagatgagccccgtaaaagttttggcatcaaggtccagaatcttccagtacgctctacagatacaagccttaaagatggccttttccatgaatttaagaaatttggaaaagtaacttcagtgcagatacatggaacttcagaagagaggtatggtctggtattctttcggcagcaagaggaccaagaaaaagccttgactgcatcaaaaggaaaacttttctttggcatgcagattgaagtaacagcatggataggtccagaaacagaaagtgaaaatgaatttcgccccttggatgaaaggatagatgaatttcaccccaaagcaacaagaactctctttattggcaaccttgaaaaaaccactacttaccatgaccttcgcaacatcttccagcgctttggagaaattgtggatattgacattaagaaagtaaatggagttcctcagtatgcgtttctgcaatactgtgatattgctagcgtttgtaaagctattaagaagatggatggggaatatcttggaaataatcgcctcaagctgggttttggaaagagcatgcctacaaactgcgtgtggctagatgggctttcttcgaatgtgtcagatcagtatttaacacgacatttctgccgatatgggcctgtggtaaaggtggtgtttgaccgcttaaaaggcatggccctggttctctacaatgaaattgaatatgcacaagcagctgtaaaagagaccaaagggaggaaaatcggtgggaataaaattaaggtggattttgcaaatcgggaaagtcagctggctttttatcactgcatggagaaatctggtcaagacatcagagacttttatgaaatgttagccgaaagaagagaggaacgaagggcatcctacgactataaccaagatcgtacatattatgagagtgttcgaactccaggcacttatcctgaggattccaggcgggactatccagctcgagggagagagttttattcagaatgggaaacttaccaaggagactactatgaatcacgatactacgatgatcctcgggaatacagggattacaggaatgatccttatgaacaagatattagggaatatagttacaggcaaagggaacgagaaagagaacgtgaaagatttgagtctgaccgggacagagaccatgagaggaggccgattgaacgaagtcaaagtcctgttcacttgcgacgtccacagagtcctggagcgtctccctctcaggcagagaggttgccgagtgattctgagaggaggctttacagccgatcctcagaccggagtggaagctgtagctcactctcccctccaagatatgagaaactggacaagtctcgtttggagcgctatacaaaaaatgaaaagacagataaagaacgaacttttgatccggagagagtggagagagagagacgcttaatacggaaggaaaaagtggaaaaggacaaaactgacaagcagaaacgcaaaggaaaggttcactcccctagttctcagtcttcagaaacggaccaagaaaatgagcgagagcaaagccctgaaaagcccaggagttgtaataaactgagcagagagaaagctgacaaagagggaatagcgaaaaaccgcctggaactcatgccttgcgtggttttgactcgagtgaaagagaaagagggaaaggtcattgaccacactcctgtggaaaagttgaaagccaagcttgataatgacactgtcaaatcttctgccctggaccagaaacttcaggtctctcagacggagcctgcaaaatctgacttgtctaaactggaatcagttagaatgaaagtaccaaaggaaaaggggctttcaagccatgttgaagtggtggagaaggaaggcaggcttaaagccaggaagcacctcaagcctgagcagcctgcagatggggtaagtgctgtggatctggagaagctggaagccaggaaaaggcgctttgcagattccaatttaaaagcagaaaagcaaaaaccagaggtcaagaaaagcagtccagagatggaggatgctcgcgtgctttcaaaaaagcagcctgacgtgtcctctagagaggtcattctgctgagggaaggagaggctgaaagaaagcctgtgaggaaagaaattcttaaaagagaatctaaaaaaatcaaactggacagacttaatactgttgccagccccaaagactgtcaggagcttgccagtatttctgttgggtctggctcaaggcccagctcagacctacaagcaagactgggagaactagcaggtgaatctgtggaaaatcaagaagtccaatcaaaaaagcccattccctcaaaaccacagctcaaacagctgcaggtattagatgatcaaggaccagagagagaagacgttaggaaaaactattgcagtcttcgtgatgaaacacctgaacgtaaatcaggccaagagaaatcacattcagtaaatactgaagaaaaaattggcattgacatcgatcacacgcagagttaccgaaaacaaatggaacagagtcgtaggaaacagcagatggaaatggaaatagccaagtctgagaagtttggcagtcctaaaaaagatgtagatgaatatgaaagacgtagcctcgttcacgaggtaggcaaaccccctcaagatgtcactgatgactctcctcctagcaaaaagaaaaggatggatcatgtcgattttgatatctgcaccaagcgagaacggaattacagaagttcacgccaaatcagcgaagattctgaaaggactggtggttctcccagtgtccgacatggttccttccatgaagatgaggatcccataggctcccctaggctactgtcagtaaaagggtctcctaaagtagatgaaaaagtcctcccctattctaacataacagtcagggaagagtctttaaaatttaatccttatgattctagcaggagagaacagatggcagatatggccaaaataaaactatctgtcttgaattctgaagatgaactaaatcgttgggactctcagatgaaacaggatgctggcagatttgatgtgagtttcccaaacagcataattaagagagatagccttcgaaaaaggtctgtacgagatctggaacctggtgaggtgccttctgattctgacgaagatggtgaacacaaatcccactcacccagagcctctgcattatatgaaagttctcgattgtcttttttattgagggacagagaagacaagctacgtgagcgagatgaaagactctctagttctttagaaaggaacaaattttactcttttgcattggataagacaatcacaccagacactaaagctttgcttgaaagagctaaatccctctcttcatctcgtgaagaaaattggtcttttcttgattgggactcccgatttgcaaattttcgaaacaacaaagataaagaaaaggttgactctgctccaagacctattccatcctggtacatgaaaaagaagaaaattaggactgattcagaagggaaaatggatgataagaaagaggaccataaagaagaagagcaagagaggcaggaattgtttgcttctcgttttttacacagctcaatctttgaacaagattccaagcgattgcagcatctagagagaaaagaggaagattctgacttcatttctggtaggatctatgggaagcagacatctgagggagcaaacagcacaactgattccattcaagaaccagtagttctgttccatagcagatttatggagctcacacggatgcaacagaaagaaaaagaaaaagaccagaaacccaaagaggttgagaaacaggaagatacagagaatcatcccaagaccccagaatctgctcctgagaataaagattcagaactgaaaactccaccttccgttgggcctccaagtgtcacagtcgtaactctagaatcagccccatcagcactagagaagaccactggtgacaaaacggtagaggcgcctttggtaacagaagagaagactgtggagccagctaccgtctcagaagaagcaaagcctgcatctgaacctgctcctgcccctgtggaacagctggaacaagtagacctgcccccaggagcagaccccgataaagaagctgccatgatgcctgcgggtgttgaggaaggttcatcaggtgaccagccgccttatctggatgccaagcctccaactcccggggcctcgttttcccaggcagagagcaacgtagatccagagcctgacagtacccagccactttcaaaaccagctcagaagtctgaggaagccaatgagccaaaggccgaaaagccagacgccactgcagatgctgagcctgatgcaaaccagaaagccgaagctgctcctgagtctcagcccccagcttctgaagatttagaggttgatcctccagttgctgcaaaggataaaaagccaaacaaaagcaagcgttcaaagacccctgttcaggcagctgcagtgagtatcgtggagaagcccgtcacaaggaagagtgagaggatagaccgggaaaaactcaagcggtccaattctcctcggggagaagcacagaagcttttggaattgaagatggaggcagagaagattacaaggactgcttctaaaaactctgctgcagaccttgaacatcccgaaccaagtttgcctctcagccgaacaaggcgccggaatgtaaggagcgtctatgcaaccatgggtgaccatgaaaaccgctctcctgtcaaagagcccgttgagcaaccaagagtgaccagaaagagattggagcgagagcttcaggaggctgcagcggttcccaccacccctcggaggggaaggcctccaaagacacgccggcgagccgatgaagaggaggagaacgaggccaaggaacctgcagaaacactcaagccacctgagggatggcggtcgccaaggtcccagaaaactgcagctggtggtggaccccaagggaaaaagggaaaaaatgaaccgaaggtggatgctacacgtcctgaggccaccactgaggtgggcccccaaataggcgtgaaagagagctccatggaacccaaggctgctgaggaggaggcagggagtgaacagaaacgtgacagaaaagatgctggcacagacaaaaacccccctgaaaccgcccctgttgaagttgtagagaaaaaaccggcccctgaaaaaaactccaaatcaaagagaggaagatctcgaaactccaggttagcagtggacaaatctgcaagtctgaaaaatgtggatgctgctgtcagtcccaggggggctgcagcacaggcaggggagagggaatctggggtggtggcagtctcccctgagaaaagtgagagtccccaaaaggaggatggtttatcatcccagttgaaaagtgatccagttgatccagacaaggaaccagagaaagaagacgtgtctgcctctgggccgtccccagaagccacccagttagccaagcagatggagctggagcaggccgtggaacacatcgcaaagctcgctgaggcctctgcctctgctgcctataaggcagatgcaccagagggccttgccccagaggacagggacaagcctgcacaccaagcaagtgaaacagagctggctgcggccatcggctccatcatcaatgacatttctggggagccagaaaacttcccagcacctccaccttatcctggagaatcccagacagatctgcaaccccccgcaggtgcacaggcgctgcagccttctgaggaaggaatggagacagatgaggctgtatctggcatcctggaaactgaggctgctacagaatcttctaggcctccagtcaatgctcctgacccctcagccggcccaacagataccaaggaagccagaggaaatagcagtgaaacctcacactcagtgccagaagccaaagggtctaaagaagtggaagtcactcttgttcggaaagacaaagggcgccagaaaacaacccgatcacgccgcaagcgaaacacaaacaagaaagtggtggctcctgtagagagccatgtccctgaatccaaccaagctcaaggtgagagtcctgctgcaaatgaggggacaacagtacagcaccccgaagccccacaggaagaaaagcagagtgagaaaccccattccactcctcctcagtcatgtacttctgacctaagcaagattccctccacagagaattcgtcccaagaaatcagtgttgaggaaaggactccaaccaaagcatctgtgcccccagaccttcccccacctccccagccagcaccggtggatgaggagcctcaagccaggttcagggtgcattccatcattgaaagtgacccggtgaccccacccagcgatccaagcatccccatacccacactgccttctgtaactgcagcaaagctctcacctcctgtcgcctctggggggatcccacaccagagcccccctactaaggtgacagagtggatcacaaggcaggaggagccacgggctcagtctactccatctccagctcttcccccagacacaaaggcctctgatgttgacaccagctccagcaccctgaggaagattctcatggaccccaagtatgtgtctgccacaagtgtcacttccacaagtgtcaccacagccattgcagagcctgtcagtgctgccccttgcctacatgaggccccgcccccgccagttgactctaaaaagcctttagaagaaaaaacagcacctccagtgacaaacaactctgagatacaagcctcggaggtgctggtagctgctgacaaggaaaaggtggctccagtcattgctcccaaaattacctctgttattagccggatgcctgtcagcattgacctggaaaattcacagaagataaccttggcaaaaccagctcctcaaaccctcactggtctggtgagcgcactcactggcctggtgaacgtctccctggtcccggtgaatgccctgaaaggccccgtgaagggctcagtgaccacactgaaaagtttggtgagcacccctgctgggcccgtgaacgtcctgaaagggcctgtgaatgttcttacggggccagtgaatgttctcaccactccagtgaacgccacggtgggcacagtgaatgccgccccaggcacagtcaatgccgctgcgagtgcagtgaatgccacagcaagtgcagtgaccgtcacagcgggtgcggttactgctgcatctggtggtgtaacggccacaacaggcacggtgacaatggcaggggcagtgattgcgccgtcaacaaagtgcaaacagagagcgagtgctaatgaaaacagtcggttccacccagggtccatgcctgtgatcgacgatcgtccggcagacgcgggctcaggggcggggctgcgtgtgaacacttctgaaggggttgtgctcctgagttactcagggcagaagaccgaaggcccacagcggatcagcgccaagatcagccagatccccccggccagtgcaatggacattgaatttcagcagtcagtgtccaagtcccaggtcaaacctgattctgtcacagcatcgcagcctccatccaaaggccctcaagctcctgcaggctatgcgaacgtggccacccattccacgttggtactgaccgcccagacatataatgcctctcctgtgatttcgtctgtgaaggccgataggccatccttggagaagcccgagcccattcacctctcggtgtccacgcctgtcacccagggaggcacagtgaaggttctcacccaggggatcaacacaccccctgtgctggttcacaaccagctggtcctcaccccaagcattgtcaccacaaacaagaagcttgctgaccccgtcacccttaaaatcgagaccaaggtccttcagccggccaacctggggtccacgctcacgccccaccaccctcctgctctgcccagcaaactgcctacagaagtcaaccatgtcccctcggggcccagcatcccagcagatcgaactgtctcccatttggcagctgcaaagctagatgctcattctcctcgaccaagtggacccgggccatcctcattcccaagggcaagccaccccagcagtactgcatctacggcgctctccaccaacgccacagtcatgctggctgcaggcatcccagtgccccagttcatctccagcatccacccagagcagtctgtcatcatgccaccccacagcatcacccagactgtgtccctgagccacctctcccagggcgaggtgagaatgaacactcccacgctgcccagtatcacctacagcatccggccagaagcgcttcactctcctcgggctccgctgcagccccagcaaatagaggtcagggccccacagcgtgccagcaccccgcagccagccccagctggtgtgcctgcactggcctcccagcaccctcccgaggaggaagtgcattatcaccttcctgtcgctcgagccacagcccctgtgcagtcagaggtactagtcatgcagtctgagtaccgactgcacccctatactgtgccacgggatgtgaggatcatggtgcatccacatgtgacggcagtcagcgagcagcccagggccgcggatggggtggtgaaggtgccaccagccagcaaggcccctcagcagccagggaaggaagctgccaagacaccagatgccaaagctgcccccacccccacccctgcccccgtccctgtccctgtcccccttcctgcccctgctcctgcccctcatggtgaggcccgtatcctcacagttacccccagtaaccaactccaggggctgcctctgacccctcctgtggtggtgacccatggggtgcagattgtgcactccagcggggagctgtttcaagagtaccggtacggcgacatccgcacctaccaccccccggcccagctcacacacactcagtttcccgccgcttcctctgttggcctgccttcccggaccaagacagctgctcagggccctcctcctgaaggtgagcccctgcagcctcctcagcctgtgcagtccacacagcctgcccagcctgcaccaccctgcccgccctcccagctcggtcagcccggccagccaccaagcagcaagatgcctcaagtgtcccaggaggcaaaggggacccagacgggagtagagcagcctcgcctcccagctggacctgcaaacaggccacctgagcctcacacccaggttcagagggcacaagcagaaacaggcccgacttccttcccctcccctgtgtctgtctccatgaagcctgaccttccagtctctcttcccactcagactgccccaaaacagccgttgtttgtcccaacaacctctggccccagcaccccaccaggactggttctgccacacactgaattccagccagcccccaaacaagattcctctccacacctgacttcccagagacccgtggatatggttcaacttctgaagaagtaccccatcgtgtggcagggcctgctggccctcaagaatgacacagctgctgtgcagctccacttcgtctctggcaacaacgtcctggcccatcggtccctgcccctttctgaaggagggcccccactaaggatcgcccagaggatgcggctggaggcaacgcagctggaaggggttgcccgaaggatgacggtggagacagattactgtctgctgctggctctgccctgtggccgtgaccaagaggatgttgtgagccagaccgagtccctcaaggctgccttcatcacttacctgcaggccaagcaggcggcagggatcatcaacgttcccaaccctggctccaatcagcctgcctacgtgctgcagatcttcccgccctgtgagttctctgagagtcacctgtcccgcctggcccctgacctccttgccagcatctccaacatctctccccacctcatgattgtcattgcctccgtgtgagccactgagtggttatcacctcagtgaatcttcccagggctctgcagtaaaaacaaaggacaacccagccaagcagaggaagaagctgccgaaggggacagactccactgccagacggccagccgtttgctgtcctgccgcccggctcagtcggccagacttcctctaggagtggtgctgctaccttgtatgtttacataatgctttagcccaaggacacatcaccaacccatggactcgcagacaccggggctgggtttctctttcctctttttggagaaaaggaacagggcagtggaatgaaaattttttgtttgtttgtttttaagaaacaagaaaacagaactgcctttgcactaaattagtgacttggacttttgcccagtgaagacaggctgtgacactctggatgtcttggtgtgtgtagacacacattgcagactcttaacgcaggaaggacttcaaacttctgctgagaccttggggtcaaggaacatttcattggttttttttgtccacccccatctcccttgctcatttggatgcgtcaccttaattctcctgctgccaccgtctttgattcaccgggatgtacagtttacagttgaagagcaaacagaaaggttttctcttggtgggatatgcagaacttgggatgtgtgtatatataaatatataatatatataaatatatataatactgacttaaaaaatcaaatcccccgacatacgttttttttaatctgtgccaaaaatgtgttttcagaggaaatcttattttcatattcagactttgtattgcccactcatttgtataagtgcgcttcggtacagcacgggtcctgctcccgcgatgtggaagtgtcacacggcacctgtacaaaaagactggctaacccctcttcctattaccttgatctcttcccccaacttcctaacacttattaatttatgaaactgtttttctcagcgcagttttgttttgtgtgtccattggattacaaactttattaaaaaatataaaacacaccaa

SEQ ID NO: 29676 - DNA, 1733 bp, Homo sapiens
  source 1..1733: mol_type = unassigned DNA
ctatatggaatatttctggaatattagagcctacagattcttttagaagttgatatctgcctctccattttcactacataaagtgtacaaacaaattggattgtaacaaaaaatctggcagaccataatgattcaaccacttggattctacaaacaatactttaacatggaaatgtgtacttggatgaagaagagagaaggcaatgcctgatttttccattttggatctacacaatttctgtattgttggaattacactctttgatggaatggggaaaaattaaaatgatggatgtttcctaaatcctggaatatagccattcttttctaattgctgggatatatgggatgtcttgctgtcaagattccactagcccagggaaagaggattactatatcatttcttaagcaagttgctgtccaatcaaaggtactttagctttgaacacatggtgatgatcagttgtggatacagcaatcaaaattgactgggctggatggctacaaaagtgaactattggcgagcaactgtgccttcctcattcgttggaattgtagaggatatttcctcttctgccagctacctgattcatacttagggctggaaatatttatgaatgtggataaatttctaattgtctgctatctcaagaaagaagtctgggggtttgagagttacagtttgtctgggactacttgcttccagtggaattattttgtctggtcactaagattttttttttcttgtggttcatctaaatatcatttgacacccttgcccattaagaaggtggattacccccataagaggggccaaaattggggaagttatgttcacaattctctccctagatttaattgggattataggtcgtgtttccacacttggaaaagggcttcagataacagggagcgtgcttatgaacatagtgcctatggacaccatgaacgggggacgggaggatttgatcggacaagacattacgatcaggattactatagagatcctcgagagcggactttacaacatgggctctattacgcttctcggagtcgaagtccaaatcgctttgatgctcatgacccccgatatgaacctagggctcgcgagcagtttacactgcccagtgtggtacacagggatatctacagggatgatattacccgggaggtacgaggcagaaggccagagcggaattaccagcacagcaggagtcggtcaccacattcatcccagtctagaaatcagtctcctcagagactggctagccaagcatctagacccacaaggtcccctagcggcagcggctctagaagtagatcctccagtagtgattcaatcagcagcagcagtagtaccagcagtgacagcagtgattccagcagtagttcaagtgatgattctccagctcgatcagttcagtctgcagcagtccctgcacccacttcccagttgctttcatctctggaaaaagatgagccccgtaaaagttttggcatcaaggtccagaatcttccagtacgctctacagatacaagccttaaagatggccttttccatgaatttaagaaatttggaaaagtaacttcagtgcagatacatggaacttcagaagagaggtatggtctggtattctttcggcagcaagaggaccaagaaaaagccttgactgcatcaaaaggaaaacttttctttggcatgcagattgaagtaacagcatggataggtccag

SEQ ID NO: 29677 - DNA, 891 bp, Homo sapiens
  source 1..891: mol_type = unassigned DNA
gccaagcatctagacccacaaggtcccctagcggcagcggctctagaagtagatcctccagtagtgattcaatcagcagcagcagtagtaccagcagtgacagtgattccagcagtagttcaagtgatgattctccagctcgatcagttcagtctgcagcagtccctgcacccacttcccagttgctttcatctctggaaaaagatgagccccgtaaaagttttggcatcaaggtccagaatcttccagtacgctctacagatacaagccttaaagatggccttttccatgaatttaagaaatttggaaaagtaacttcagtgcagatacatggaacttcagaagagaggtatggtctggtattctttcggcagcaagaggaccaagaaaaagccttgactgcatcaaaaggaaaacttttctttggcatgcagattgaagtaacagcatggataggtccagaaacagaaagtgaaaatgaatttcgccccttggatgaaaggatagatgaatttcaccccaaagcaacaagaactctctttattggcaaccttgaaaaaaccactacttaccatgaccttcgcaacatcttccagcgctttggagaaattgtggatattgacattaagaaagtaaatggagttcctcagtatgcgtttctgcaatactgtgatattgctagcgtttgtaaagctattaagaagatggatggggaatatcttggaaataatcgcctcaagctgggttttggaaagagcatgcctacaaactgcgtgtggctagatgggctttcttcgaatgtgtcagatcagtatttaacacgacatttctgccgatatgggcctgtggtaaaggtggtgtttgaccgcttaaaaggcatggccctggttc

SEQ ID NO: 29678 - DNA, 1499 bp, Homo sapiens
  source 1..1499: mol_type = unassigned DNA
gtcacgggattcggagccgggcggctacgggcggggtgtcgcagctctcttcgacgtacctgtcctcaggagccgcggcggcgactgcgcctcggacggccgtcggggccgagaaccatgagccccaggggcacgggctgctccgccgggctgctgatgactgtcggctggctgcttctggcgggcctccagtccgcgcgcgggaccaacgtcaccgctgccgtccaggatgccggcctggcccacgaaggcgagggcgaggaggagaccgaaaacaacgacagcgagaccgcggagaactacgctccgcctgaaaccgaggatgtttcaaataggaatgtcgtcaaagaagtagaattcggaatgtgcaccgttacatgtggtattggtgttagagaagttatattaacaaatggatgccctggtggtgaatccaagtgtgttgtacgggtagaagaatgccgtggaccaacagattgtggctggggtaaaccaatttcagaaagtcttgaaagtgttagattggcatgtattcacacatctcccttaaatcgtttcaaatatatgtggaaacttctaagacaagaccaacaatccattatacttgtaaatgattcagcaatcctagaagtacgcaaggaaagtcaccccttggctttcgagtgtgacacactggataataatgaaatagtagcaactattaaattcacagtctatacgagcagtgaattgcagatgagaagatcaagcctaccagccactgatgcagccctaatttttgtgctgaccataggagtcattatctgtgtatttataattttcttattgatcttcataatcataaattgggcagcagtcaaggctttctggggggcaaaagcctctacacctgaggtacaatccgagcagagttctgtgagatacaaagattcaacttctcttgaccaattaccaacagaaatgcctggtgaagatgatgctttaagtgaatggaatgaatgatgtttgaatgatatataacaaaccaaaggatattacagaatattagattcattattacaaaaataaaatacacattgaaatactttaataatgttgcgatggattgccacagtgtgaaggaaatgcagtgtggggataggactattttatcagtgcatttttccagtacagttatcaaatattacttttaatttgttctcaacacttatttcaggtaatagcttggggatatttatctaaaggtacccccaacaaatcttctaagtgcatttttgatcactttgataacttcttaggtgatttgcctgttttgtcttaaataagaacaatgtaatatagaaatgctttacatattagactttctctcccctggaagcactgggttgaacttgctaaagtaaatcatactttagaatctcttcagggaatgtgacatacaaagtttgtaagacatgaagtaataacgataatgataacaataaatgcttacttagtga

SEQ ID NO: 29679 - DNA, 817 bp, Homo sapiens
  source 1..817: mol_type = unassigned DNA
ggcaaggttgtgggggacatcttgagctgaagcagggttttgagccactgctgctgctgccattgtcaccatggtctcagctctgcggggagcacccctgatcagggtgcactcaagccctgtttcttctccttctgtgagtggaccacggaggctggtgagctgcctgtcatcccaaagctcagctctgagccagagtggtggtggctccacctctgccgccggcatagaagccaggagcagggctctcagaaggcggtggtgcccagctgggatcatgttgttggccctggtctgtctgctcagctgcctgctaccctccagtgaggccaagctctacggtcgttgtgaactggccagagtgctacatgacttcgggctggacggataccggggatacagcctggctgactgggtctgccttgcttatttcacaagcggtttcaacgcagctgctttggactacgaggctgatgggagcaccaacaacgggatcttccagatcaacagccggaggtggtgcagcaacctcaccccgaacgtccccaacgtgtgccggatgtactgctcagatttgttgaatcctaatctcaaggataccgttatctgtgccatgaagataacccaagagcctcagggtctgggttactgggaggcctggaggcatcactgccagggaaaagacctcactgaatgggtggatggctgtgacttctaggatggacggaaccatgcacagcaggctgggaaatgtggtttggttcctgacctaggcttgggaagacaagccagcgaataaaggatggttgaacgtgaa

SEQ ID NO: 29680 - DNA, 744 bp, Homo sapiens
  source 1..744: mol_type = unassigned DNA
ggacctcgaaggggcagttatggtgggagccatccaaggtgtcacagggctgggcttttcatttaacaaatttgttctgatggatgtgtatagaatagcttggaagagtggttgagacatgatacaagaagaccatgaaggaagccaggatggaggggtgcactcaagccctgtttcttctccttctgtgagtggaccacggaggctggtgagctgcctgtcatcccaaagctcagctctgagccagagtggtggtggctccacctctgccgccggcatagaagccaggagcagggctctcagaaggcggtggtgcccagctgggatcatgttgttggccctggtctgtctgctcagctgcctgctaccctccagtgaggccaagctctacggtcgttgtgaactggccagagtgctacatgacttcgggctggacggataccggggatacagcctggctgactgggtctgccttgcttatttcacaagcggtttcaacgcagctgctttggactacgaggctgatgggagcaccaacaacgggatcttccagatcaacagccggaggtggtgcagcaacctcaccccgaacgtccccaacgtgtgccggatgtactgctcagatttgttgaatcctaatctcaaggataccgttatctgtgccatgaagataacccaagagcctcagggtctgggttactgggaggcctggaggcatcactgccagggaaaagacctcactga

SEQ ID NO: 29681 - DNA, 508 bp, Homo sapiens
  source 1..508: mol_type = unassigned DNA
ggcaaggttgtgggggacatcttgagctgaagcagggttttgagccactgctgctgctgccattgtcaccatggtctcagctctgcggggagcacccctgatcagggtctgccttgcttatttcacaagcggtttcaacgcagctgctttggactacgaggctgatgggagcaccaacaacgggatcttccagatcaacagccggaggtggtgcagcaacctcaccccgaacgtccccaacgtgtgccggatgtactgctcagatttgttgaatcctaatctcaaggataccgttatctgtgccatgaagataacccaagagcctcagggtctgggttactgggaggcctggaggcatcactgccagggaaaagacctcactgaatgggtggatggctgtgacttctaggatggacggaaccatgcacagcaggctgggaaatgtggtttggttcctgacctaggcttgggaagacaagccagcgaataaaggatggttgaacgtgaa

SEQ ID NO: 29682 - DNA, 888 bp, Homo sapiens
  source 1..888: mol_type = unassigned DNA
ggacctcgaaggggcagttatggtgggagccatccaaggtgtcacagggctgggcttttcatttaacaaatttgttctgatggatgtgtatagaatagcttggaagagtggttgagacatgatacaagaagaccatgaaggaagccaggatggaggggtgcactcaagccctgtttcttctccttctgtgagtggaccacggaggctggtgagctgcctgtcatcccaaagctcagctctgagccagagtggtggtggctccacctctgccgccggcatagaagccaggagcagggctctcagaaggcggtggtgcccagctgggatcatgttgttggccctggtctgtctgctcagctgcctgctaccctccagtgaggccaagctctacggtcgttgtgaactggccagagtgctacatgacttcgggctggacggataccggggatacagcctggctgactgcctatgctctgccctatgcaggggtctgccttgcttatttcacaagcggtttcaacgcagctgctttggactacgaggctgatgggagcaccaacaacgggatcttccagatcaacagccggaggtggtgcagcaacctcaccccgaacgtccccaacgtgtgccggatgtactgctcagatttgttgaatcctaatctcaaggataccgttatctgtgccatgaagataacccaagagcctcagggtctgggttactgggaggcctggaggcatcactgccagggaaaagacctcactgaatgggtggatggctgtgacttctaggatggacggaaccatgcacagcaggctgggaaatgtggtttggttcctgacctaggcttgggaagacaagccagcgaataaaggatggttgaacgtg

SEQ ID NO: 29683 - DNA, 971 bp, Homo sapiens
  source 1..971: mol_type = unassigned DNA
ttccattcacagactcttgttgggcagcagccacccgctcacctccatccccaggacttagagggacgcagggcgttgggaacagaggacactccaggcgctgaccctgggaggccaggaccagggccaaagtcccgtgggcaagaggagtcctcagaggtccttcattcagcggttccgggaggtctgggaagcccacggcctggctggggcagggtcaacgccgccaggccgccatggtcctgtgctggctgctgcttctggtgatggctctgcccccaggcacgacgggcgtcaaggactgcgtcttctgtgagctcaccgactccatgcagtgtcctggtacctacatgcactgtggcgatgacgaggactgcttcacaggccacggggtcgccccgggcactggtccggtcatcaacaaaggctgcctgcgagccaccagctgcggccttgaggaacccgtcagctacaggggcgtcacctacagcctcaccaccaactgctgcaccggccgcctgtgtaacagagccccgagcagccagacagtgggggccaccaccagcctggcactggggctgggtatgctgcttcctccacgtttgctgtgaccaacagggaggacagggcctgggactgttctcccagatccgccactccccatgtccccatgtccttcccccactaaatggccagagaggccctggacaacctcttgcggccctggcttcatcccttctaaggctgtccaccaggagcccggtgctaggggaagcatccccaggcctgactgagcggcaggggagcacggcccgtgggtttgattgtattactctgttccactggttctaagacgcagagcttctcacatctcaatcaggatgcttctctccattggtagcactttagagtccatgaaatatggtaaaaaatatatatatatcataataaatgacagctgatgttcatgg

SEQ ID NO: 29684 - DNA, 732 bp, Homo sapiens
  source 1..732: mol_type = unassigned DNA
ggcagcaacagagttgcaggtgtaaaataacgggaaggcgggatgcgtggctaaattgctctgcgtgcacaaagagtaggagagcccagagttccagaatgcccctaattccgaacaccacagggtgagtctggagcaagtcacctgggagggcttacaggtgccataatgaaggcctggggcactgtggtagtgaccttggccacgctgatggttgtcactgtggatgccaagatctatgaacgctgcgagctggcggcaagactggagagagcagggctgaacggctacaagggctacggcgttggagactggctgtgcatggctcattatgagagtggctttgacaccgccttcgtggaccacaatcctgatggcagcagtgaatatggcattttccaactgaattctgcctggtggtgtgacaatggcattacacccaccaagaacctctgccacatggattgtcatgacctgctcaatcgccatattctggatgacatcaggtgtgccaagcagattgtgtcctcacagaatgggctttctgcctggacttcttggaggctacactgttctggccatgatttatctgaatggctcaaggggtgtgatatgcatgtgaaaattgatccaaaaattcatccatgactcagattcgaagagacagattttatcttcctttcatttctttctcttgtgcatttaataaaggatggtatctataaacaatgc

SEQ ID NO: 29685 - DNA, 571 bp, Homo sapiens
  source 1..571: mol_type = unassigned DNA
tgccataatgaaggcctggggcactgtggtagtgaccttggccacgctgatggttgtcactgtggatgccaagatctatgaacgctgcgagctggcggcaagactggagagagcagggctgaacggctacaagggctacggcgttggagactggctgtgcatggctcattatgagagtggctttgacaccgccttcgtggaccacaatcctgatggcagcagtgaatatggcattttccaactgaattctgcctggtggtgtgacaatggcattacacccaccaagaacctctgccacatggattgtcatgacctgctcaatcgccatattctggatgacatcaggtgtgccaagcagattgtgtcctcacagaatgggctttctgcctggacttcttggaggctacactgttctggccatgatttatctgaatggctcaaggggtgtgatatgcatgtgaaaattgatccaaaaattcatccatgactcagattcgaagagacagattttatcttcctttcatttctttctcttgtgcatttaataaaggatggtatctataaacaatgc

SEQ ID NO: 29686 - DNA, 3948 bp, Homo sapiens
  source 1..3948: mol_type = unassigned DNA
agaagcagaaaaggttggataaaagataaggacagacccacgaagtcaagcatgcggagtgcagccaagccctggaacccagccatcagagcagggggccacggcccagaccgggtgcggcctctgcctgcagcctcttccggcatgaagagttctaagtcttcaacttccttggcttttgagtcccgactcagcaggctcaagagggccagcagtgaggacacgctcaacaagccaggaagtaccgctgcatcgggggtggttcgcctgaagaagaccgccactgccggagccatctcggagctcacggagagccgcctgaggagcggcacaggggcctttacaacaactaaacggacaggcattccagccccacgggaattttcagtaactgtctcaagagagaggtctgtgccacgtggtccctccaaccccaggaaatcagtgtccagtccaacttcttccaacactcccactcctacgaaacacctgaggaccccttccacaaagcccaagcaagagaatgaaggtggagaaaaggctgcgcttgagtcccaagttcgggaacttttggcagaagccaaagcaaaagatagtgaaattaacaggcttcgaagtgaactaaagaaatacaaagagaaaaggactctgaacgctgaggggactgatgctttgggcccaaatgtcgatggaacatcagtctccccaggtgacacggaacctatgataagagctcttgaggagaagaacaagaactttcagaaagagctttccgatctagaggaagaaaaccgggtcctgaaggagaaactgatctatcttgagcactccccaaattcagaaggggcagcaagtcacactggcgacagcagctgcccaacatccataactcaagagtcaagcttcggaagcccaactggaaatcagatgtccagtgacattgatgagtataaaaaaaacatacatggaaatgcattacggacatcaggctcctcaagtagcgatgttaccaaagcttctttgtcgccagatgcttccgactttgagcacattacagcagagacaccctcaaggcccctgtcctccaccagtaacccctttaagagttcaaagtgttctactgctgggagttccccaaacagcgtaagtgaattgtccctggcttccctcacagagaagatacaaaagatggaagaaaaccaccatagcactgcagaagaactacaggctactctacaagaattatcagaccagcaacaaatggtacaggaattgacagctgaaaatgagaagctggtggatgaaaagacgattttagagacatcctttcatcagcatcgagagagggcagagcagctaagtcaagaaaatgagaagctgatgaatcttttacaagagcgagtaaagaatgaagagcccaccactcaggaaggaaaaattattgaactggagcagaagtgcacaggtattcttgaacagggccgctttgaaagagagaagctactcaacattcagcagcagttgacctgtagcttgcggaaggttgaggaagaaaaccaaggagctttagaaatgattaaacgtctgaaggaagaaaatgaaaaactgaatgagtttctagaactggaacggcataataataacatgatggccaaaactttggaagagtgtagagttaccttggaagggctaaaaatggagaatggatctttgaagtctcatttgcagggtgagaagcagaaagccacagaggccagtgctgtggagcagacggcagagagctgcgaagttcaagaaatgttgaaagtagcccgagcagagaaagatctactggaactgtcttgcaatgagctcagacaagaattactaaaggcaaacggtgaaattaaacatgtttccagtctgctggccaaggtggaaaaggattattcatacctgaaggagatatgtgatcaccaagccgaacagctgagcagaaccagcctaaagctgcaagaaaaagcatcagagagtgatgcagagatcaaagacatgaaagaaaccatatttgaattggaagatcaggtggaacagcaccgggctgtcaagttacacaataatcaactcatcagtgagctagaaagtagtgtgatcaagctggaggaacagaagtcagacctggagaggcagctgaagactctgaccaagcagatgaaggaggagaccgaggaatggaggcggttccaggcggatctgcagaccgcagtggtggtggccaatgacatcaagtgtgaggcccagcaggagctgcgcaccgtgaagaggaaactgctggaggaggaggagaagaatgcccggttgcagaaggagctgggggatgtgcagggccacggcagggtggtcaccagcagagccgcccctccacctgtggatgaagagccagagtcctctgaggtcgatgctgctggtcggtggcctggtgtctgtgttagcagaacatctccaacacccccagagtcggcaaccaccgttaagtcacttatcaagtcatttgacttgggacgcccaggtggagctggacagaatatttctgtccataagacccccagaagtcccctaagtgggataccagtgaggactgctccagcagctgctgtctctccaatgcagaggcattcgacttacagcagtgtgcggccagccagcagaggggtgactcaacgcttggaccttcctgaccttcccctctcagatattctaaagggaaggactgagaccctgaagccagacccccacctccgcaagagtccctcactagagtcactgagcagacccccgtctctgggctttggggacacaagactgctgagtgcttccacccgggcatggaaaccacaaagcaaactcagtgtggaaagaaaagaccctctggcagccttggcccgggaatacggtggttccaagcgcaatgctctactgaaatggtgccagaagaagacacaaggttatgcgaacattgacatcaccaatttcagcagcagctggagcgatggcctggccttctgtgctctgctccacacctacctgcctgcccacatcccctaccaggagctgaatagtcaggagaaaaagaggaatctcttgttggcatttgaagcggctgaaagtgtaggcatcaaacccagcctggaactcagcgagatgctgtacacagaccggcccgactggcagagtgtgatgcagtacgtggcccaaatctacaagtactttgagacgtaaccctggagggcctggggcagccaccattgccacctactgcagcttttcctggaagcgcctgattactgtccactgaccctgctctgcccaccacccagctgcctagacttcaaagacaggctcaatccaagtggaccaacacccaaataagaaacagagtgggtcccacgatgtacctgtctgaaatgcaaatgcagctggactgtaaattggggactctttgatctcttgtgggatgcttctaaagagggcagcctccctccttccagaccaagaccccacacccaggcttgttttgctgattatattgggtggctgaacgaacacattatctgcagaaattcagacaaagaacatctccaaatcagtcttttggttgctgttgttaaaaatatcccggctttgcctttatgaaacctttgcccttggctgggtgtggtagctcgtggctgtaatcccagcactttaggaagccaaggcagtaggatcgtttgagcccaggagttcgaggctgcagtgagctatgagcataccactgcactccagcctgtgtgaaagagccagaccctgtctcaaaaaaatgataaaacccaaaactttgcccttgtgaaccctcccttcccccctccccccccaaaaaaaaacaacaaaacacaaaaaataaacatttgttccagggcaacctggaaa

SEQ ID NO: 29687 - DNA, 4799 bp, Homo sapiens
  source 1..4799: mol_type = unassigned DNA
ctggagcggacccgccggacgcaaccgcctcgccagccggagccagcgcgagctcggcacggtggacacccggtccgaggccggcaagccggctggtgcccgagtcggccaagcatgggcaaccactcaggacggcccgaggatccggaaccaggggcctttacaacaactaaacggacaggcattccagccccacgggaattttcagtaactgtctcaagagagaggtctgtgccacgtggtccctccaaccccaggaaatcagtgtccagtccaacttcttccaacactcccactcctacgaaacacctgaggaccccttccacaaagcccaagcaagagaatgaaggtggagaaaaggctgcgcttgagtcccaagttcgggaacttttggcagaagccaaagcaaaagatagtgaaattaacaggcttcgaagtgaactaaagaaatacaaagagaaaaggactctgaacgctgaggggactgatgctttgggcccaaatgtcgatggaacatcagtctccccaggtgacacggaacctatgataagagctcttgaggagaagaacaagaactttcagaaagagctttccgatctagaggaagaaaaccgggtcctgaaggagaaactgatctatcttgagcactccccaaattcagaaggggcagcaagtcacactggcgacagcagctgcccaacatccataactcaagagtcaagcttcggaagcccaactggaaatcagatgtccagtgacattgatgagtataaaaaaaacatacatggaaatgcattacggacatcaggctcctcaagtagcgatgttaccaaagcttctttgtcgccagatgcttccgactttgagcacattacagcagagacaccctcaaggcccctgtcctccaccagtaacccctttaagagttcaaagtgttctactgctgggagttccccaaacagcgtaagtgaattgtccctggcttccctcacagagaagatacaaaagatggaagaaaaccaccatagcactgcagaagaactacaggctactctacaagaattatcagaccagcaacaaatggtacaggaattgacagctgaaaatgagaagctggtggatgaaaagacgattttagagacatcctttcatcagcatcgagagagggcagagcagctaagtcaagaaaatgagaagctgatgaatcttttacaagagcgagtaaagaatgaagagcccaccactcaggaaggaaaaattattgaactggagcagaagtgcacaggtattcttgaacagggccgctttgaaagagagaagctactcaacattcagcagcagttgacctgtagcttgcggaaggttgaggaagaaaaccaaggagctttagaaatgattaaacgtctgaaggaagaaaatgaaaaactgaatgagtttctagaactggaacggcataataataacatgatggccaaaactttggaagagtgtagagttaccttggaagggctaaaaatggagaatggatctttgaagtctcatttgcagggtgagaagcagaaagccacagaggccagtgctgtggagcagacggcagagagctgcgaagttcaagaaatgttgaaagtagcccgagcagagaaagatctactggaactgtcttgcaatgagctcagacaagaattactaaaggcaaacggtgaaattaaacatgtttccagtctgctggccaaggtggaaaaggattattcatacctgaaggagatatgtgatcaccaagccgaacagctgagcagaaccagcctaaagctgcaagaaaaagcatcagagagtgatgcagagatcaaagacatgaaagaaaccatatttgaattggaagatcaggtggaacagcaccgggctgtcaagttacacaataatcaactcatcagtgagctagaaagtagtgtgatcaagctggaggaacagaagtcagacctggagaggcagctgaagactctgaccaagcagatgaaggaggagaccgaggaatggaggcggttccaggcggatctgcagaccgcagtggtggtggccaatgacatcaagtgtgaggcccagcaggagctgcgcaccgtgaagaggaaactgctggaggaggaggagaagaatgcccggttgcagaaggagctgggggatgtgcagggccacggcagggtggtcaccagcagagccgcccctccgtgagtctgctccctgggctctgtcagctagcagagcatttggtggaagaaagacagcccagctcttgccatgattgggagccgcagccatctctagatgaaagggggaatgtgtagaggagaaattgcctctttataaagagcccagttgtctccttgtgacattctctgtttctcagagtcattgccgtcgagtctctgctttttgtccacattttgggatcagcttactgcatgatcaaagatgatgtttccctctttttacttttcctcagaagattgagctgtcttttatttggagaataaaatgaagttctgaaaaaaacaaagtacaagtcttatgaaaagttatttgcagctggagtgctgaaaagggcacagtggcagagcagatgcagagctgggtacagcgcaggcccgagttcttttgttttttgttgttgttgttgttgttgttttgttttgttttttttttttttttgagacagagtttcactcttgttgcccaggctggagtgcaatggtacgatctcggctcactgcaacctctgcctcccgggttcaagtgattctcttgcctcagccttccaagtagctggaattacaggcgcctgccaccacacccagctaatttttgtattgttagtagagatggggtttcaccgtgttggccaggctgctcttgaactcctgacctcaggtgatccccacctcagcctcccaaagtgctgggattacagacatgagccaccgcacccagaacctaaggcccaagttctactttttggtgttcatttctctgcttccttttgatcgtggtgtctgatcatcttggaattcacattactcaaggcaaaataggaagccatctgcgtgatgtcacattccgaagaagtcagaaggttcggcgagttggagctttactcttgttgcccaggctagagtgcagtggtgcgatcttggctcattgcaagctccgcttcctgggtttaagctattctcctgccttggcctcccaagtagctgggattacaggcatgtgccgtcactcctggctaattttgtatttttagtagagatgcaatttcaccatgttggtcaggctggtctcgaactcctgacctcaagtgatctggccgcctcagcctcccaaagtgctgggattacaggcttgagaccccatgtctggccccttctgtggggtcttgattgagccccttcacttggagtctgacttcattacctcgtctgaaacaaggtgcctccaagctttgggttgatttccagaatcttgttgggttaaacataagtagaagtttgatcataaaggatgttattaagccggataggtaagcacggtgacaatggcaatagaaatctaatggaaaacgattgaatgacaactacaccaaagtttcatggatgaaactcaccccagaaacttagtgttcaaatcagagtgatacacaattcaaaatgtgattttaaacttctggaaatatgtgtgtttgtgaagatccaaatccaattcagcaacctccatcaggcagaaaccttctgcaatcctcacatgaggaactggttcacagtgtacacagcatggagccattagtgacgttatccaaaggatgagacaagacaaaagttactgtctaataaaaggaaaattaggaacaggaatgctctttaaactcaggaagatcttttggggtgtcaaactggacagcacagaatcattagaaaaattagcttggcgtgagaagagacattgaggtcttctctgtaaaatttacttagatacttgtgaataggactgaaatttatattttgggcactctttacctcagattcagagttcttaggattatttaaaattcatttgctggatgttttcaagtataaacaataagaaaactgcaacttcaacttaaaaggcactgctgtatttgcaccctatattttgacctgtcgttaggtactgttgaatatttttatctgtaagcatttatgaagtgcaaaataaacatgttattatatagaagcgtctgctgcttagttttaatcaccagctacgtttctgcagggcctttatgtcgttttgttctacatttttttctgaatacagtttcagaacttcaaagtcacatcaagtaactagaatttgaggtagaaaaaagctggatgtaagttgtaaataggaggttgacatggaatatgaacagtttcattagtagaacaaaagggcatggagtaaaaatgctaattttgcataaatttttaaaactctagggtctcagaaaatatagcatggacttaaagtctagatgtgttttgttgacatttaaatatgaatagattgatgatttaatgtattggattttttcttaattatgaagtattatttaggtatactaataacaaaatggagacgtgtgaagaaaaatattaatctttcttctccctcagtaccacctgtgaggaaatcagtgttaacagtgtgtacatttttctttactcatgaatatgtatagggttcattttcatatttttaataaaaattggattatattcttttca

SEQ ID NO: 29688 - DNA, 2525 bp, Homo sapiens
  source 1..2525: mol_type = unassigned DNA
cggacccgccggacgcaaccgcctcgccagccggagccagcgcgagctcggcacggtggacacccggtccgaggccggcaagccggctggtgcccgagtcggccaagcatgggcaaccactcaggacggcccgaggatccggaaccaggggcctttacaacaactaaacggacaggcattccagccccacgggaattttcagtaactgtctcaagagagaggtctgtgccacgtggtccctccaaccccaggaaatcagtgtccagtccaacttcttccaacactcccactcctacgaaacacctgaggaccccttccacaaagcccaagcaagagaatgaaggtggagaaaaggctgcgcttgagtcccaagttcgggaacttttggcagaagccaaagcaaaagatagtgaaattaacaggcttcgaagtgaactaaagaaatacaaagagaaaaggactctgaacgctgaggggactgatgctttgggcccaaatgtcgatggaacatcagtctccccaggtgacacggaacctatgataagagctcttgaggagaagaacaagaactttcagaaagagctttccgatctagaggaagaaaaccgggtcctgaaggagaaactgatctatcttgagcactccccaaattcagaaggggcagcaagtcacactggcgacagcagctgcccaacatccataactcaagagtcaagcttcggaagcccaactggaaatcagatgtccagtgacattgatgagtataaaaaaaacatacatggaaatgcattacggacatcaggctcctcaagtagcgatgttaccaaagcttctttgtcgccagatgcttccgactttgagcacattacagcagagacaccctcaaggcccctgtcctccaccagtaacccctttaagagttcaaagtgttctactgctgggagttccccaaacagcgtaagtgaattgtccctggcttccctcacagagaagatacaaaagatggaagaaaaccaccatagcactgcagaagaactacaggctactctacaagaattatcagaccagcaacaaatggtacaggaattgacagctgaaaatgagaagctggtggatgaaaagacgattttagagacatcctttcatcagcatcgagagagggcagagcagctaagtcaagaaaatgagaagctgatgaatcttttacaagagcgagtaaagaatgaagagcccaccactcaggaaggaaaaattattgaactggagcagaagtgcacaggtattcttgaacagggccgctttgaaagagagaagctactcaacattcagcagcagttgacctgtagcttgcggaaggttgaggaagaaaaccaaggagctttagaaatgattaaacgtctgaaggaagaaaatgaaaaactgaatgagtttctagaactggaacggcataataataacatgatggccaaaactttggaagagtgtagagttaccttggaagggctaaaaatggagaatggatctttgaagtctcatttgcagggtgagaagcagaaagccacagaggccagtgctgtggagcagacggcagagagctgcgaagttcaagaaatgttgaaagtagcccgagcagagaaagatctactggaactgtcttgcaatgagctcagacaagaattactaaaggcaaacggtgaaattaaacatgtttccagtctgctggccaaggtggaaaaggattattcatacctgaaggagatatgtgatcaccaagccgaacagctgagcagaaccagcctaaagctgcaagaaaaagcatcagagagtgatgcagagatcaaagacatgaaagaaaccatatttgaattggaagatcaggtggaacagcaccgggctgtcaagttacacaataatcaactcatcagtgagctagaaagtagtgtgatcaagctggaggaacagaagtcagacctggagaggcagctgaagactctgaccaagcagatgaaggaggagaccgaggaatggaggcggttccaggcggatctgcagaccgcagtggtggtggccaatgacatcaagtgtgaggcccagcaggagctgcgcaccgtgaagaggaaactgctggaggaggaggagaagaatgcccggttgcagaaggagctgggggatgtgcagggccacggcagggtggtcaccagcagagccgcccctccctccctgggctctgtcagctagcagagcatttggtggaagaaagacagcccagctcttgccatgattgggagccgcagccatctctagatgaaagggggaatgtgtagaggagaaattgcctctttataaagagcccagttgtctccttgtgacattctctgtttctcagagtcattgccgtcgagtctctgctttttgtccacattttgggatcagcttactgcatgatcaaagatgatgtttccctctttttacttttcctcagaagattgagctgtcttttatttggagaataaaatgaagttctg

SEQ ID NO: 29689 - DNA, 3747 bp, Homo sapiens
  source 1..3747: mol_type = unassigned DNA
ctggagcggacccgccggacgcaaccgcctcgccagccggagccagcgcgagctcggcacggtggacacccggtccgaggccggcaagccggctggtgcccgagtcggccaagcatgggcaaccactcaggacggcccgaggatccggaaccaggggcctttacaacaactaaacggacaggcattccagccccacgggaattttcagtaactgtctcaagagagaggtctgtgccacgtggtccctccaaccccaggaaatcagtgtccagtccaacttcttccaacactcccactcctacgaaacacctgaggaccccttccacaaagcccaagcaagagaatgaaggtggagaaaaggctgcgcttgagtcccaagttcgggaacttttggcagaagccaaagcaaaagatagtgaaattaacaggcttcgaagtgaactaaagaaatacaaagagaaaaggactctgaacgctgaggggactgatgctttgggcccaaatgtcgatggaacatcagtctccccaggtgacacggaacctatgataagagctcttgaggagaagaacaagaactttcagaaagagctttccgatctagaggaagaaaaccgggtcctgaaggagaaactgatctatcttgagcactccccaaattcagaaggggcagcaagtcacactggcgacagcagctgcccaacatccataactcaagagtcaagcttcggaagcccaactggaaatcagatgtccagtgacattgatgagtataaaaaaaacatacatggaaatgcattacggacatcaggctcctcaagtagcgatgttaccaaagcttctttgtcgccagatgcttccgactttgagcacattacagcagagacaccctcaaggcccctgtcctccaccagtaacccctttaagagttcaaagtgttctactgctgggagttccccaaacagcgtaagtgaattgtccctggcttccctcacagagaagatacaaaagatggaagaaaaccaccatagcactgcagaagaactacaggctactctacaagaattatcagaccagcaacaaatggtacaggaattgacagctgaaaatgagaagctggtggatgaaaagacgattttagagacatcctttcatcagcatcgagagagggcagagcagctaagtcaagaaaatgagaagctgatgaatcttttacaagagcgagtaaagaatgaagagcccaccactcaggaaggaaaaattattgaactggagcagaagtgcacaggtattcttgaacagggccgctttgaaagagagaagctactcaacattcagcagcagttgacctgtagcttgcggaaggttgaggaagaaaaccaaggagctttagaaatgattaaacgtctgaaggaagaaaatgaaaaactgaatgagtttctagaactggaacggcataataataacatgatggccaaaactttggaagagtgtagagttaccttggaagggctaaaaatggagaatggatctttgaagtctcatttgcagggtgagaagcagaaagccacagaggccagtgctgtggagcagacggcagagagctgcgaagttcaagaaatgttgaaagtagcccgagcagagaaagatctactggaactgtcttgcaatgagctcagacaagaattactaaaggcaaacggtgaaattaaacatgtttccagtctgctggccaaggtggaaaaggattattcatacctgaaggagatatgtgatcaccaagccgaacagctgagcagaaccagcctaaagctgcaagaaaaagcatcagagagtgatgcagagatcaaagacatgaaagaaaccatatttgaattggaagatcaggtggaacagcaccgggctgtcaagttacacaataatcaactcatcagtgagctagaaagtagtgtgatcaagctggaggaacagaagtcagacctggagaggcagctgaagactctgaccaagcagatgaaggaggagaccgaggaatggaggcggttccaggcggatctgcagaccgcagtggtggtggccaatgacatcaagtgtgaggcccagcaggagctgcgcaccgtgaagaggaaactgctggaggaggaggagaagaatgcccggttgcagaaggagctgggggatgtgcagggccacggcagggtggtcaccagcagagccgcccctccacctgtggatgaagagccagagtcctctgaggtcgatgctgctggtcggtggcctggtgtctgtgttagcagaacatctccaacacccccagagtcggcaaccaccgttaagtcacttatcaagtcatttgacttgggacgcccaggtggagctggacagaatatttctgtccataagacccccagaagtcccctaagtgggataccagtgaggactgctccagcagctgctgtctctccaatgcagaggcattcgacttacagcagtgtgcggccagccagcagaggggtgactcaacgcttggaccttcctgaccttcccctctcagatattctaaagggaaggactgagaccctgaagccagacccccacctccgcaagagtccctcactagagtcactgagcagacccccgtctctgggctttggggacacaagactgctgagtgcttccacccgggcatggaaaccacaaagcaaactcagtgtggaaagaaaagaccctctggcagccttggcccgggaatacggtggttccaagcgcaatgctctactgaaatggtgccagaagaagacacaaggttatgcgaacattgacatcaccaatttcagcagcagctggagcgatggcctggccttctgtgctctgctccacacctacctgcctgcccacatcccctaccaggagctgaatagtcaggagaaaaagaggaatctcttgttggcatttgaagcggctgaaagtgtaggcatcaaacccagcctggaactcagcgagatgctgtacacagaccggcccgactggcagagtgtgatgcagtacgtggcccaaatctacaagtactttgagacgtaaccctggagggcctggggcagccaccattgccacctactgcagcttttcctggaagcgcctgattactgtccactgaccctgctctgcccaccacccagctgcctagacttcaaagacaggctcaatccaagtggaccaacacccaaataagaaacagagtgggtcccacgatgtacctgtctgaaatgcaaatgcagctggactgtaaattggggactctttgatctcttgtgggatgcttctaaagagggcagcctccctccttccagaccaagaccccacacccaggcttgttttgctgattatattgggtggctgaacgaacacattatctgcagaaattcagacaaagaacatctccaaatcagtcttttggttgctgttgttaaaaatatcccggctttgcctttatgaaacctttgcccttggctgggtgtggtagctcgtggctgtaatcccagcactttaggaagccaaggcagtaggatcgtttgagcccaggagttcgaggctgcagtgagctatgagcataccactgcactccagcctgtgtgaaagagccagaccctgtctcaaaaaaatgataaaacccaaaactttgcccttgtgaaccctcccttcccccctccccccccaaaaaaaaacaacaaaacacaaaaaataaacatt

SEQ ID NO: 29690 - DNA, 4969 bp, Homo sapiens
  source 1..4969: mol_type = unassigned DNA
gaagcagaaaaggttggataaaagataaggacagacccacgaagtcaagcatgcggagtgcagccaagccctggaacccagccatcagagcagggggccacggcccagaccgggtgcggcctctgcctgcagcctcttccggcatgaagagttctaagtcttcaacttccttggcttttgagtcccgactcagcaggctcaagagggccagcagtgaggacacgctcaacaagccaggaagtaccgctgcatcgggggtggttcgcctgaagaagaccgccactgccggagccatctcggagctcacggagagccgcctgaggagcggcacaggggcctttacaacaactaaacggacaggcattccagccccacgggaattttcagtaactgtctcaagagagaggtctgtgccacgtggtccctccaaccccaggaaatcagtgtccagtccaacttcttccaacactcccactcctacgaaacacctgaggaccccttccacaaagcccaagcaagagaatgaaggtggagaaaaggctgcgcttgagtcccaagttcgggaacttttggcagaagccaaagcaaaagatagtgaaattaacaggcttcgaagtgaactaaagaaatacaaagagaaaaggactctgaacgctgaggggactgatgctttgggcccaaatgtcgatggaacatcagtctccccaggtgacacggaacctatgataagagctcttgaggagaagaacaagaactttcagaaagagctttccgatctagaggaagaaaaccgggtcctgaaggagaaactgatctatcttgagcactccccaaattcagaaggggcagcaagtcacactggcgacagcagctgcccaacatccataactcaagagtcaagcttcggaagcccaactggaaatcagatgtccagtgacattgatgagtataaaaaaaacatacatggaaatgcattacggacatcaggctcctcaagtagcgatgttaccaaagcttctttgtcgccagatgcttccgactttgagcacattacagcagagacaccctcaaggcccctgtcctccaccagtaacccctttaagagttcaaagtgttctactgctgggagttccccaaacagcgtaagtgaattgtccctggcttccctcacagagaagatacaaaagatggaagaaaaccaccatagcactgcagaagaactacaggctactctacaagaattatcagaccagcaacaaatggtacaggaattgacagctgaaaatgagaagctggtggatgaaaagacgattttagagacatcctttcatcagcatcgagagagggcagagcagctaagtcaagaaaatgagaagctgatgaatcttttacaagagcgagtaaagaatgaagagcccaccactcaggaaggaaaaattattgaactggagcagaagtgcacaggtattcttgaacagggccgctttgaaagagagaagctactcaacattcagcagcagttgacctgtagcttgcggaaggttgaggaagaaaaccaaggagctttagaaatgattaaacgtctgaaggaagaaaatgaaaaactgaatgagtttctagaactggaacggcataataataacatgatggccaaaactttggaagagtgtagagttaccttggaagggctaaaaatggagaatggatctttgaagtctcatttgcagggtgagaagcagaaagccacagaggccagtgctgtggagcagacggcagagagctgcgaagttcaagaaatgttgaaagtagcccgagcagagaaagatctactggaactgtcttgcaatgagctcagacaagaattactaaaggcaaacggtgaaattaaacatgtttccagtctgctggccaaggtggaaaaggattattcatacctgaaggagatatgtgatcaccaagccgaacagctgagcagaaccagcctaaagctgcaagaaaaagcatcagagagtgatgcagagatcaaagacatgaaagaaaccatatttgaattggaagatcaggtggaacagcaccgggctgtcaagttacacaataatcaactcatcagtgagctagaaagtagtgtgatcaagctggaggaacagaagtcagacctggagaggcagctgaagactctgaccaagcagatgaaggaggagaccgaggaatggaggcggttccaggcggatctgcagaccgcagtggtggtggccaatgacatcaagtgtgaggcccagcaggagctgcgcaccgtgaagaggaaactgctggaggaggaggagaagaatgcccggttgcagaaggagctgggggatgtgcagggccacggcagggtggtcaccagcagagccgcccctccctccctgggctctgtcagctagcagagcatttggtggaagaaagacagcccagctcttgccatgattgggagccgcagccatctctagatgaaagggggaatgtgtagaggagaaattgcctctttataaagagcccagttgtctccttgtgacattctctgtttctcagagtcattgccgtcgagtctctgctttttgtccacattttgggatcagcttactgcatgatcaaagatgatgtttccctctttttacttttcctcagaagattgagctgtcttttatttggagaataaaatgaagttctgaaaaaaacaaagtacaagtcttatgaaaagttatttgcagctggagtgctgaaaagggcacagtggcagagcagatgcagagctgggtacagcgcaggcccgagttcttttgttttttgttgttgttgttgttgttgttttgttttgttttttttttttttttgagacagagtttcactcttgttgcccaggctggagtgcaatggtacgatctcggctcactgcaacctctgcctcccgggttcaagtgattctcttgcctcagccttccaagtagctggaattacaggcgcctgccaccacacccagctaatttttgtattgttagtagagatggggtttcaccgtgttggccaggctgctcttgaactcctgacctcaggtgatccccacctcagcctcccaaagtgctgggattacagacatgagccaccgcacccagaacctaaggcccaagttctactttttggtgttcatttctctgcttccttttgatcgtggtgtctgatcatcttggaattcacattactcaaggcaaaataggaagccatctgcgtgatgtcacattccgaagaagtcagaaggttcggcgagttggagctttactcttgttgcccaggctagagtgcagtggtgcgatcttggctcattgcaagctccgcttcctgggtttaagctattctcctgccttggcctcccaagtagctgggattacaggcatgtgccgtcactcctggctaattttgtatttttagtagagatgcaatttcaccatgttggtcaggctggtctcgaactcctgacctcaagtgatctggccgcctcagcctcccaaagtgctgggattacaggcttgagaccccatgtctggccccttctgtggggtcttgattgagccccttcacttggagtctgacttcattacctcgtctgaaacaaggtgcctccaagctttgggttgatttccagaatcttgttgggttaaacataagtagaagtttgatcataaaggatgttattaagccggataggtaagcacggtgacaatggcaatagaaatctaatggaaaacgattgaatgacaactacaccaaagtttcatggatgaaactcaccccagaaacttagtgttcaaatcagagtgatacacaattcaaaatgtgattttaaacttctggaaatatgtgtgtttgtgaagatccaaatccaattcagcaacctccatcaggcagaaaccttctgcaatcctcacatgaggaactggttcacagtgtacacagcatggagccattagtgacgttatccaaaggatgagacaagacaaaagttactgtctaataaaaggaaaattaggaacaggaatgctctttaaactcaggaagatcttttggggtgtcaaactggacagcacagaatcattagaaaaattagcttggcgtgagaagagacattgaggtcttctctgtaaaatttacttagatacttgtgaataggactgaaatttatattttgggcactctttacctcagattcagagttcttaggattatttaaaattcatttgctggatgttttcaagtataaacaataagaaaactgcaacttcaacttaaaaggcactgctgtatttgcaccctatattttgacctgtcgttaggtactgttgaatatttttatctgtaagcatttatgaagtgcaaaataaacatgttattatatagaagcgtctgctgcttagttttaatcaccagctacgtttctgcagggcctttatgtcgttttgttctacatttttttctgaatacagtttcagaacttcaaagtcacatcaagtaactagaatttgaggtagaaaaaagctggatgtaagttgtaaataggaggttgacatggaatatgaacagtttcattagtagaacaaaagggcatggagtaaaaatgctaattttgcataaatttttaaaactctagggtctcagaaaatatagcatggacttaaagtctagatgtgttttgttgacatttaaatatgaatagattgatgatttaatgtattggattttttcttaattatgaagtattatttaggtatactaataacaaaatggagacgtgtgaagaaaaatattaatctttcttctccctcagtaccacctgtgaggaaatcagtgttaacagtgtgtacatttttctttactcatgaatatgtatagggttcattttcatatttttaataaaaattggattatattcttttca

SEQ ID NO: 29691 - DNA, 8196 bp, Homo sapiens
  source 1..8196: mol_type = unassigned DNA
gcgctcgccccctggcggcgatggctggaggcgccggcggagcgcgggtccctctcctgagcatcagtgagcgcccggagccgtggccgctgggggttgcggcggcgctgagccagcggggccggacagacccacgaagtcaagcatgcggagtgcagccaagccctggaacccagccatcagagcagggggccacggcccagaccgggtgcggcctctgcctgcagcctcttccggcatgaagagttctaagtcttcaacttccttggcttttgagtcccgactcagcaggctcaagagggccagcagtgaggacacgctcaacaagccaggaagtaccgctgcatcgggggtggttcgcctgaagaagaccgccactgccggagccatctcggagctcacggagagccgcctgaggagcggcacaggggcctttacaacaactaaacggacaggcattccagccccacgggaattttcagtaactgtctcaagagagaggtctgtgccacgtggtccctccaaccccaggaaatcagtgtccagtccaacttcttccaacactcccactcctacgaaacacctgaggaccccttccacaaagcccaagcaagagaatgaaggtggagaaaaggctgcgcttgagtcccaagttcgggaacttttggcagaagccaaagcaaaagatagtgaaattaacaggcttcgaagtgaactaaagaaatacaaagagaaaaggactctgaacgctgaggggactgatgctttgggcccaaatgtcgatggaacatcagtctccccaggtgacacggaacctatgataagagctcttgaggagaagaacaagaactttcagaaagagctttccgatctagaggaagaaaaccgggtcctgaaggagaaactgatctatcttgagcactccccaaattcagaaggggcagcaagtcacactggcgacagcagctgcccaacatccataactcaagagtcaagcttcggaagcccaactggaaatcagatgtccagtgacattgatgagtataaaaaaaacatacatggaaatgcattacggacatcaggctcctcaagtagcgatgttaccaaagcttctttgtcgccagatgcttccgactttgagcacattacagcagagacaccctcaaggcccctgtcctccaccagtaacccctttaagagttcaaagtgttctactgctgggagttccccaaacagcgtaagtgaattgtccctggcttccctcacagagaagatacaaaagatggaagaaaaccaccatagcactgcagaagaactacaggctactctacaagaattatcagaccagcaacaaatggtacaggaattgacagctgaaaatgagaagctggtggatgaaaagacgattttagagacatcctttcatcagcatcgagagagggcagagcagctaagtcaagaaaatgagaagctgatgaatcttttacaagagcgagtaaagaatgaagagcccaccactcaggaaggaaaaattattgaactggagcagaagtgcacaggtattcttgaacagggccgctttgaaagagagaagctactcaacattcagcagcagttgacctgtagcttgcggaaggttgaggaagaaaaccaaggagctttagaaatgattaaacgtctgaaggaagaaaatgaaaaactgaatgagtttctagaactggaacggcataataataacatgatggccaaaactttggaagagtgtagagttaccttggaagggctaaaaatggagaatggatctttgaagtctcatttgcagggtgagaagcagaaagccacagaggccagtgctgtggagcagacggcagagagctgcgaagttcaagaaatgttgaaagtagcccgagcagagaaagatctactggaactgtcttgcaatgagctcagacaagaattactaaaggcaaacggtgaaattaaacatgtttccagtctgctggccaaggtggaaaaggattattcatacctgaaggagatatgtgatcaccaagccgaacagctgagcagaaccagcctaaagctgcaagaaaaagcatcagagagtgatgcagagatcaaagacatgaaagaaaccatatttgaattggaagatcaggtggaacagcaccgggctgtcaagttacacaataatcaactcatcagtgagctagaaagtagtgtgatcaagctggaggaacagaagtcagacctggagaggcagctgaagactctgaccaagcagatgaaggaggagaccgaggaatggaggcggttccaggcggatctgcagaccgcagtggtggtggccaatgacatcaagtgtgaggcccagcaggagctgcgcaccgtgaagaggaaactgctggaggaggaggagaagaatgcccggttgcagaaggagctgggggatgtgcagggccacggcagggtggtcaccagcagagccgcccctccacctgtggatgaagagccagagtcctctgaggtcgatgctgctggtcggtggcctggtgtctgtgttagcagaacatctccaacacccccagagtcggcaaccaccgttaagtcacttatcaagtcatttgacttgggacgcccaggtggagctggacagaatatttctgtccataagacccccagaagtcccctaagtgggataccagtgaggactgctccagcagctgctgtctctccaatgcagaggcattcgacttacagcagtgtgcggccagccagcagaggggtgactcaacgcttggaccttcctgaccttcccctctcagatattctaaagggaaggactgagaccctgaagccagacccccacctccgcaagagtccctcactagagtcactgagcagacccccgtctctgggctttggggacacaagactgctgagtgcttccacccgggcatggaaaccacaaagcaaactcagtgtggaaagaaaagaccctctggcagccttggcccgggaatacggtggttccaagcgcaatgctctactgaaatggtgccagaagaagacacaaggttatgcgaagaggaatctcttgttggcatttgaagcggctgaaagtgtaggcatcaaacccagcctggaactcagcgagatgctgtacacagaccggcccgactggcagagtgtgatgcagtacgtggcccaaatctacaagtactttgagacgtaaccctggagggcctggggcagccaccattgccacctactgcagcttttcctggaagcgcctgattactgtccactgaccctgctctgcccaccacccagctgcctagacttcaaagacaggctcaatccaagtggaccaacacccaaataagaaacagagtgggtcccacgatgtacctgtctgaaatgcaaatgcagctggactgtaaattggggactctttgatctcttgtgggatgcttctaaagagggcagcctccctccttccagaccaagaccccacacccaggcttgttttgctgattatattgggtggctgaacgaacacattatctgcagaaattcagacaaagaacatctccaaatcagtcttttggttgctgttgttaaaaatatcccggctttgcctttatgaaacctttgcccttggctgggtgtggtagctcgtggctgtaatcccagcactttaggaagccaaggcagtaggatcgtttgagcccaggagttcgaggctgcagtgagctatgagcataccactgcactccagcctgtgtgaaagagccagaccctgtctcaaaaaaatgataaaacccaaaactttgcccttgtgaaccctcccttcccccctccccccccaaaaaaaaacaacaaaacacaaaaaataaacatttgttccagggcaacctggaaacgtgcgtgcgcactcagccttttggggaaaaatgggagttctaggtaacaatgttaacacctggaacttgattcacttttagctctcaccatcccttatttgatttattgtagcaaaaggaaagcctgtgagaatgcaagggagcccctggctgctttgctggagtccctgggaggtgccccacacctctgccaccaaagtctgtgtgctcctgagcagctcgcggctttcacagtagggaaaccgcagtcctcgtcacctgcgcctttgtcctcccattcgtttaccctcccgttcacatccacacaggcttgtaccccacagaacttgacaggaggtcacatgtgtgaatggcctgtgtctgctttacagggttgagcaggctgagggtgtgtgcctctggggatgctgggctgacagcaaatcccaacagtatttcggctctggactgatttggcctttagtgcttccccaggcctctttcatcggcatgggaaaagcccttaggggtgggcggtgagggcacatttataactaacaaagaagaatgcagttgccccagcatcctactggtcaccttaagtggcagcagagccctccccagcggtgccccagtccctcagaagtgctcagtccggcccgagtgcccatctggtggctctgccgtgttcttctgggcggatctgtgtgcactacacagcgagtgagggcgtggctcacacagttgtttgagggaaatgggtaatgcccatcccttgctgttttaagtgccaaatagcgtgttagcgcccctccaacaaaggatcatccttccagtgagtcaccgagaatgacagtgactgccattactattcaaagtacatctctgattgctgatctgagccactggttcagagccaggttctagaggctgcaggtccagccccttaccattcctggagaggtaggagctcagtcccttcctccaagccagacctttgcagaggtggcaactgggctgcacgggtcagcagatccctgattctcaagccaccttgagacaagaactccgcccccctgttagtgcatcccagctgcagctctgcatcagaacctacagtggacccttttgaaaacactcttggctgccctagttggttaacttcagaatgtctggaatgggaccagagatgcagttcacatgttttgtaagttctttaggcgactgaagcacagctgcttggagaaccactgaggggtggacaccttcccctggcagccacaaggcaggcagcctgcgggagctcctgagcagctgttgggcgatggtcattacatcacccatgcctttgtatttaaatgaaactcgacacatagaaccaattcaacctgaaagttactacttctgctgattcaggcacttgtttgaagcattttttttttattaaccctgtacttcttctttgcccaccattaaagtgggggaaagtaatatcccaagtagttgagttgagctgttggttgttagatttaagctggaattagtccagggttttatgtggggaggcagttgctgtcttgggatacccggagtgggagtgggtgttttctgtgattggttctgttttttatttttacttatttattttgagatggagtttcatccttattgcccaggctggagggcaatagcaccgtctcagctcactgcaacctccgccgcccgtgtttaagcgattctcctgcctcagcctcccatgtggctgggattacaggtgcccatcaccacacccagctaatgtttttgtatttttagtaaagagggggtttcaccatgttggcccggctggtctcgaactcctgatggcaaggtgatctgcctgcctcagcctcccaaagtgctgggattacaggcatgagccactgagcccggctgtttttttgtgttttttttgttgttgtttgtttgtttttttttttgagacagagtcttgctctgtcgcccaggctggagtgccagtggcgcgatttcagctcactcaggagtgagccaccacacctggcctgtgattggctctattttgagtgattacgtgtaaatcatctagaaccagctctgagcaatggcgttgcggtgtccctccctccccgctggggccataccagcccctctccactgggagcccaagttgccaatgactgtggccaaactcccccatttttgtctgtatcctgctctctttaggttaaaaagaaggaaagaaacatgaaaggccatgtacaatttatttttacaactccaggagtttccccgactaccattttttttttttttatttgccagtggtgtgcatgtagaagaggaatgccatgtcctgtccatagaaatacacatggtggtcaggcatggtggctcatgcctataatcccagcactttgggaggctgaggtgggaggattgcttgagcccaggagtttgagaccagcctgggcaacatggcaagacctctgactctataaaaaaatttttttttttttttttttttgagagagcgtctcacttctctgtcacccaggctagagtagtgtgatcttggcttattacaacttccgcctcccaggttcaagagattctcctgccttagcctcctaagtagctgggattataggcacatgccaccatgcctggcatatttttgtatttttagtagaaacagtttcaccatgttggccaggctggtcttgaactcctgacctcaagtgataagcctgcctcaacctcccaaagtgctgggactacaggggtaagccaccgcgcctggcccaaaattttgttttttaattagctgggtacaatgataggcacctgtaatctcagctgcttgggaggctgaggtgggagcatcacttgagcccaggagtttgaggctgcagtaagctgtgtttgtgccactgcactctggcctgggccaaagagcaagaccctgtcacacacacacacaaaaaaaagaaatacaggtggtgttttggggaagggaaggttctgctggggtcctggaactgtgactgatggcctcaggagtccaggaataggccttctagcacagcagctagtagggctcccccaagccatccgctggcgtgtggaggtgcaggacctgggggaggcagtccccaacccagctaggccaaggggtagggtttttaggtctgtttttaacagagctcagagcaccaggtgaaggtggaaagttggcaggaaaacaaggtcagcatcttattttttctatactcagcagagtgtgccattcccagtttctgtcctgaggatttcaaagaccacaacagccacatttctttccatcttccctcagccagtagtcatttaaaattcttcagttgttctgaagatcctttttttaatgtatcatttttacatgaaagacagctgcaaaatgcaagccccagtagagttggagagtttttcaaggtgagaagtcgctgttctctgcattgaacatggattgaattttccttgtctgatggtaacccatggcccccgccctgcggggataacattctcaggagcttctcttgtcctagccccttctcatttcaaaaatattagtcttttattttcctttttcattcagtttttgttttacagcttttgtagagaccaacccaagtagatgcaggtgggtgttagataaaaacacacatccccaggggacaagccatccagcggtgaggaatctctgccatgttctcttccctgctgcccacaaacgttacggagactcccttagcctccccctcctcttccccactgaggggcagcttgtggagatggaggactcgggcccatagatgcagaccccctaccaaatctagcaatagttctcacccttccaaagctcgagtgccattttgagatgacctaccaatgacatgcagtaaaggacataacctcacagcctttttagaagcatttcgaatatctacagttgcctcaattcacggggcatttcactcctctgatccaggttagaattttgctaaatctgtagcatcctgaatagcacactaatttttttttttagcacactaactttaactacattagttgagtgtagttgatacatctgtggcctcgtgtctataaagagcacactagattgtacccagcacttttggatatgacatgctaattagatgtatttaactattcataggaaagtgtatgataaatgactgtaatatttctaataaatatattttgtttctaatta

SEQ ID NO: 29692 - DNA, 324 bp, Homo sapiens
  source 1..324: mol_type = unassigned DNA
aatagagtggctgacttgctgattgaggtcggcagctcccgagaagcaggagaagcagagtttttgcagacagacccacgaagtcaagcatgcggagtgcagccaagccctggaacccagccatcagagcagggggccacggcccagaccgggtgcggcctctgcctgcagcctcttccggcatgaagagttctaagtcttcaacttccttggcttttgagtcccgactcagcaggctcaagagggccagcagtgaggacacgctcaacaagccaggaagtaccgctgcatcgggggtggttcgcctgaagaagaccgccactg

SEQ ID NO: 29693 - DNA, 1725 bp, Homo sapiens
  source 1..1725: mol_type = unassigned DNA
cctttctttgactggagcggacccgccggacgcaaccgcctcgccagccggagccagcgcgagctcggcacggtggacacccggtccgaggccggcaagccggctggtgcccgagtcggccaagcatgggcaaccactcaggacggcccgaggatccggaaccaggtggaaaaggattattcatacctgaaggagatatgtgatcaccaagccgaacagctgagcagaaccagcctaaagctgcaagaaaaagcatcagagagtgatgcagagatcaaagacatgaaagaaaccatatttgaattggaagatcaggtggaacagcaccgggctgtcaagttacacaataatcaactcatcagtgagctagaaagtagtgtgatcaagctggaggaacagaagtcagacctggagaggcagctgaagactctgaccaagcagatgaaggaggagaccgaggaatggaggcggttccaggcggatctgcagaccgcagtggtggtggccaatgacatcaagtgtgaggcccagcaggagctgcgcaccgtgaagaggaaactgctggaggaggaggagaagaatgcccggttgcagaaggagctgggggatgtgcagggccacggcagggtggtcaccagcagagccgcccctccacctgtggatgaagagccagagtcctctgaggtcgatgctgctggtcggtggcctggtgtctgtgttagcagaacatctccaacacccccagagtcggcaaccaccgttaagtcacttatcaagtcatttgacttgggacgcccaggtggagctggacagaatatttctgtccataagacccccagaagtcccctaagtgggataccagtgaggactgctccagcagctgctgtctctccaatgcagaggcattcgacttacagcagtgtgcggccagccagcagaggggtgactcaacgcttggaccttcctgaccttcccctctcagatattctaaagggaaggactgagaccctgaagccagacccccacctccgcaagagtccctcactagagtcactgagcagacccccgtctctgggctttggggacacaagactgctgagtgcttccacccgggcatggaaaccacaaagcaaactcagtgtggaaagaaaagaccctctggcagccttggcccgggaatacggtggttccaagcgcaatgctctactgaaatggtgccagaagaagacacaaggttatgcgaacattgacatcaccaatttcagcagcagctggagcgatggcctggccttctgtgctctgctccacacctacctgcctgcccacatcccctaccaggagctgaatagtcaggagaaaaagaggaatctcttgttggcatttgaagcggctgaaagtgtaggcatcaaacccagcctggaactcagcgagatgctgtacacagaccggcccgactggcagagtgtgatgcagtacgtggcccaaatctacaagtactttgagacgtaaccctggagggcctggggcagccaccattgccacctactgcagcttttcctggaagcgcctgattactgtccactgaccctgctctgcccaccacccagctgcctagacttcaaagacaggctcaatccaagtggaccaacacccaaataagaaacagagtgggtcccacgatgtacctgtctgaaatgcaaatgcagctggactgtaaattgggga

SEQ ID NO: 29694 - DNA, 6269 bp, Homo sapiens
  source 1..6269: mol_type = unassigned DNA
ggaggccgggcggcccggcaagcggcgctgcggggtaggctgctttcctgaggccggactcaacgggtctcggctgagccaccgggtgagctcaccgcccagcccaaaccaggagattgcgagggagcgatgcggtgcagcgcgtgttcttggggaagatcccgactaagccattttccagtggcacctcttccatcatgagttcctgaggcagtccgatggggctactttattccagaacaatcacaatttgcttgtaaatgcatcacgaagaggcagcccagaatgaagaaagcaagcaggagtgttggctcagtgcctaaagtgtctgcaataagtaaaacgcaaacagcagaaaaaattaaacctgaaaacagctcttcagcatctacgggaggcaaacttgtaaaacctggaacagcagcatcattgtcaaagaccaagagcagtgatgaccttttagctggaatggccggaggggtaacggtgactaatggtgttaaaggaaagaaaagcacctgcccatctgcagcaccttcagcatctgcccctgccatgaccaccgtggagaacaaatccaagattagcacaggcacagcttcttcaaccaagcggagcacttctacaggtaataaagaatccagttctactagagaaagattacgtgaacgtacccgattaaaccagagcaaaaaactaccttctgcaggtcagggagctaatgacatggcattggccaaacgttcccgcagtcgaactgctacagaatgtgacgttcgtatgagcaagtctaagtcagacaatcagatcagtgacagagctgctttggaggccaaagtgaaggatcttctcacgctggcaaaaaccaaagacgtagaaattttacatttgagaaatgaactgcgagacatgcgtgcccagctgggcattaatgaggatcattctgagggtgatgaaaaatctgagaaggaaactattatggctcaccagccgactgatgtggagtccactttattgcagttgcaggaacagaatactgccatccgtgaagaactcaaccagctgaaaaatgaaaacagaatgttaaaggacaggttgaatgcattgggcttttccctagagcagaggttagacaattctgaaaaactgtttggctatcagtccctgagcccagaaatcacccctgataaccagagcgatggaggaggaactctgacttcttcagtggaaggctctgcccctggctcagtggaggatctcttgagtcaggatgaaaatacactaatggaccatcagcacagtaactccatggacaatttagacagtgagtgcagtgaggtctaccagcccctcacatcgagcgatgatgcgctggatgcaccatcctcctcagagtcggaaggcatccccagcatagagcgctcccggaaggggagcagcgggaatgccagtgaagtgtccgtggcttgcctgactgaacggatacaccagatggaagagaaccaacacagtacaagtgaggaactccaggcaaccctgcaagagctagctgatttacagcagattacccaggaactgaatagtgaaaacgaaaggcttggagaagagaaggttattctgatggagtctttatgtcagcagagcgataagttggaacactttagtcgacagattgaatacttccgctctcttctagatgagcatcacatttcttatgtcatagatgaagatgtaaaaagtgggcgctatatggaattagagcaacgttacatggacctcgctgagaatgcccgttttgaacgggagcagcttcttggtgtccagcagcatttaagcaatactttgaaaatggcagaacaagacaataaggaagctcaagaaatgataggggcactcaaagaacgcagtcaccatatggagcgaattattgagtctgagcagaaaggaaaagcagccttggcagccacgttagaggaatacaaagccacagtggccagtgaccagatagagatgaatcgcctgaaggctcagctggagaatgaaaagcagaaagtggcagagctgtattctatccataactctggagacaaatctgatattcaggacctcctggagagtgtcaggctggacaaagaaaaagcagagactttggctagtagcttgcaggaagatctggctcatacccgaaatgatgccaatcgattacaggatgccattgctaaggtagaggatgaataccgagccttccaagaagaagctaagaaacaaattgaagatttgaatatgacgttagaaaaattaagatcagacctggatgaaaaagaaacagaaaggagtgacatgaaagaaaccatctttgaacttgaagatgaagtagaacaacatcgtgctgtgaaacttcatgacaacctcattatttctgatctagagaatacagttaaaaaactccaggaccaaaagcacgacatggaaagagaaataaagacactccacagaagacttcgggaagaatctgcggaatggcggcagtttcaggctgatctccagactgcagtagtcattgcaaatgacattaaatctgaagcccaagaggagattggtgatctaaagcgccggttacatgaggctcaagaaaaaaatgagaaactcacaaaagaattggaggaaataaagtcacgcaagcaagaggaggagcgaggccgggtatacaattacatgaatgccgttgagagagatttggcagccttaaggcagggaatgggactgagtagaaggtcctcgacttcctcagagccaactcctacagtaaaaaccctcatcaagtcctttgacagtgcatctcaagtaccaaaccctgctgcagctgcaattcctcgaacgcccctgagcccaagtcctatgaaaacccctcctgcagcagctgtgtcccctatgcagagacattccataagtggaccaatctcaacatccaaacccctgacagccctgtcagataagagaccaaactatggggaaatccctgttcaagagcatctgttaagaacatcttcagccagccggcctgcttccctgccaagagtgcctgcgatggaaagtgccaagaccctctcagtgtctcgacgaagtagtgaagaagtgaaacgggacatttctgcacaggagggagcgtcgccagcctctctgatggctatgggaaccacgtctccacagctttccctgtcctcttctccaacggcatctgtgactcccaccacccgaagccgaataagagaagaaaggaaagaccctctctcagcattggccagagaatatggaggatcaaagaggaacgccttgctgaagtggtgtcagaagaaaacagaaggctatcagaatattgacattacaaacttcagcagcagctggaatgatgggctggccttctgtgccctcctgcatacatatctccctgcccacattccatatcaagaactgaacagccaggataagagaaggaacttcatgctggctttccaggcagctgaaagtgtcggcatcaaatccacactggacattaatgaaatggtacggactgaacgacccgactggcagaacgtgatgctgtatgtgacggcgatctacaagtactttgagacctgagcatgccgggaggagccgccccaatagcgggggtacccctccacagcgaccgagcgacaccgacgccattagctacgcacccctgtaaagcttccagcaactctgggctgccccacagcgtgtgagcctccagctcggggcttccgtattggaagaactcagccgtgtggcccacagctcccaccagggcccctcccacatgacccgtccattcaggtcatgtgggctcagcacacatcctgcaggccggtggctgctggagttttccttctgaagagaatattgaactacactagtgctccagggcaccaaacaaaaagggctcatgcacagctgaatttgggaaaagggattcagttctgtgggaaactcactagggttgatgaaggctcggccgcggcacttcctgactattggctggggtgggttccggtgctggtgagaacccagaaggagagtcagcgcctggcagttcccagcgccctgggcccttcaccgtcctagtttggaggagcatgttcaccacagacgtgggtcagctgccccacacctgacggggctgtcccggccgacacaatccaggcgtgttcagcctgagctaggagagtatctagagggcgtggtgcgggcacgccagggctggggtgctgctgctgcactcacgcggctgggctttctggcgggaagcagttacgggggccccttgcctggactcagcgacctgtcttccagcctggaaggggtttggagtcccagctctggctttagatttcttcatcataaggagtttttctagttaacatttttgttttgttacgagcaatgctggaaaaggtcgctcctgttctgttagtaccaaagttacattgtttcaataagcatagaaatctaaacaacatctgtacattagcatggtgagagcaaggaataaagcaggaaataggagaaaagtaaacaactttagggagcccaggcagtgtcatttaaactcactgagtcactaagacataattctcctaggccagagttaaagaaagtgccttaactcttcttgtgagggcagccactgccctccgtggccaaggcaggacctccaagactcagtggttgagttgtctcctaccaccatgcccgccctccccaggtactgggtccatgccccctgtgcccaccctccccaggtgctgggtccatgctgtttgaaccaaagccttatttaaaggtggtcactggagatgctctcaggccagaactcaacagctatttttgggaatagggatctcccgtgtgcctaacgcagtagctattggtttgaacaatgtccagacaagacctgtacctttgagaatataactgtgtttggcacctgcatagcaccatgaggaagaccagccaccagtggaagcggggtcactgccccacagactggatgcaatgaggggctcacaggaggcccagccagcccgattgtgggctgaggggtctgcattcaagcacgatgttctagaataggagtttaacgtgtctacgtaacctagaatgtggttattaggaaaggggctgtgcatgtgggtgcagctggcggcacacctggtcaccagatggccagaagctgcccatcagccctgcccagatgtcagcctgggagctcaggctgctgccgctggctggatgccctttggtgaaatgcctgttttcagctaagaaaggagaggccaggcaagcaaagtcatgccacaaagcatatcagagacccccgcagactcctggccccgtcccgccccctgtctgagttgtgtttttgttgctgttcctctgttgatggccagctctgctgttggcatgagccactgatgttcatgtgagaattactgtttttaagtgtctctccacttaggtgtcctcagttcccacttttgctctcatttgccttcacagaggccactccacctgtccggatccagctgtctggtcatggtttggtttatttattttgtccttcaggggctgttttgccctaagaatgagggggcttcccctggtctgcagttcccaactttatcccttgctggccatgcgagcccagccctggtgcctcatgggatgggggggtaggggtccccaggatcttctggaggaaggtggccatggatggatgggctgtatctgtgttttccctctgggagtctcatgggtccagcatcaggcctgaggtcagcaacagggaaagagggtgggcacggggagggcttggccccgcctatctagaggcttgcctcgggcccctccttggggaaggtttgcgtgcagagctgcaagggagagggttccagaagcattgccttttgcctcgtctaataggatccttaggacactgtgggctttaggaatgactatagatgctcacacgtgtttaaagtgacatttggagatgctctcagtcctgtggcatctggcacgaagtctccaagaagccactttgcctcttctcccttcaagcacaagctttactgcaaaagggccagtcgcgtttctatttctctcgatcccaggcttctgcggaccgacgatacgtttaaatgttgttctagtaaatattcttgaatgtattaaaatggctgaaacaacaa

SEQ ID NO: 29695 - DNA, 3043 bp, Homo sapiens
  source 1..3043: mol_type = unassigned DNA
ggccaagggcggggcccgcgagggaggccgggcggcccggcaagcggcgctgcggggtaggctgctttcctgaggccggactcaacgggtctcggctgagccaccgggtgagctcaccgcccagcccaaaccaggagattgcgagggagcgatgcggtgcagcgcgtgttcttggggaagatcccgactaagccattttccagtggcacctcttccatcatgagttcctgaggcagtccgatggggctactttattccagaacaatcacaatttgcttgtaaatgcatcacgaagaggcagcccagaatgaagaaagcaagcaggagtgttggctcagtgcctaaagtgtctgcaataagtaaaacgcaaacagcagaaaaaattaaacctgaaaacagctcttcagcatctacgggaggcaaacttgtaaaacctggaacagcagcatcattgtcaaagaccaagagcagtgatgaccttttagctggaatggccggaggggtaacggtgactaatggtgttaaaggaaagaaaagcacctgcccatctgcagcaccttcagcatctgcccctgccatgaccaccgtggagaacaaatccaagattagcacaggcacagcttcttcaaccaagcggagcacttctacaggtaataaagaatccagttctactagagaaagattacgtgaacgtacccgattaaaccagagcaaaaaactaccttctgcaggtcagggagctaatgacatggcattggccaaacgttcccgcagtcgaactgctacagaatgtgacgttcgtatgagcaagtctaagtcagacaatcagatcagtgacagagctgctttggaggccaaagtgaaggatcttctcacgctggcaaaaaccaaagacgtagaaattttacatttgagaaatgaactgcgagacatgcgtgcccagctgggcattaatgaggatcattctgagggtgatgaaaaatctgagaaggaaactattatggctcaccagccgactgatgtggagtccactttattgcagttgcaggaacagaatactgccatccgtgaagaactcaaccagctgaaaaatgaaaacagaatgttaaaggacaggttgaatgcattgggcttttccctagagcagaggttagacaattctgaaaaactgtttggctatcagtccctgagcccagaaatcacccctgataaccagagcgatggaggaggaactctgacttcttcagtggaaggctctgcccctggctcagtggaggatctcttgagtcaggatgaaaatacactaatggaccatcagcacagtaactccatggacaatttagacagtgagtgcagtgaggtctaccagcccctcacatcgagcgatgatgcgctggatgcaccatcctcctcagagtcggaaggcatccccagcatagagcgctcccggaaggggagcagcgggaatgccagtgaagtgtccgtggcttgcctgactgaacggatacaccagatggaagagaaccaacacagtacaagtgaggaactccaggcaaccctgcaagagctagctgatttacagcagattacccaggaactgaatagtgaaaacgaaaggcttggagaagagaaggttattctgatggagtctttatgtcagcagagcgataagttggaacactttagtcgacagattgaatacttccgctctcttctagatgagcatcacatttcttatgtcatagatgaagatgtaaaaagtgggcgctatatggaattagagcaacgttacatggacctcgctgagaatgcccgttttgaacgggagcagcttcttggtgtccagcagcatttaagcaatactttgaaaatggcagaacaagacaataaggaagctcaagaaatgataggggcactcaaagaacgcagtcaccatatggagcgaattattgagtctgagcagaaaggaaaagcagccttggcagccacgttagaggaatacaaagccacagtggccagtgaccagatagagatgaatcgcctgaaggctcagctggagaatgaaaagcagaaagtggcagagctgtattctatccataactctggagacaaatctgatattcaggacctcctggagagtgtcaggctggacaaagaaaaagcagagactttggctagtagcttgcaggaagatctggctcatacccgaaatgatgccaatcgattacaggatgccattgctaaggtagaggatgaataccgagccttccaagaagaagctaagaaacaaattgaagatttgaatatgacgttagaaaaattaagatcagacctggatgaaaaagaaacagaaaggagtgacatgaaagaaaccatctttgaacttgaagatgaagtagaacaacatcgtgctgtgaaacttcatgacaacctcattatttctgatctagagaatacagttaaaaaactccaggaccaaaagcacgacatggaaagagaaataaagacactccacagaagacttcgggaagaatctgcggaatggcggcagtttcaggctgatctccagactgcagtagtcattgcaaatgacattaaatctgaagcccaagaggagattggtgatctaaagcgccggttacatgaggctcaagaaaaaaatgagaaactcacaaaagaattggaggaaataaagtcacgcaagcaagaggaggagcgaggccgggtatacaattacatgaatgccgttgagagagatttggcagccttaaggcagggaatgggactgagtagaaggtcctcgacttcctcagagccaactcctacagtaaaaaccctcatcaagtcctttgacagtgcatctcaagtaccaaaccctgctgcagctgcaattcctcgaacgcccctgagcccaagtcctatgaaaacccctcctgcagcagctgtgtcccctatgcagatggagtctagttctgtcgcccacgctggaatgcagtggcgtgaccttggctcactgcaacctctgcctcctgggttcaagtga

SEQ ID NO: 29696 - DNA, 2565 bp, Homo sapiens
  source 1..2565: mol_type = unassigned DNA
aagggcggggcccgcgagggaggccgggcggcccggcaagcggcgctgcggggtaggctgctttcctgaggccggactcaacgggtctcggctgagccaccgggtgagctcaccgcccagcccaaaccaggagattgcgagggagcgatgcggtgcagcgcgatttgcttgtaaatgcatcacgaagaggcagcccagaatgaagaaagcaagcaggagtgttggctcagtgcctaaagtgtctgcaataagtaaaacgcaaacagcagaaaaaattaaacctgaaaacagctcttcagcatctacgggaggcaaacttgtaaaacctggaacagcagcatcattgtcaaagaccaagagcagtgatgaccttttagctggaatggccggaggggtaacggtgactaatggtgttaaaggaaagaaaagcacctgcccatctgcagcaccttcagcatctgcccctgccatgaccaccgtggagaacaaatccaagattagcacaggcacagcttcttcaaccaagcggagcacttctacaggtaataaagaatccagttctactagagaaagattacgtgaacgtacccgattaaaccagagcaaaaaactaccttctgcaggtcagggagctaatgacatggcattggccaaacgttcccgcagtcgaactgctacagaatgtgacgttcgtatgagcaagtctaagtcagacaatcagatcagtgacagagctgctttggaggccaaagtgaaggatcttctcacgctggcaaaaaccaaagacgtagaaattttacatttgagaaatgaactgcgagacatgcgtgcccagctgggcattaatgaggatcattctgagggtgatgaaaaatctgagaaggaaactattatggctcaccagccgactgatgtggagtccactttattgcagttgcaggaacagaatactgccatccgtgaagaactcaaccagctgaaaaatgaaaacagaatgttaaaggacaggttgaatgcattgggcttttccctagagcagaggttagacaattctgaaaaactgtttggctatcagtccctgagcccagaaatcacccctgataaccagagcgatggaggaggaactctgacttcttcagtggaaggctctgcccctggctcagtggaggatctcttgagtcaggatgaaaatacactaatggaccatcagcacagtaactccatggacaatttagacagtgagtgcagtgaggtctaccagcccctcacatcgagcgatgatgcgctggatgcaccatcctcctcagagtcggaaggcatccccagcatagagcgctcccggaaggggagcagcgggaatgccagtgaagtgtccgtggcttgcctgactgaacggatacaccagatggaagagaaccaacacagtacaagtgaggaactccaggcaaccctgcaagagctagctgatttacagcagattacccaggaactgaatagtgaaaacgaaaggcttggagaagagaaggttattctgatggagtctttatgtcagcagagcgataagttggaacactttagtcgacagattgaatacttccgctctcttctagatgagcatcacatttcttatgtcatagatgaagatgtaaaaagtgggcgctatatggaattagagcaacgttacatggacctcgctgagaatgcccgttttgaacgggagcagcttcttggtgtccagcagcatttaagcaatactttgaaaatggcagaacaagacaataaggaagctcaagaaatgataggggcactcaaagaacgcagtcaccatatggagcgaattattgagtctgagcagaaaggaaaagcagccttggcagccacgttagaggaatacaaagccacagtggccagtgaccagatagagatgaatcgcctgaaggctcagctggagaatgaaaagcagaaagtggcagagctgtattctatccataactctggagacaaatctgatattcaggacctcctggagagtgtcaggctggacaaagaaaaagcagagactttggctagtagcttgcaggaagatctggctcatacccgaaatgatgccaatcgattacaggatgccattgctaaggtagaggatgaataccgagccttccaagaagaagctaagaaacaaattgaagatttgaatatgacgttagaaaaattaagatcagacctggatgaaaaagaaacagaaaggagtgacatgaaagaaaccatctttgaacttgaagatgaagtagaacaacatcgtgctgtgaaacttcatgacaacctcattatttctgatctagagaatacagttaaaaaactccaggaccaaaagcacgacatggaaagagaaataaagacactccacagaagacttcgggaagaatctgcggaatggcggcagtttcaggctgatctccagactgcagtagtcattgcaaatgacattaaatctgaagcccaagaggagattggtgatctaaagcgccggttacatgaggctcaagaaaaaaatgagaaactcac

SEQ ID NO: 29697 - DNA, 6673 bp, Homo sapiens
  source 1..6673: mol_type = unassigned DNA
ggccaagggcggggcccgcgagggaggccgggcggcccggcaagcggcgctgcggggtaggctgctttcctgaggccggactcaacgggtctcggctgagccaccgggtgagctcaccgcccagcccaaaccaggagattgcgagggagcgatgcggtgcagcgcgatttgcttgtaaatgcatcacgaagaggcagcccagaatgaagaaagcaagcaggagtgttggctcagtgcctaaagtgtctgcaataagtaaaacgcaaacagcagaaaaaattaaacctgaaaacagctcttcagcatctacgggaggcaaacttgtaaaacctggaacagcagcatcattgtcaaagaccaagagcagtgatgaccttttagctggaatggccggaggggtaacggtgactaatggtgttaaaggaaagaaaagcacctgcccatctgcagcaccttcagcatctgcccctgccatgaccaccgtggagaacaaatccaagattagcacaggcacagcttcttcaaccaagcggagcacttctacaggtaataaagaatccagttctactagagaaagattacgtgaacgtacccgattaaaccagagcaaaaaactaccttctgcaggtcagggagctaatgacatggcattggccaaacgttcccgcagtcgaactgctacagaatgtgacgttcgtatgagcaagtctaagtcagacaatcagatcagtgacagagctgctttggaggccaaagtgaaggatcttctcacgctggcaaaaaccaaagacgtagaaattttacatttgagaaatgaactgcgagacatgcgtgcccagctgggcattaatgaggatcattctgagggtgatgaaaaatctgagaaggaaactattatggctcaccagccgactgatgtggagtccactttattgcagttgcaggaacagaatactgccatccgtgaagaactcaaccagctgaaaaatgaaaacagaatgttaaaggacaggttgaatgcattgggcttttccctagagcagaggttagacaattctgaaaaactgtttggctatcagtccctgagcccagaaatcacccctgataaccagagcgatggaggaggaactctgacttcttcagtggaaggctctgcccctggctcagtggaggatctcttgagtcaggatgaaaatacactaatggaccatcagcacagtaactccatggacaatttagacagtgagtgcagtgaggtctaccagcccctcacatcgagcgatgatgcgctggatgcaccatcctcctcagagtcggaaggcatccccagcatagagcgctcccggaaggggagcagcgggaatgccagtgaagtgtccgtggcttgcctgactgaacggatacaccagatggaagagaaccaacacagtacaagtgaggaactccaggcaaccctgcaagagctagctgatttacagcagattacccaggaactgaatagtgaaaacgaaaggcttggagaagagaaggttattctgatggagtctttatgtcagcagagcgataagttggaacactttagtcgacagattgaatacttccgctctcttctagatgagcatcacatttcttatgtcatagatgaagatgtaaaaagtgggcgctatatggaattagagcaacgttacatggacctcgctgagaatgcccgttttgaacgggagcagcttcttggtgtccagcagcatttaagcaatactttgaaaatggcagaacaagacaataaggaagctcaagaaatgataggggcactcaaagaacgcagtcaccatatggagcgaattattgagtctgagcagaaaggaaaagcagccttggcagccacgttagaggaatacaaagccacagtggccagtgaccagatagagatgaatcgcctgaaggctcagctggagaatgaaaagcagaaagtggcagagctgtattctatccataactctggagacaaatctgatattcaggacctcctggagagtgtcaggctggacaaagaaaaagcagagactttggctagtagcttgcaggaagatctggctcatacccgaaatgatgccaatcgattacaggatgccattgctaaggtagaggatgaataccgagccttccaagaagaagctaagaaacaaattgaagatttgaatatgacgttagaaaaattaagatcagacctggatgaaaaagaaacagaaaggagtgacatgaaagaaaccatctttgaacttgaagatgaagtagaacaacatcgtgctgtgaaacttcatgacaacctcattatttctgatctagagaatacagttaaaaaactccaggaccaaaagcacgacatggaaagagaaataaagacactccacagaagacttcgggaagaatctgcggaatggcggcagtttcaggctgatctccagactgcagtagtcattgcaaatgacattaaatctgaagcccaagaggagattggtgatctaaagcgccggttacatgaggctcaagaaaaaaatgagaaactcacaaaagaattggaggaaataaagtcacgcaagcaagaggaggagcgaggccgggtatacaattacatgaatgccgttgagagagatttggcagccttaaggcagggaatgggactgagtagaaggtcctcgacttcctcagagccaactcctacagtaaaaaccctcatcaagtcctttgacagtgcatctcaagtaccaaaccctgctgcagctgcaattcctcgaacgcccctgagcccaagtcctatgaaaacccctcctgcagcagctgtgtcccctatgcagagacattccataagtggaccaatctcaacatccaaacccctgacagccctgtcagataagagaccaaactatggggaaatccctgttcaagagcatctgttaagaacatcttcagccagccggcctgcttccctgccaagagtgcctgcgatggaaagtgccaagaccctctcagtgtctcgacgaagtagtgaagaagtgaaacgggacatttctgcacaggagggagcgtcgccagcctctctgatggctatgggaaccacgtctccacagctttccctgtcctcttctccaacggcatctgtgactcccaccacccgaagccgaataagagaagaaaggaaagaccctctctcagcattggccagagaatatggaggatcaaagaggaacgccttgctgaagtggtgtcagaagaaaacagaaggctatcagaatattgacattacaaacttcagcagcagctggaatgatgggctggccttctgtgccctcctgcatacatatctccctgcccacattccatatcaagaactgaacagccaggataagagaaggaacttcatgctggctttccaggcagctgaaagtgtcggcatcaaatccacactggacattaatgaaatggtacggactgaacgacccgactggcagaacgtgatgctgtatgtgacggcgatctacaagtactttgagacctgagcatgccgggaggagccgccccaatagcgggggtacccctccacagcgaccgagcgacaccgacgccattagctacgcacccctgtaaagcttccagcaactctgggctgccccacagcgtgtgagcctccagctcggggcttccgtattggaagaactcagccgtgtggcccacagctcccaccagggcccctcccacatgacccgtccattcaggtcatgtgggctcagcacacatcctgcaggccggtggctgctggagttttccttctgaagagaatattgaactacactagtgctccagggcaccaaacaaaaagggctcatgcacagctgaatttgggaaaagggattcagttctgtgggaaactcactagggttgatgaaggctcggccgcggcacttcctgactattggctggggtgggttccggtgctggtgagaacccagaaggagagtcagcgcctggcagttcccagcgccctgggcccttcaccgtcctagtttggaggagcatgttcaccacagacgtgggtcagctgccccacacctgacggggctgtcccggccgacacaatccaggcgtgttcagcctgagctaggagagtatctagagggcgtggtgcgggcacgccagggctggggtgctgctgctgcactcacgcggctgggctttctggcgggaagcagttacgggggccccttgcctggactcagcgacctgtcttccagcctggaaggggtttggagtcccagctctggctttagatttcttcatcataaggagtttttctagttaacatttttgttttgttacgagcaatgctggaaaaggtcgctcctgttctgttagtaccaaagttacattgtttcaataagcatagaaatctaaacaacatctgtacattagcatggtgagagcaaggaataaagcaggaaataggagaaaagtaaacaactttagggagcccaggcagtgtcatttaaactcactgagtcactaagacataattctcctaggccagagttaaagaaagtgccttaactcttcttgtgagggcagccactgccctccgtggccaaggcaggacctccaagactcagtggttgagttgtctcctaccaccatgcccgccctccccaggtactgggtccatgccccctgtgcccaccctccccaggtgctgggtccatgctgtttgaaccaaagccttatttaaaggtggtcactggagatgctctcaggccagaactcaacagctatttttgggaatagggatctcccgtgtgcctaacgcagtagctattggtttgaacaatgtccagacaagacctgtacctttgagaatataactgtgtttggcacctgcatagcaccatgaggaagaccagccaccagtggaagcggggtcactgccccacagactggatgcaatgaggggctcacaggaggcccagccagcccgattgtgggctgaggggtctgcattcaagcacgatgttctagaataggagtttaacgtgtctacgtaacctagaatgtggttattaggaaaggggctgtgcatgtgggtgcagctggcggcacacctggtcaccagatggccagaagctgcccatcagccctgcccagatgtcagcctgggagctcaggctgctgccgctggctggatgccctttggtgaaatgcctgttttcagctaagaaaggagaggccaggcaagcaaagtcatgccacaaagcatatcagagacccccgcagactcctggccccgtcccgccccctgtctgagttgtgtttttgttgctgttcctctgttgatggccagctctgctgttggcatgagccactgatgttcatgtgagaattactgtttttaagtgtctctccacttaggtgtcctcagttcccacttttgctctcatttgccttcacagaggccactccacctgtccggatccagctgtctggtcatggtttggtttatttattttgtccttcaggggctgttttgccctaagaatgagggggcttcccctggtctgcagttcccaactttatcccttgctggccatgcgagcccagccctggtgcctcatgggatgggggggtaggggtccccaggatcttctggaggaaggtggccatggatggatgggctgtatctgtgttttccctctgggagtctcatgggtccagcatcaggcctgaggtcagcaacagggaaagagggtgggcacggggagggcttggccccgcctatctagaggcttgcctcgggcccctccttggggaaggtttgcgtgcagagctgcaagggagagggttccagaagcattgccttttgcctcgtctaataggatccttaggacactgtgggctttaggaatgactatagatgctcacacgtgtttaaagtgacatttggagatgctctcagtcctgtggcatctggcacgaagtctccaagaagccactttgcctcttctcccttcaagcacaagctttactgcaaaagggccagtcgcgtttctatttctctcgatcccaggcttctgcggaccgacgatacgtttaaatgttgttctagtaaatattcttgaatgtattaaaatggctgaaacaacaagcttgggcttttctagcttgccctccactccctgccgtccctctgacgtcgcataaaccagaacccagctccctcctgggactggctgtggagagaagggcacctctgagccagcctgtggccctaccccaaggcgcacttcctcatgtgggcagatcctgaccaggagtccagggtggcctcccctgggccacagcacatcaccgtgtggcctggggctgtgggacagtgagccctgtaaccactagggttctgtgacagatgccaagaccccagagaccgtggcagagctacccccaggagagcggaagcccctacacagcccagacacatgccttccctgggggctggggagtgtgtctcgaggggttttgtttgttttgaggcatgtatcatcttggaaataattgtcaggatgtataaaatagagaaaaagaaaaaaggtatcctacccagaggcaaccagataaacttttttgcctgtgc

SEQ ID NO: 29698 - DNA, 3525 bp, Homo sapiens
  source 1..3525: mol_type = unassigned DNA
tttcctgaggccggactcaacgggtctcggctgagccaccgggtgagctcaccgcccagcccaaaccaggagattgcgagggagcgatgcggtgcagcgcgatttgcttgtaaatgcatcacgaagaggcagcccagaatgaagaaagcaagcaggagtgttggctcagtgcctaaagtgtctgcaataagtaaaacgcaaacagcagaaaaaattaaacctgaaaacagctcttcagcatctacgggaggcaaacttgtaaaacctggaacagcagcatcattgtcaaagaccaagagcagtgatgaccttttagctggaatggccggaggggtaacggtgactaatggtgttaaaggaaagaaaagcacctgcccatctgcagcaccttcagcatctgcccctgccatgaccaccgtggagaacaaatccaagattagcacaggcacagcttcttcaaccaagcggagcacttctacaggtaataaagaatccagttctactagagaaagattacgtgaacgtacccgattaaaccagagcaaaaaactaccttctgcaggtcagggagctaatgacatggcattggccaaacgttcccgcagtcgaactgctacagaatgtgacgttcgtatgagcaagtctaagtcagacaatcagatcagtgacagagctgctttggaggccaaagtgaaggatcttctcacgctggcaaaaaccaaagacgtagaaattttacatttgagaaatgaactgcgagacatgcgtgcccagctgggcattaatgaggatcattctgagggtgatgaaaaatctgagaaggaaactattatggctcaccagccgactgatgtggagtccactttattgcagttgcaggaacagaatactgccatccgtgaagaactcaaccagctgaaaaatgaaaacagaatgttaaaggacaggttgaatgcattgggcttttccctagagcagaggttagacaattctgaaaaactgtttggctatcagtccctgagcccagaaatcacccctgataaccagagcgatggaggaggaactctgacttcttcagtggaaggctctgcccctggctcagtggaggatctcttgagtcaggatgaaaatacactaatggaccatcagcacagtaactccatggacaatttagacagtgagtgcagtgaggtctaccagcccctcacatcgagcgatgatgcgctggatgcaccatcctcctcagagtcggaaggcatccccagcatagagcgctcccggaaggggagcagcgggaatgccagtgaagtgtccgtggcttgcctgactgaacggatacaccagatggaagagaaccaacacagtacaagtgaggaactccaggcaaccctgcaagagctagctgatttacagcagattacccaggaactgaatagtgaaaacgaaaggcttggagaagagaaggttattctgatggagtctttatgtcagcagagcgataagttggaacactttagtcgacagattgaatacttccgctctcttctagatgagcatcacatttcttatgtcatagatgaagatgtaaaaagtgggcgctatatggaattagagcaacgttacatggacctcgctgagaatgcccgttttgaacgggagcagcttcttggtgtccagcagcatttaagcaatactttgaaaatggcagaacaagacaataaggaagctcaagaaatgataggggcactcaaagaacgcagtcaccatatggagcgaattattgagtctgagcagaaaggaaaagcagccttggcagccacgttagaggaatacaaagccacagtggccagtgaccagatagagatgaatcgcctgaaggctcagctggagaatgaaaagcagaaagtggcagagctgtattctatccataactctggagacaaatctgatattcaggacctcctggagagtgtcaggctggacaaagaaaaagcagagactttggctagtagcttgcaggaagatctggctcatacccgaaatgatgccaatcgattacaggatgccattgctaaggtagaggatgaataccgagccttccaagaagaagctaagaaacaaattgaagatttgaatatgacgttagaaaaattaagatcagacctggatgaaaaagaaacagaaaggagtgacatgaaagaaaccatctttgaacttgaagatgaagtagaacaacatcgtgctgtgaaacttcatgacaacctcattatttctgatctagagaatacagttaaaaaactccaggaccaaaagcacgacatggaaagagaaataaagacactccacagaagacttcgggaagaatctgcggaatggcggcagtttcaggctgatctccagactgcagtagtcattgcaaatgacattaaatctgaagcccaagaggagattggtgatctaaagcgccggttacatgaggctcaagaaaaaaatgagaaactcacaaaagaattggaggaaataaagtcacgcaagcaagaggaggagcgaggccgggtatacaattacatgaatgccgttgagagagatttggcagccttaaggcagggaatgggactgagtagaaggtcctcgacttcctcagagccaactcctacagtaaaaaccctcatcaagtcctttgacagtgcatctcaagtaccaaaccctgctgcagctgcaattcctcgaacgcccctgagcccaagtcctatgaaaacccctcctgcagcagctgtgtcccctatgcagagacattccataagtggaccaatctcaacatccaaacccctgacagccctgtcagataagagaccaaactatggggaaatccctgttcaagagcatctgttaagaacatcttcagccagccggcctgcttccctgccaagagtgcctgcgatggaaagtgccaagaccctctcagtgtctcgacgaagtagtgaagaagtgaaacgggacatttctgcacaggagggagcgtcgccagcctctctgatggctatgggaaccacgtctccacagctttccctgtcctcttctccaacggcatctgtgactcccaccacccgaagccgaataagagaagaaaggaaagaccctctctcagcattggccagagaatatggaggatcaaagaggaacgccttgctgaagtggtgtcagaagaaaacagaaggctatcagagaaggaacttcatgctggctttccaggcagctgaaagtgtcggcatcaaatccacactggacattaatgaaatggtacggactgaacgacccgactggcagaacgtgatgctgtatgtgacggcgatctacaagtactttgagacctgagcatgccgggaggagccgccccaatagcgggggtacccctccacagcgaccgagcgacaccgacgccattagctacgcacccctgtaaagcttccagcaactctgggctgccccacagcgtgtgagcctccagctcggggcttccgtatt

SEQ ID NO: 29699 - DNA, 3747 bp, Homo sapiens
  source 1..3747: mol_type = unassigned DNA
gacgagaccctccctcagcacctgcagtgcagccagagccggtgcggcggccgcgacttccccgacgcggggcgctgagaagcactatgaccaccaaagattatccatcattgtggggctttggaacaacaaaaacattcaaaattcccattgaacatctagatttcaaatacattgaaaaatgttcagatgttaaacatctggaaaaaattctttgcgtgctcagatctggtgaggaaggatattatcctgaacttacagaattttgtgaaaagcatcttcaagccttggcccctgaaagcagagctttgaggaaagataaaccagcagcaacagcagccagttttacagctgaagaatgggaaaaaattgatggtgatataaagagttgggtatcagaaattaaaaaagaagaagataaaatgcactttcatgaaactgagacatttccagcaatgaaagataatttgcctccagttcgtggttcaaacagctgtcttcatgtaggcaaggaaaaatattctaaaagaccaactaaaaagaaaactccaagggattacgcggaatgggataaatttgacgtggagaaggaatgtttaaaaattgatgaagattacaaagaaaagacggtaatagacaagtcacacttgtctaaaattgagacaagaatagatacagcaggtctaactgagaaagaaaaggattttcttgccactcgtgaaaaggagaaaggaaatgaagctttcaactcaggagattatgaagaagcagtgatgtattataccaggagcatatcagcgcttcccactgtagttgcctataacaatcgagctcaagcagaaatcaaattacagaactggaatagtgcttttcaggattgtgaaaaggtcttggagttagaacctggaaacgtaaaggctcttctgcgtcgtgctactacatataaacatcaaaacaagctccgggaagctacagaagatttgagtaaagtactagatgttgagcctgataatgatttggccaagaaaaccttgtcagaggttgaaagagatctgaaaaattctgaagctgcatctgagactcaaaccaaagggaaaaggatggttattcaggaaatagaaaactccgaagatgaagaaggaaaaagcggaagaaaacatgaagatggcggtggagataagaagcccgcggagccggcgggagccgcgcgcgccgcccagccgtgcgtcatgggcaacatccagaagaagctgactggcaaagccgaaggcggcaagcggccggcaaggggcgcgccgcagcggggccagaccccggaggccggcgcggacaagcggagcccacggcgggcctctgcggcggcggcggcgggcggcggcgccaccgggcatccgggcggcgggcagggcgcggagaaccctgccggcctgaagagccagggcaacgagctgttccgaagcgggcagttcgccgaggcggccggcaagtactcggcggcaatcgcgctcctggagccagcaggaagtgaaattgcagatgatctaagtatcttatattcaaatagagcagcatgttacctaaaagaaggaaactgcagtggctgcattcaagattgtaacagggctctggaacttcatccattctctatgaaacctcttctgaggcgggcgatggcctatgaaactctagagcagtatgggaaagcttatgtggattataaaacagtgttgcagatagactgtggactccagctagcaaatgacagtgttaacaggctatcaagaattttaatggagctggatggaccaaattggcgggagaagctgtcacctattcctgctgtgcctgcttctgtgccactgcaagcttggcatccggcaaaagagatgatctcaaaacaagcaggagactccagcagccatcgccagcagggcatcacagatgaaaaaacatttaaagcccttaaggaagaaggaaatcaatgtgtaaatgacaaaaactataaagacgccctcagtaaatacagcgaatgcttaaagattaacaataaggaatgtgccatatatacaaacagagctctctgttacttgaagctgtgccagtttgaagaagcaaagcaggactgtgatcaggcacttcagctagctgatgggaacgtgaaagccttctatagacgagctctggctcataaaggactcaagaattatcagaaaagcttaattgatctcaataaagttatcctactagatccaagtattattgaggcaaagatggaactggaagaggtaactagactccttaatcttaaggataagacagcaccattcaacaaagaaaaggagagaaggaaaattgagattcaagaggtgaatgaaggcaaggaggagcctggaagacctgcaggggaggtctccatgggatgccttgcttctgagaagggaggcaaaagcagcaggtcaccagaagaccctgagaaacttccgatagccaagcctaataatgcctatgaatttggtcagattataaatgctctcagtaccaggaaggataaagaagcctgtgcacatcttttagccatcactgcaccaaaagatttgccgatgtttttaagtaacaaacttgaaggggatacattccttctcctcattcagtctctgaaaaataatcttattgaaaaagatccctcattggtgtatcagcatcttttatacctgagtaaagcagaaaggtttaagatgatgttgacactaattagcaagggccaaaaggagctaattgaacagctgtttgaggacctttcggacacaccaaacaaccattttactttagaagatatacaggccctaaaaaggcagtatgagctttaaatcaagataattgttagatttcttccatgcatgtatgtgttccaggaatgttaatgagatggtattgtaaaagagttgcatggataaaacttggcctagaaaagtttggtctgcactataaaacattttacttattttcctacatagaacatgtatattctacaatctgctttttattagttgtaaatattttcttatgtaccagaaccaaataagtatatttagaacttgttaaaaatacattttaatttatgatatacatattattttaattacttgttaaaattttgagttaagttgcatttctttgggctatgaaggagtcctcttaagtttgatagaaatgaatttcttgtaacattcttttttaaaagtggaagtcattaacagtgattattatatcacttatatcctgctaagatacacataaatcccattttgtactagtacctgtggattacagtcagttaaaatgaaatgcaacactgaagtctataacatgaaatgattattaaattgtttattaatttagagctataagaggaacttattttttctaatacggaagcattgcctaataattaagaacaaaaattgccaaaaatttctaccactttttactagattttaaaaagctactttcttttatattgcctatataagcaaaaaaccaaccactgtattaaagcaaactaagcctgcatttatatctgaattattacctccatattttaccaaacatttgaatgtcccccttcccccttttttgttttctgcttttatgactgtatttattcctttactgtaaaagaatatgaagaactcatacatgttgaaagctcctttgttgactgggtcaaagtgaaggaatttcaatctc

SEQ ID NO: 29700 - DNA, 3852 bp, Homo sapiens
  source 1..3852: mol_type = unassigned DNA
ggggctccccagtcccggcaggtcctggcgccgctgtacatagaaaccgttgccacggcgggaggatgccgtttcttttcggtctccgactgcagggggcggtcggccctgtggatgcaggaaagagggtgcctcggtgggagagacccagcttttcgcgttagtaggcccgagcagtttgaactggagctatgaccaccaaagattatccatcattgtggggctttggaacaacaaaaacattcaaaattcccattgaacatctagatttcaaatacattgaaaaatgttcagatgttaaacatctggaaaaaattctttgcgtgctcagatctggtgaggaaggatattatcctgaacttacagaattttgtgaaaagcatcttcaagccttggcccctgaaagcagagctttgaggaaagataaaccagcagcaacagcagccagttttacagctgaagaatgggaaaaaattgatggtgatataaagagttgggtatcagaaattaaaaaagaagaagataaaatgcactttcatgaaactgagacatttccagcaatgaaagataatttgcctccagttcgtggttcaaacagctgtcttcatgtaggcaaggaaaaatattctaaaagaccaactaaaaagaaaactccaagggattacgcggaatgggataaatttgacgtggagaaggaatgtttaaaaattgatgaagattacaaagaaaagacggtaatagacaagtcacacttgtctaaaattgagacaagaatagatacagcaggtctaactgagaaagaaaaggattttcttgccactcgtgaaaaggagaaaggaaatgaagctttcaactcaggagattatgaagaagcagtgatgtattataccaggagcatatcagcgcttcccactgtagttgcctataacaatcgagctcaagcagaaatcaaattacagaactggaatagtgcttttcaggattgtgaaaaggtcttggagttagaacctggaaacgtaaaggctcttctgcgtcgtgctactacatataaacatcaaaacaagctccgggaagctacagaagatttgagtaaagtactagatgttgagcctgataatgatttggccaagaaaaccttgtcagaggttgaaagagatctgaaaaattctgaagctgcatctgagactcaaaccaaagggaaaaggatggttattcaggaaatagaaaactccgaagatgaagaaggaaaaagcggaagaaaacatgaagatggcggtggagataagaagcccgcggagccggcgggagccgcgcgcgccgcccagccgtgcgtcatgggcaacatccagaagaagctgactggcaaagccgaaggcggcaagcggccggcaaggggcgcgccgcagcggggccagaccccggaggccggcgcggacaagcggagcccacggcgggcctctgcggcggcggcggcgggcggcggcgccaccgggcatccgggcggcgggcagggcgcggagaaccctgccggcctgaagagccagggcaacgagctgttccgaagcgggcagttcgccgaggcggccggcaagtactcggcggcaatcgcgctcctggagccagcaggaagtgaaattgcagatgatctaagtatcttatattcaaatagagcagcatgttacctaaaagaaggaaactgcagtggctgcattcaagattgtaacagggctctggaacttcatccattctctatgaaacctcttctgaggcgggcgatggcctatgaaactctagagcagtatgggaaagcttatgtggattataaaacagtgttgcagatagactgtggactccagctagcaaatgacagtgttaacaggctatcaagaattttaatggagctggatggaccaaattggcgggagaagctgtcacctattcctgctgtgcctgcttctgtgccactgcaagcttggcatccggcaaaagagatgatctcaaaacaagcaggagactccagcagccatcgccagcagggcatcacagatgaaaaaacatttaaagcccttaaggaagaaggaaatcaatgtgtaaatgacaaaaactataaagacgccctcagtaaatacagcgaatgcttaaagattaacaataaggaatgtgccatatatacaaacagagctctctgttacttgaagctgtgccagtttgaagaagcaaagcaggactgtgatcaggcacttcagctagctgatgggaacgtgaaagccttctatagacgagctctggctcataaaggactcaagaattatcagaaaagcttaattgatctcaataaagttatcctactagatccaagtattattgaggcaaagatggaactggaagaggtaactagactccttaatcttaaggataagacagcaccattcaacaaagaaaaggagagaaggaaaattgagattcaagaggtgaatgaaggcaaggaggagcctggaagacctgcaggggaggtctccatgggatgccttgcttctgagaagggaggcaaaagcagcaggtcaccagaagaccctgagaaacttccgatagccaagcctaataatgcctatgaatttggtcagattataaatgctctcagtaccaggaaggataaagaagcctgtgcacatcttttagccatcactgcaccaaaagatttgccgatgtttttaagtaacaaacttgaaggggatacattccttctcctcattcagtctctgaaaaataatcttattgaaaaagatccctcattggtgtatcagcatcttttatacctgagtaaagcagaaaggtttaagatgatgttgacactaattagcaagggccaaaaggagctaattgaacagctgtttgaggacctttcggacacaccaaacaaccattttactttagaagatatacaggccctaaaaaggcagtatgagctttaaatcaagataattgttagatttcttccatgcatgtatgtgttccaggaatgttaatgagatggtattgtaaaagagttgcatggataaaacttggcctagaaaagtttggtctgcactataaaacattttacttattttcctacatagaacatgtatattctacaatctgctttttattagttgtaaatattttcttatgtaccagaaccaaataagtatatttagaacttgttaaaaatacattttaatttatgatatacatattattttaattacttgttaaaattttgagttaagttgcatttctttgggctatgaaggagtcctcttaagtttgatagaaatgaatttcttgtaacattcttttttaaaagtggaagtcattaacagtgattattatatcacttatatcctgctaagatacacataaatcccattttgtactagtacctgtggattacagtcagttaaaatgaaatgcaacactgaagtctataacatgaaatgattattaaattgtttattaatttagagctataagaggaacttattttttctaatacggaagcattgcctaataattaagaacaaaaattgccaaaaatttctaccactttttactagattttaaaaagctactttcttttatattgcctatataagcaaaaaaccaaccactgtattaaagcaaactaagcctgcatttatatctgaattattacctccatattttaccaaacatttgaatgtcccccttcccccttttttgttttctgcttttatgactgtatttattcctttactgtaaaagaatatgaagaactcatacatgttgaaagctcctttgttgactgggtcaaagtgaaggaatttcaatctc

SEQ ID NO: 29701 - DNA, 1048 bp, Homo sapiens
  source 1..1048: mol_type = unassigned DNA
agagatggctgctcagcgagggatgcccagctccgccgtgagggtcctggaagaggcgttgggcatgggtttgacggcagccggggacgcgagggacacggcggacgcggtggcggctgagggcgcctactacctggaacaggtcaccataactgaagcatctgaagatgactatgaatatgaagagataccagatgacaattttagcatcccagaaggtgaagaagatctggcaaaagcaattcagatggcccaagaacaggctacagatactgaaattttggaacggaaaacagttcttccttcaaagcatgcagtacctgaagtaatagaagactttctctgcaatttcttgatcaaaatgggaatgaccagaactcttgattgctttcagtctgaatggtatgagttaatacagaaaggagtgactgaacttagaactgttgggaatgttccagatgtctacacccagattatgcttttggaaaatgagaacaaaaatttaaagaaagatttgaagcactacaaacaagcagctgacaaagctagagaagatttgctgaaaattcagaaagaacgtgattttcatcgaatgcatcataagcgaatagtccaggaaaaaaacaaattaattaatgacctcaaagggttgaagttacattatgcatcttatgaaccgactataagggtgttacatgagaaacaccacactttactgaaggagaaaatgctgacctccttggaaagagacaaagtagttgggcagatttctggacttcaagaaacattgaagaaactgcaaagaggacatagttaccatggtcctcaaattaaagttgatcatagtcgtgaaaaagaaaatgcaccagaaggtcctactcagaaaggtcttcgtgaagccagggaacaaaacaaatgtaaaacaaagatgaaaggcaatacaaagcagtggacagggaactctcaaacttggaataagaccgtacctctgcaggacactattggcaggagacaagagaacaacagtgcacaccagcacatcgactaa

SEQ ID NO: 29702 - DNA, 2177 bp, Homo sapiens
  source 1..2177: mol_type = unassigned DNA
cgcgagagctcccgggggccgttgggtagcgtcttcgctgttgcccttagggacggctgtgggcctgctgggggtgggggcccgaagcgccagagatggctgctcagcgagggatgcccagctccgccgtgagggtcctggaagaggcgttgggcatgggtttgacggcagccggggacgcgagggacacggcggacgcggtggcggctgagggcgcctactacctggaacaggtcaccataactgaagcatctgaagatgactatgaatatgaagagataccagatgacaattttagcatcccagaaggtgaagaagatctggcaaaagcaattcagatggcccaagaacaggctacagatactgaaattttggaacggaaaacagttcttccttcaaagcatgcagtacctgaagtaatagaagactttctctgcaatttcttgatcaaaatgggaatgaccagaactcttgattgctttcagtctgaatggtatgagttaatacagaaaggagtgactgaacttagaactgttgggaatgttccagatgtctacacccagattatgcttttggaaaatgagaacaaaaatttaaagaaagatttgaagcactacaaacaagcagctgacaaagctagagaagatttgctgaaaattcagaaagaacgtgattttcatcgaatgcatcataagcgaatagtccaggaaaaaaacaaattaattaatgacctcaaagggttgaagttacattatgcatcttatgaaccgactataagggtgttacatgagaaacaccacactttactgaaggagaaaatgctgacctccttggaaagagacaaagtagttgggcagatttctggacttcaagaaacattgaagaaactgcaaagaggacatagttaccatggtcctcaaattaaagttgatcatagtcgtgaaaaagaaaatgcaccagaaggtcctactcagaaaggtcttcgtgaagccagggaacaaaacaaatgtaaaacaaagatgaaaggcaatacaaaggattcagaatttcccatagatatgcaaccaaatccaaacctgaatgtttctaaagaaagtctttctccagcaaaatttgactacaagctgaaaaacatttttagactccatgaacttccagtgagctgtgtctccatgcaaccccacaaagacatcctagtctcctgtggcgaggaccgactctggaaggtgttgggccttccaaaatgcaatgtgcttctcacgggatttggccacactgactggctttcagactgctgcttccatcccagtggcgacaaattggctacttcaagtggtgacactacagttaaattatgggatctatgtaaaggcgattgcattttgacctttgaaggacacagccgcgcagtgtggtcctgcacatggcactcctgcggcaattttgtggcttcctcctcactggataaaactagcaaaatttgggatgttaatagtgaaagatgcagatgtactttgtatggacatacagattctgtgaacagcattgagttttttcctttctccaatactcttctcacaagctctgcagacaagaccctgtctatatgggatgcaagaacaggtatatgtgagcagtcactttatggtcacatgcattctatcaatgatgccatttttgatcccaggggtcacatgatagcatcctgtgatgcctgtggggttacaaagctgtgggactttcggaagctgttaccaattgtgtccatcgatataggtccaagtcctggcaatgaggtgaattttgattcatcaggtcgagttttagctcaggcaagtggcaatggtgttatccatttgctagatcttaaatctggggagattcacaaattgatgggccacgaaaacgaggcacacacggttgtgttttctcacgacggggagattctcttttctggaggctctgacggcacagttcgaacgtggtcttgaccgtcagcacatcccgctgcagagggcattccctttaaggcttgaaaatgcctcctgtagtcccaaaccagcaaagaactggttaaatgtgccagcaggtaacatttacagtctgctttaaaacatgctttggacatatattttagtgctcatactgttactaataaaaaaataactttatgctca

SEQ ID NO: 29703 - DNA, 1614 bp, Homo sapiens
  source 1..1614: mol_type = unassigned DNA
atgactatgaatatgaagagataccagatgacaattttagcatcccagaaggtgaagaagatctggcaaaagcaattcagatggcccaagaacaggctacagatactgaaattttggtatgagttaatacagaaaggagtgactgaacttagaactgttgggaatgttccagatgtctacacccagattatgcttttggaaaatgagaacaaaaatttaaagaaagatttgaagcactacaaacaagcagctgacaaagctagagaagatttgctgaaaattcagaaagaacgtgattttcatcgaatgcatcataagcgaatagtccaggaaaaaaacaaattaattaatgacctcaaagggttgaagttacattatgcatcttatgaaccgactataagggtgttacatgagaaacaccacactttactgaaggagaaaatgctgacctccttggaaagagacaaagtagttgggcagatttctggacttcaagaaacattgaagaaactgcaaagaggacatagttaccatggtcctcaaattaaagttgatcatagtcgtgaaaaagaaaatgcaccagaaggtcctactcagaaaggtcttcgtgaagccagggaacaaaacaaatgtaaaacaaagatgaaaggcaatacaaaggattcagaatttcccatagatatgcaaccaaatccaaacctgaatgtttctaaagaaagtctttctccagcaaaatttgactacaagctgaaaaacatttttagactccatgaacttccagtgagctgtgtctccatgcaaccccacaaagacatcctagtctcctgtggcgaggaccgactctggaaggtgttgggccttccaaaatgcaatgtgcttctcacgggatttggccacactgactggctttcagactgctgcttccatcccagtggcgacaaattggctacttcaagtggtgacactacagttaaattatgggatctatgtaaaggcgattgcattttgacctttgaaggacacagccgcgcagtgtggtcctgcacatggcactcctgcggcaattttgtggcttcctcctcactggataaaactagcaaaatttgggatgttaatagtgaaagatgcagatgtactttgtatggacatacagattctgtgaacagcattgagttttttcctttctccaatactcttctcacaagctctgcagacaagaccctgtctatatgggatgcaagaacaggtatatgtgagcagtcactttatggtcacatgcattctatcaatgatgccatttttgatcccaggggtcacatgatagcatcctgtgatgcctgtggggttacaaagctgtgggactttcggaagctgttaccaattgtgtccatcgatataggtccaagtcctggcaatgaggtgaattttgattcatcaggtcgagttttagctcaggcaagtggcaatggtgttatccatttgctagatcttaaatctggggagattcacaaattgatgggccacgaaaacgaggcacacacggttgtgttttctcacgacggggagattctcttttctggaggctctgacggcacagttcgaacgtggtcttga

SEQ ID NO: 29704 - DNA, 2256 bp, Homo sapiens
  source 1..2256: mol_type = unassigned DNA
agcgtcttcgctgttgcccttagggacggctgtgggcctgctgggggtgggggcccgaagcgccagagatggctgctcagcgagggatgcccagctccgccgtgagggtcctggaagaggcgttgggcatgggtttgacggcagccggggacgcgagggacacggcggacgcggtggcggctgagggcgcctactacctggaacgtatccttcccgtggaggcgcggcccgctgcgctggcgggtaatgggtgttgggacgaaggcgagggcctcccactggcggcgccttttgagccttggggccactccggaggagcctctgttggacttcaagataccagatgacaattttagcatcccagaaggtgaagaagatctggcaaaagcaattcagatggcccaagaacaggctacagatactgaaattttggaacggaaaacagttcttccttcaaagcatgcagtacctgaagtaatagaagactttctctgcaatttcttgatcaaaatgggaatgaccagaactcttgattgctttcagtctgaatggtatgagttaatacagaaaggagtgactgaacttagaactgttgggaatgttccagatgtctacacccagattatgcttttggaaaatgagaacaaaaatttaaagaaagatttgaagcactacaaacaagcagctgacaaagctagagaagatttgctgaaaattcagaaagaacgtgattttcatcgaatgcatcataagcgaatagtccaggaaaaaaacaaattaattaatgacctcaaagggttgaagttacattatgcatcttatgaaccgactataagggtgttacatgagaaacaccacactttactgaaggagaaaatgctgacctccttggaaagagacaaagtagttgggcagatttctggacttcaagaaacattgaagaaactgcaaagaggacatagttaccatggtcctcaaattaaaggtaaatgtaaaatgtgatgaagctctcatttaatatagtttggtgatttctcaaccttatcagtgattaatattctagagatatttaaaggtgagtaagtggtggctatttcacaaattaaaattttaataaaaagattaagaagaaatatagatatcatactgtatggattaattatagagaaaaacaagtcaactataatggaaggacttctgcttctggtcattatacctggtaccagactagccttctctgtgtaaataactctaaagctaagctgtaagatcagacaactacttttaggcagtagaaaacagacagctcaagtaacagaaggcaattgacagaaggaaaatttataaggtgagctctgccatcaccatggctttgggtctgtggaaagttccaaactgagctttgtggagatggaagccaataagagcatgacaatcctgataattggaaatgtcagagaccctagttcacagcttttgaagccactggaatctgtagggaaagacaccagagaagagagctgcaatgaggagtggctcagtttgtgagggagtttactatgagtccttagctgaggctgcaatactatacataacaacactacctgacacttacaagagagatacaattatataggatcaagaggaggccagagattgtagaagttaagtagtgatgcgaaacattgcaaatctggccatgcctgggtggaaagacctctttcacaccttgttaacaacacagtaacattcagcatcccatatccgccttataaaaccaggaacaaagcttacacagcattcttagagaggacacagaatttggagtttgagtcttgccaagttatagggccttgagaaacatttagggctttccatggatccaccctaacgaagcataaaattaagcctaggattttagggtcatcagccaaaaatggaactgccttctagaacaaaaaatgacatccttttgaggaagacagtcatccagagtctttacaatcttttacccacattgcctagtacataattaaacatttctagatatgaataggaacaggaaaatgtgacccataatcaagacaacaagcaataaatggaaacctacccttaagtagctaaactgttgcatttagcagatagaaagtgctaaagtagatactttgattatgttcaaggacttaatggaaaatactaataagtgaacagatggggaatttaagcaaagaaatgagaacaagcatacattccaaa

SEQ ID NO: 29705 - DNA, 1250 bp, Homo sapiens
  source 1..1250: mol_type = unassigned DNA
gagagctcccgggggccgttgggtagcgtcttcgctgttgcccttagggacggctgtgggcctgctgggggtgggggcccgaagcgccagagatggctgctcagcgagggatgcccagctccgccgtgagggtcctggaagaggcgttgggcatgggtttgacggcagccggggacgcgagggacacggcggacgcggtggcggctgagggcgcctactacctggaacaggtcaccataactgaagcatctgaagatgactatgaatatgaagagataccagatgacaattttagcatcccagaaggtgaagaagatctggcaaaagcaattcagatggcccaagaacaggctacagatactgaaattttggaacggaaaacagttcttccttcaaagcatgcagtacctgaagtaatagaagactttctctgcaatttcttgatcaaaatgggaatgaccagaactcttgattgctttcagtctgaatggtatgagttaatacagaaaggagtgactgaacttagaactgttgggaatgttccagatgtctacacccagattatgcttttggaaaatgagaacaaaaatttaaagaaagatttgaagcactacaaacaagcagctgagtatgttattttttaaatgacattttcttctttttcttttggactaaataaaagagttgagtgaagctgatatatgtaatataccagagccttaatttttgaaaactgaatttttctagttgtaaagaatgtgagaggcttcattagcaaattaattaaacagatgatcagaactatcacaattataacttaccaacaagaagggaatgcaggtagttgtttaggagatggtacattttttatataacattcacttccttgtgtatttgatagtcttttcatggtttataacattttctcctgtaaagataggctaatttctgaaataataattaaatttatagaaagccgagaggaaattgctagtttattcctggtagaggaatttctgtatttgaaaattctccagaaggaataatataaactgtggactttgggtgataatgatatgtaggttcgtcagttgttaacaaatgtatccctctgttgggggctattgataatggggaaggctgtgcatgtgtgggagtaggaggtgtatgggacatctctgtaccttctaatcaattttgctatgaacttaaaactgctctaaaaataaagtttattaaaaaaaagttaa

SEQ ID NO: 29706 - DNA, 771 bp, Homo sapiens
  source 1..771: mol_type = unassigned DNA
gattcagaatttcccatagatatgcaaccaaatccaaacctgaatgtttctaaagaaagtctttctccagcaaaatttgactacaagctgaaaaacatttttagactccatgaacttccagtgagctgtgtctccatgcaaccccacaaagacatcctagtctcctgtggcgaggaccgactctggaaggtgttgggccttccaaaatgcaatgtgcttctcacgggatttggccacactgactggctttcagactgctgcttccatcccagtgaaagatgcagatgtactttgtatggacatacagattctgtgaacagcattgagttttttcctttctccaatactcttctcacaagctctgcagacaagaccctgtctatatgggatgcaagaacaggtatatgtgagcagtcactttatggtcacatgcattctatcaatgatgccatttttgatcccaggggtcacatgatagcatcctgtgatgcctgtggggttacaaagctgtgggactttcggaagctgttaccaattgtgtccatcgatataggtccaagtcctggcaatgaggtgaattttgattcatcaggtcgagttttagctcaggcaagtggcaatggtgttatccatttgctagatcttaaatctggggagattcacaaattgatgggccacgaaaacgaggcacacacggttgtgttttctcacgacggggagattctcttttctggaggctctgacggcacagttcgaacgtggtcttgaccg

SEQ ID NO: 29707 - DNA, 1453 bp, Homo sapiens
  source 1..1453: mol_type = unassigned DNA
tcacgcagggtccgtggggtccccgcggcgcgcagcggctgaaggaggccccagggccttggcgaccgcagcggcggctttagcgtcagtgactaggcagcagggggtcaggatgcggcgaagctcccgcccgggctcggcctcgtcctcgcgcaagcacacgcccaactttttcagcgagaacagctcaatgagcatcacctcggaggacagcaaagggctccggtcagcggagcccgggcctggggagcccgagggcagaagagcccggggcccgagctgcggtgagcccgccttgagcgcgggagtgcccggaggaaccacatgggcaggaagctctcagcagaagccagcgcctcggagccacaactggcagacagcctgtggcgcggcaaccgtgaggggcggggcctcggaaccgactgggtctccagtagtctctgaggagccgctcgaccttctcccgaccctggatctgaggcaggagatgcctcccccgcgggtgttcaagagctttctgagcctgctcttccaggggctgagcgtgttgttatccctggcaggagacgtgctggtcagcatgtacagggaggtctgttccatccgcttcctgttcacggctgtgtcgctgctgagcctctttctgtcagcattctggctggggcttctgtacctggtctctcctttggagaatgaacctaaggagatgctgactctaagtgagtaccacgagcgcgtgcgctcccaggggcagcagctgcagcagctccaggccgagctggataaactccacaaggaggtgtccactgttcgggcagccaacagcgagagagtggccaagctcgtgttccagaggctgaatgaggattttgtgcggaagcccgactatgctttgagctctgtgggagcctccatcgacctgcagaagacatcccacgattacgcagacaggaacactgcctacttctggaatcgcttcagcttctggaactacgcacggccgcccacggttatcctggagccccacgtgttccctgggaattgctgggcttttgaaggcgaccaaggccaggtggtgatccaactgccgggccgagtgcagctgagcgacatcactctgcagcatccaccgcccagcgtggagcacaccggaggagccaacagcgccccccgcgatttcgcggtctttggcctccaggtttatgatgaaactgaagtttccttggggaaattcaccttcgatgttgagaaatcggagattcagactttccacctgcagaatgaccccccagctgcctttcccaaggtgaagatccagattctaagcaactggggccacccccgtttcacgtgcttgtatcgagtccgtgcccacggtgtgcgaacctcagagggggcagagggcagtgcacaggggccccattaaacatgctgatttttggagtagaattga

SEQ ID NO: 29708 - DNA, 2421 bp, Homo sapiens
  source 1..2421: mol_type = unassigned DNA
gagaagcggctcccgtcggaggccgagtcgtcgccacgatcgcccccttggtggactcgcaggccgagcggcttccccgcagagctcgaggagggcagacggcggcgggggcgccatgagtcagaggcaggtgctgcaagtgttcgagcaataccagaaggccaggacccagttcgtgcagatggtggcggagctggcgactagaccccaaaacatcgagacgctgcagaacgcgggtgtaatgtctttgctgagaactcttcttctggacgtggtcccaacaattcaacagactgctgctttggctcttgggagactggccaattataatgatgacctagcagaagctgttgtgaagtgcgacattcttccacagcttgtttattcattggcagaacagaatcgcttctacaagaaagcagctgcctttgtgttacgagcagttggtaaacattctccccagctagctcaggcaatagtcgattgtggagcactggatacgctggtcatatgcttggaagattttgaccctggagtcaaggaggctgcagcctgggcacttagatatattgcaagacataatgcagaactgtcacaagctgtggtggatgcaggagctgttcctcttttagtactctgtatccaggagccagaaattgctttgaaaaggattgctgcttcggccctcagtgatattgcaaagcattctccagagttagcacagacagtagtggatgcaggagctgttgctcatttagcccagatgatcctgaaccctgatgctaaattgaagcatcagatcctttcagctctcagtcaggtttcaaaacattccgtggatctggcagaaatggttgttgaagcagagatttttccagttgtacttacctgtctgaaggacaaggatgaatacgtgaagaaaaatgcttctactttaattagagagattgcaaaacatacacccgagctttcacagctggtagttaacgcaggaggggttgctgccgtgattgactgcattgggtcctgcaaagggaacacacggctgcctggcatcatgatgcttggttatgtagcagctcattctgagaacctagcaatggcagtcatcatttctaagggtgtaccccagttgtcagtctgcttgtcagaagaaccggaagatcatattaaggctgcagctgcttgggccttaggacagattggaagacacactcctgaacacgcacgggctgttgcagtcacaaatactttgccagttctgctttctttgtacatgtcaacagaaagttctgaggatctccaagtaaaaagtaaaaaagccataaagaatatcctgcaaaaatgtacctacttaccagcccttgaaccatttctatatgatgctcctcccaatattctgaaacatgtggttggacagttcagtaaggtattattcccctggatattcagatacacttctgcagagggtggacagctatcaaccacttaataactgagcaaagttatattgtgatactcaaattcacagcagagtagttttgagtaacagtaattaaatccttctaaatatttgaactaagtatattctagatttatttaatgggaaatacctttagataatattttctaaatttatgtaatactttaaacattcgtagcttgaatatgtgaggaactattcatggtcattcgcatgcataggatttgttctacaggtagattttaaaaacacgttaaagggccttaaggcattttgttattctgttaaaaaccacacacactcgtacatgcagacacctccaatgagatatagttaagagatggcattcaaaaaccctaaattattctagccaatttgtcataggcataggcaaggaaagctggccttgctaactatatagtagtatacacaagagaaatctttgaaggaggaaactgatgacagatatacagggcacttgaaggagactctgatgctagttatataagtgcattaacttaagacacggactctgtgggtaacctgttaggttttactaagaatttaggaaaaatttactcctctttatcacaagttttccaaacctccttccccaccctatctaaagtgttccttacctttcatgggcccagcgagggtagaattcagaatagagagttatactcctgcatacatgctctccctctcattgaaaggtttcttagtctagctctgctcatgaatgaacaaagaagcaggcatgtaaaatggatccttgtcctaacgtcactttcccaagtttcaaaagtcacattttcaggtatttaaggaatagtttgaagctaataccatcaggctcagagtttacatgcatttttacttaggaagtggtaaacgggtgaaagagggtttcaataaaattttaaataaaaacagca

SEQ ID NO: 29709 - DNA, 1863 bp, Homo sapiens
  source 1..1863: mol_type = unassigned DNA
aggttgcccgggagacgcgggtacacagagaagcggctcccgtcggaggccgagtcgtcgccacgatcgcccccttggtggactcgcaggccgagcggcttccccgcagagctcgaggagggcagacggcggcgggggcgccatgagtcagaggcaggtgctgcaagtgttcgagcaataccagaaggccaggacccagttcgtgcagatggtggcggagctggcgactagaccccaaaacatcgagacgctgcagaacgcgggtgtaatgtctttgctgagaactcttcttctggacgtggtcccaacaattcaacagactgctgctttggctcttgggagactggccaattataatgatgacctagcagaagctgttgtgaagtgcgacattcttccacagcttgtttattcattggcagaacagaatggtgtaccccagttgtcagtctgcttgtcagaagaaccggaagatcatattaaggctgcagctgcttgggccttaggacagattggaagacacactcctgaacacgcacgggctgttgcagtcacaaatactttgccagttctgctttctttgtacatgtcaacagaaagttctgaggatctccaagtaaaaagtaaaaaagccataaagaatatcctgcaaaaatgtacctacttaccagcccttgaaccatttctatatgatgctcctcccaatattctgaaacatgtggttggacagttcagtaaggtgctgccgcatgatagcaaagctcgacgactttttgtaacaagtggtggccttaaaaaagttcaagagataaaagcagaacctggttctctccttcaagaatacatcaacagtattaacagttgttaccccgaggaaatagtgaggtattattcccctggatattcagatacacttctgcagagggtggacagctatcaaccacttaataactgagcaaagttatattgtgatactcaaattcacagcagagtagttttgagtaacagtaattaaatccttctaaatatttgaactaagtatattctagatttatttaatgggaaatacctttagataatattttctaaatttatgtaatactttaaacattcgtagcttgaatatgtgaggaactattcatggtcattcgcatgcataggatttgttctacaggtagattttaaaaacacgttaaagggccttaaggcattttgttattctgttaaaaaccacacacactcgtacatgcagacacctccaatgagatatagttaagagatggcattcaaaaaccctaaattattctagccaatttgtcataggcataggcaaggaaagctggccttgctaactatatagtagtatacacaagagaaatctttgaaggaggaaactgatgacagatatacagggcacttgaaggagactctgatgctagttatataagtgcattaacttaagacacggactctgtgggtaacctgttaggttttactaagaatttaggaaaaatttactcctctttatcacaagttttccaaacctccttccccaccctatctaaagtgttccttacctttcatgggcccagcgagggtagaattcagaatagagagttatactcctgcatacatgctctccctctcattgaaaggtttcttagtctagctctgctcatgaatgaacaaagaagcaggcatgtaaaatggatccttgtcctaacgtcactttcccaagtttcaaaagtcacattttcaggtatttaaggaatagtttgaagctaataccatcaggctcagagtttacatgcatttttacttaggaagtggtaaacgggtgaaagagggtttcaataaaatttt

SEQ ID NO: 29710 - DNA, 2808 bp, Homo sapiens
  source 1..2808: mol_type = unassigned DNA
aggttgcccgggagacgcgggtacacagagaagcggctcccgtcggaggccgagtcgtcgccacgatcgcccccttggtggactcgcaggccgagcggcttccccgcagagctcgaggagggcagacggcggcgggggcgccatgagtcagaggcaggtgctgcaagtgttcgagcaataccagaaggccaggacccagttcgtgcagatggtggcggagctggcgactagaccccaaaacatcgagacgctgcagaacgcgggtgagcccggagcccgaacccccgtcgccccccgcgcactgagtccccgacgcctccgccccgctgccctgcccgtggagctcttggggagccgcagtgtggggaccggagttcgcaaaagcatccattcttttcagcgggtctttgggggtcaggccgagagggtgaagcttccagatggttgtgggaggtgcgcgttgtccctgtttccatcttcattgcacacaggtgtaatgtctttgctgagaactcttcttctggacgtggtcccaacaattcaacagactgctgctttggctcttgggagactggccaattataatgatgacctagcagaagctgttgtgaagtgcgacattcttccacagcttgtttattcattggcagaacagaatcgcttctacaagaaagcagctgcctttgtgttacgagcagttggtaaacattctccccagctagctcaggcaatagtcgattgtggagcactggatacgctggtcatatgcttggaagattttgaccctggagtcaaggaggctgcagcctgggcacttagatatattgcaagacataatgcagaactgtcacaagctgtggtggatgcaggagctgttcctcttttagtactctgtatccaggagccagaaattgctttgaaaaggattgctgcttcggccctcagtgatattgcaaagcattctccagagttagcacagacagtagtggatgcaggagctgttgctcatttagcccagatgatcctgaaccctgatgctaaattgaagcatcagatcctttcagctctcagtcaggtttcaaaacattccgtggatctggcagaaatggttgttgaagcagagatttttccagttgtacttacctgtctgaaggacaaggatgaatacgtgaagaaaaatgcttctactttaattagagagattgcaaaacatacacccgagctttcacagctggtagttaacgcaggaggggttgctgccgtgattgactgcattgggtcctgcaaagggaacacacggctgcctggcatcatgatgcttggttatgtagcagctcattctgagaacctagcaatggcagtcatcatttctaagggtgtaccccagttgtcagtctgcttgtcagaagaaccggaagatcatattaaggctgcagctgcttgggccttaggacagattggaagacacactcctgaacacgcacgggctgttgcagtcacaaatactttgccagttctgctttctttgtacatgtcaacagaaagttctgaggatctccaagtaaaaagtaaaaaagccataaagaatatcctgcaaaaatgtacctacttaccagcccttgaaccatttctatatgatgctcctcccaatattctgaaacatgtggttggacagttcagtaaggtgctgccgcatgatagcaaagctcgacgactttttgtaacaagtggtggccttaaaaaagttcaagagataaaagcagaacctggttctctccttcaagaatacatcaacagtattaacagttgttaccccgaggaaatagtgaggtattattcccctggatattcagatacacttctgcagagggtggacagctatcaaccacttaataactgagcaaagttatattgtgatactcaaattcacagcagagtagttttgagtaacagtaattaaatccttctaaatatttgaactaagtatattctagatttatttaatgggaaatacctttagataatattttctaaatttatgtaatactttaaacattcgtagcttgaatatgtgaggaactattcatggtcattcgcatgcataggatttgttctacaggtagattttaaaaacacgttaaagggccttaaggcattttgttattctgttaaaaaccacacacactcgtacatgcagacacctccaatgagatatagttaagagatggcattcaaaaaccctaaattattctagccaatttgtcataggcataggcaaggaaagctggccttgctaactatatagtagtatacacaagagaaatctttgaaggaggaaactgatgacagatatacagggcacttgaaggagactctgatgctagttatataagtgcattaacttaagacacggactctgtgggtaacctgttaggttttactaagaatttaggaaaaatttactcctctttatcacaagttttccaaacctccttccccaccctatctaaagtgttccttacctttcatgggcccagcgagggtagaattcagaatagagagttatactcctgcatacatgctctccctctcattgaaaggtttcttagtctagctctgctcatgaatgaacaaagaagcaggcatgtaaaatggatccttgtcctaacgtcactttcccaagtttcaaaagtcacattttcaggtatttaaggaatagtttgaagctaataccatcaggctcagagtttacatgcatttttacttaggaagtggtaaacgggtgaaagagggtttcaataaaatttt

SEQ ID NO: 29711 - DNA, 2605 bp, Homo sapiens
  source 1..2605: mol_type = unassigned DNA
aggttgcccgggagacgcgggtacacagagaagcggctcccgtcggaggccgagtcgtcgccacgatcgcccccttggtggactcgcaggccgagcggcttccccgcagagctcgaggagggcagacggcggcgggggcgccatgagtcagaggcaggtgctgcaagtgttcgagcaataccagaaggccaggacccagttcgtgcagatggtggcggagctggcgactagaccccaaaacatcgagacgctgcagaacgcgggtgtaatgtctttgctgagaactcttcttctggacgtggtcccaacaattcaacagactgctgctttggctcttgggagactggccaattataatgatgacctagcagaagctgttgtgaagtgcgacattcttccacagcttgtttattcattggcagaacagaatcgcttctacaagaaagcagctgcctttgtgttacgagcagttggtaaacattctccccagctagctcaggcaatagtcgattgtggagcactggatacgctggtcatatgcttggaagattttgaccctggagtcaaggaggctgcagcctgggcacttagatatattgcaagacataatgcagaactgtcacaagctgtggtggatgcaggagctgttcctcttttagtactctgtatccaggagccagaaattgctttgaaaaggattgctgcttcggccctcagtgatattgcaaagcattctccagagttagcacagacagtagtggatgcaggagctgttgctcatttagcccagatgatcctgaaccctgatgctaaattgaagcatcagatcctttcagctctcagtcaggtttcaaaacattccgtggatctggcagaaatggttgttgaagcagagatttttccagttgtacttacctgtctgaaggacaaggatgaatacgtgaagaaaaatgcttctactttaattagagagattgcaaaacatacacccgagctttcacagctggtagttaacgcaggaggggttgctgccgtgattgactgcattgggtcctgcaaagggaacacacggctgcctggcatcatgatgcttggttatgtagcagctcattctgagaacctagcaatggcagtcatcatttctaagggtgtaccccagttgtcagtctgcttgtcagaagaaccggaagatcatattaaggctgcagctgcttgggccttaggacagattggaagacacactcctgaacacgcacgggctgttgcagtcacaaatactttgccagttctgctttctttgtacatgtcaacagaaagttctgaggatctccaagtaaaaagtaaaaaagccataaagaatatcctgcaaaaatgtacctacttaccagcccttgaaccatttctatatgatgctcctcccaatattctgaaacatgtggttggacagttcagtaaggtgctgccgcatgatagcaaagctcgacgactttttgtaacaagtggtggccttaaaaaagttcaagagataaaagcagaacctggttctctccttcaagaatacatcaacagtattaacagttgttaccccgaggaaatagtgaggtattattcccctggatattcagatacacttctgcagagggtggacagctatcaaccacttaataactgagcaaagttatattgtgatactcaaattcacagcagagtagttttgagtaacagtaattaaatccttctaaatatttgaactaagtatattctagatttatttaatgggaaatacctttagataatattttctaaatttatgtaatactttaaacattcgtagcttgaatatgtgaggaactattcatggtcattcgcatgcataggatttgttctacaggtagattttaaaaacacgttaaagggccttaaggcattttgttattctgttaaaaaccacacacactcgtacatgcagacacctccaatgagatatagttaagagatggcattcaaaaaccctaaattattctagccaatttgtcataggcataggcaaggaaagctggccttgctaactatatagtagtatacacaagagaaatctttgaaggaggaaactgatgacagatatacagggcacttgaaggagactctgatgctagttatataagtgcattaacttaagacacggactctgtgggtaacctgttaggttttactaagaatttaggaaaaatttactcctctttatcacaagttttccaaacctccttccccaccctatctaaagtgttccttacctttcatgggcccagcgagggtagaattcagaatagagagttatactcctgcatacatgctctccctctcattgaaaggtttcttagtctagctctgctcatgaatgaacaaagaagcaggcatgtaaaatggatccttgtcctaacgtcactttcccaagtttcaaaagtcacattttcaggtatttaaggaatagtttgaagctaataccatcaggctcagagtttacatgcatttttacttaggaagtggtaaacgggtgaaagagggtttcaataaaattttaaataaaaacagcattagaattgtc

SEQ ID NO: 29712 - DNA, 853 bp, Homo sapiens
  source 1..853: mol_type = unassigned DNA
agaagcggctcccgtcggaggccgagtcgtcgccacgatcgcccccttggtggactcgcaggccgagcggcttccccgcagagctcgaggagggcagacggcggcgggggcgccatgagtcagaggcaggtgctgcaagtgttcgagcaataccagaaggccaggacccagttcgtgcagatggtggcggagctggcgactagaccccaaaacatcgagacgctgcagaacgcgggtgagcccggagcccgaacccccgtcgccccccgcgcactgagtccccgacgcctccgccccgctgccctgcccgtggagctcttggggagccgcagtgtggggaccggagttcgcaaaagcatccattcttttcagcgggtctttgggggtcaggccgagagggtgaagcttccagatggttgtgggaggtgcgcgttgtccctgtttccatcttcattgcacacaggtgtaatgtctttgctgagaactcttcttctggacgtggtcccaacaattcaacagactgctgctttggctcttgggagactggccaattataatgatgacctagcagaagctgttgtgaagtgcgacattcttccacagcttgtttattcattggcagaacagaatcgcttctacaagaaagcagctgcctttgtgttacgagcagttggtaaacattctccccagctagctcaggcaatagtcgattgtggagcactggatacgctggtcatatgcttggaagattttgaccctggagtcaaggaggctgcagcctgggcacttagatatattgcaagacataatgcagaactgtcacaagctgtggtggatgcaggagctgttcctc

SEQ ID NO: 29713 - DNA, 691 bp, Homo sapiens
  source 1..691: mol_type = unassigned DNA
agagaagcggctcccgtcggaggccgagtcgtcgccacgatcgcccccttggtggactcgcaggccgagcggcttccccgcagagctcgaggagggcagacggcggcgggggcgccatgagtcagaggcaggtgctgcaagtgttcgagcaataccagaaggccaggacccagttcgtgcagatggtggcggagctggcgactagaccccaaaacatcgagacgctgcagaacgcgggtgtaatgtctttgctgagaactcttcttctggacgtggtcccaacaattcaacagactgctgctttggctcttgggagactggccaattataatgatgacctagcagaagctgttgtgaagtgcgacattcttccacagcttgtttattcattggcagaacagaatggtgtaccccagttgtcagtctgcttgtcagaagaaccggaagatcatattaaggctgcagctgcttgggccttaggacagattggaagacacactcctgaacacgcacgggctgttgcagtcacaaatactttgccagttctgctttctttgtacatgtcaacagaaagttctgaggatctccaagtaaaaagtaaaaaagccataaagaatatcctgcaaaaatgtacctacttaccagcccttgaaccatttctatatgatgctcctcccaatattctgaaaca

SEQ ID NO: 29714 - DNA, 2112 bp, Homo sapiens
  source 1..2112: mol_type = unassigned DNA
aggttgcccgggagacgcgggtacacagagaagcggctcccgtcggaggccgagtcgtcgccacgatcgcccccttggtggactcgcaggccgagcggcttccccgcagagctcgaggagggcagacggcggcgggggcgccatgagtcagaggcaggtgctgcaagtgttcgagcaataccagaaggccaggacccagttcgtgcagatggtggcggagctggcgactagaccccaaaacatcgagacgctgcagaacgcggagtcttgctctgttgccaggctagagtgcagtggcatgatctcggctcactacaacctccgcctcccaggttcaagcgattctcctgcctcagcctcctgagtagctgagactacagatggagtctcattcactctgtcacccaggctggagtgcagtggcaccatccttgcccactgcagcctccacctccccggatcaagtgattctcctgcctcagtctcccaaagtgctgggattaaagaggccttgtttatcagatattgtggcaactattcagactgctttaatttgtgaactctaaatttccatgcattcactcaccatggatctctggatacctaatggacaggcaggtgtaatgtctttgctgagaactcttcttctggacgtggtcccaacaattcaacagactgctgctttggctcttgggagactggccaattataatgatgacctagcagaagctgttgtgaagtgcgacattcttccacagcttgtttattcattggcagaacagaatcgcttctacaagaaagcagctgcctttgtgttacgagcagttggtaaacattctccccagctagctcaggcaatagtcgattgtggagcactggatacgctggtcatatgcttggaagattttgaccctggagtcaaggaggctgcagcctgggcacttagatatattgcaagacataatgcagaactgtcacaagctgtggtggatgcaggagctgttcctcttttagtactctgtatccaggagccagaaattgctttgaaaaggattgctgcttcggccctcagtgatattgcaaagcattctccagagttagcacagacagtagtggatgcaggagctgttgctcatttagcccagatgatcctgaaccctgatgctaaattgaagcatcagatcctttcagctctcagtcaggtttcaaaacattccgtggatctggcagaaatggttgttgaagcagagatttttccagttgtacttacctgtctgaaggacaaggatgaatacgtgaagaaaaatgcttctactttaattagagagattgcaaaacatacacccgagctttcacagctggtagttaacgcaggaggggttgctgccgtgattgactgcattgggtcctgcaaagggaacacacggctgcctggcatcatgatgcttggttatgtagcagctcattctgagaacctagcaatggcagtcatcatttctaagggtgtaccccagttgtcagtctgcttgtcagaagaaccggaagatcatattaaggctgcagctgcttgggccttaggacagattggaagacacactcctgaacacgcacgggctgttgcagtcacaaatactttgccagttctgctttctttgtacatgtcaacagaaagttctgaggatctccaagtaaaaagtaaaaaagccataaagaatatcctgcaaaaatgtacctacttaccagcccttgaaccatttctatatgatgctcctcccaatattctgaaacatgtggttggacagttcagtaaggtgctgccgcatgatagcaaagctcgacgactttttgtaacaagtggtggccttaaaaaagttcaagagataaaagcagaacctggttctctccttcaagaatacatcaacagtattaacagttgttaccccgaggaaatagtgaggtattattcccctggatattcagatacacttctgcagagggtggacagctatcaaccacttaataactgagcaaagttatattgtgatactcaaattcacagcagagtagttttgagtaacagtaattaaatccttctaaatatttgaactaagt

SEQ ID NO: 29715 - DNA, 1759 bp, Homo sapiens
  source 1..1759: mol_type = unassigned DNA
gaagacttccgccccgcagaggacttgcctccaccgccacctgcaagtccgcccagctgtacttctgcgcaggctccaggagttgtttgctgtctctatggcaacccagtagctggagtctgaagatggagaccaacgagtctacggagggatcgcggtcgcggtcgcgatctttagacatacagcccagctccgaaggactggggcccacttcggaaccgtttccttcttcagatgacagtcccaggtcggccctggcagctgcaaccgcagcagctgcagcggctgcatcagctgctgcagctactgcagccttcaccactgccaaagcagctgcattatctacaaagaccccagcgccctgttctgagttcatggagccgtcctctgaccccagccttcttggggagccctgtgcgggacccggctttacccacaatatagcccatgggagtcttggctttgagcccgtctatgtttcctgtattgctcaggacacttgcactacaactgaccatagttctaatcctggccctgttccaggctctagctctgggcctgttcttggttccagctcaggtgctggccatggctctggctctggctctggtcctggctgtggctctgtccctggctctggctctggtcctggtcctggctctggtcctggctctggtcctggtcatggctctggctctcatcctggtcctgcctctgggcctggtccagacactggccctgactctgagctcagcccctgtattcctccagggttcagaaacctggtggcagatcgggtccctaactatacctcctggagtcagcactgcccctgggagccccagaaacaaccaccttgggaatttttgcaagtcttagaaccgggtgcccgaggactatggaaacccccagacattaaagggaagcttatggtttgctatgaaactttgccgcggggccagtgcctcctctacaactgggaggaagagagagccaccaaccacctggatcaagtcccaagcatgcaggatggctctgagagttttttcttccgacacggacaccggggactgctgactatgcaactaaagtcacccatgccctccagcaccacccagaaagactcgtaccagccaccaggaaacgtctattggccacttcgagggaagcgtgaagccatgctggagatgctcctgcagcatcagatctgtaaagaggtgcaggcagaacaggaacccacaaggaagctcttcgaggttgagtctgtgacacaccatgactaccgaatggagctggcacaagcagggactcctgccccaacaaagcctcacgactaccgccaggagcaacctgagaccttctggatacagagggcaccacagctgccgacatggtggccattgcccacccaggtaccagcagcagaagactatctgacttggaaagaatgggggtttacaggagtccaggaggtcctttccgctctcctaagagccacacctggtgaatactcagtaaacatttgcggaatgaatgaacaccctgtctgcagcaggacatggacaaataggctctgccatcaggaaatgggaagcaagaaaacggtaactcaagaggacagaggctggtgaggaggtaaagcaggcccagtgaaatggacctgacagcccaaactgtcagagaggaggaaagcaggcatttgattttggtaattgtgccaaagctatgtaagagaataaatgccattgttttaaggaaa

SEQ ID NO: 29716 - DNA, 1600 bp, Homo sapiens
  source 1..1600: mol_type = unassigned DNA
aacccagtagctggagtctgaagatggagaccaacgagtctacggagggatcgcggtcgcggtcgcgatctttagacatacagcccagctccgaaggactggggcccacttcggaaccgtttccttcttcagatgacagtcccaggtcggccctggcagctgcaaccgcagcagctgcagcggctgcatcagctgctgcagctactgcagccttcaccactgccaaagcagctgcattatctacaaagaccccagcgccctgttctgagttcatggagccgtcctctgaccccagccttcttggggagccctgtgcgggacccggctttacccacaatatagcccatgggagtcttggctttgagcccgtctatgtttcctgtattgctcaggacacttgcactacaactgaccatagttctaatcctggccctgttccaggctctagctctgggcctgttcttggttccagctcaggtgctggccatggctctggctctggctctggtcctggctgtggctctgtccctggctctggctctggtcctggtcctggctctggtcctggctctggtcctggtcatggctctggctctcatcctggtcctgcctctgggcctggtccagacactggccctgactctgagctcagcccctgtattcctccagggttcagaaacctggtggcagatcgggtccctaactatacctcctggagtcagcactgcccctgggagccccagaaacaaccaccttgggaatttttgcaagtcttagaaccgggtgcccgaggactatggaaacccccagacattaaagggaagcttatggtttgctatgaaactttgccgcggggccagtgcctcctctacaactgggaggaagagagagccaccaaccacctggatcaagtcccaagcatgcaggatggctctgagagttttttcttccgacacggacaccggggactgctgactatgcaactaaagtcacccatgccctccagcaccacccagaaagactcgtaccagccaccaggaaacgtctattggccacttcgagggaagcgtgaagccatgctggagatgctcctgcagcatcagatctgtaaagaggtgcaggcagaacaggaacccacaaggaagctcttcgaggttgagtctgtgacacaccatgactaccgaatggagctggcacaagcagggactcctgccccaacaaagcctcacgactaccgccaggagcaacctgagaccttctggatacagagggcaccacagctgccgggtgtcagtaacatcaggacattggacacaccattccggaagaactgcagcttctcaacaccagtacccttgtctctggggaaacttttgccctatgaacctgagaattacccctaccaattgggagaaatatcttcccttccctgtcccggaggaaggctgggtggtggaggggggagaatgactcctttctgaggggtgaggagggaagtggggtatggaatatggaatctatttctgtctgcactagagaggtcgggaggaagttaattctcactgtacttgaagaggctttacataaagggttctctctc

SEQ ID NO: 29717 - DNA, 2481 bp, Homo sapiens
  source 1..2481: mol_type = unassigned DNA
gccccgcagaggacttgcctccaccgccacctgcaagtccgcccagctgtacttctgcgcaggctccaggagttgtttgctgtctctatggcaacccagtagctggagtctgaagatggagaccaacgagtctacggagggatcgcggtcgcggtcgcgatctttagacatacagcccagctccgaaggactggggcccacttcggaaccgtttccttcttcagatgacagtcccaggtcggccctggcagctgcaaccgcagcagctgcagcggctgcatcagctgctgcagctactgcagccttcaccactgccaaagcagctgcattatctacaaagaccccagcgccctgttctgagttcatggagccgtcctctgaccccagccttcttggggagccctgtgcgggacccggctttacccacaatatagcccatgggagtcttggctttgagcccgtctatgtttcctgtattgctcaggacacttgcactacaactgaccatagttctaatcctggccctgttccaggctctagctctgggcctgttcttggttccagctcaggtgctggccatggctctggctctggctctggtcctggctgtggctctgtccctggctctggctctggtcctggtcctggctctggtcctggctctggtcctggtcatggctctggctctcatcctggtcctgcctctgggcctggtccagacactggccctgactctgagctcagcccctgtattcctccagggttcagaaacctggtggcagatcgggtccctaactatacctcctggagtcagcactgcccctgggagccccagaaacaaccaccttgggaatttttgcaagtcttagaaccgggtgcccgaggactatggaaacccccagacattaaagggaagcttatggtttgctatgaaactttgccgcggggccagtgcctcctctacaactgggaggaagagagagccaccaaccacctggatcaagtcccaagcatgcaggatggctctgagagttttttcttccgacacggacaccggggactgctgactatgcaactaaagtcacccatgccctccagcaccacccagaaagactcgtaccagccaccaggaaacgtctattggccacttcgagggaagcgtgaagccatgctggagatgctcctgcagcatcagatctgtaaagaggtgcaggcagaacaggaacccacaaggaagctcttcgaggttgagtctgtgacacaccatgactaccgaatggagctggcacaagcagggactcctgccccaacaaagcctcacgactaccgccaggagcaacctgagaccttctggatacagagggcaccacagctgccggtgtgtgagggtgactaggtgttgggggcagagcggggcaggaaaggtagggcagagttgttttgttctggcttggggagagtgggatccatcctcatcctggcactcctccagggtgtcagtaacatcaggacattggacacaccattccggaagaactgcagcttctcaacaccagtacccttgtctctggggaaacttttgccctatgaacctgagaattacccctaccaattgggagaaatatcttcccttccctgtcccggaggaaggctgggtggtggaggggggagaatgactcctttctgaggggtgaggagggaagtggggtatggaatatggaatctatttctgtctgcactagagaggtcgggaggaagttaattctcactgtacttgaagaggctttacataaagggttctctctcatcccaagactgctaatttagtgattctgtgagtcactgtgtgcataccccataacctttccttgggattgcccctatcccacactatgacatcagaactttttttattattgttttatatttgaccaaaatattctggtttagatacagatatttacagaaagtagggaggaaggggaccaagccagagagggacaggtatatgtacagggctgagctgcagagggctacaacttccatataaggtaggtttttttgtggctgttttccattgcatatgaaaatgtccatttctggtgtgtgcagacatggtggccattgcccacccaggtaccagcagcagaagactatctgacttggaaagaatgggggtttacaggagtccaggaggtcctttccgctctcctaagagccacacctggtgaatactcagtaaacatttgcggaatgaatgaacaccctgtctgcagcaggacatggacaaataggctctgccatcaggaaatgggaagcaagaaaacggtaactcaagaggacagaggctggtgaggaggtaaagcaggcccagtgaaatggacctgacagcccaaactgtcagagaggaggaaagcaggcatttgattttggtaattgtgccaaagctatgtaagagaataaatgccattgttttaagga

SEQ ID NO: 29718 - DNA, 8273 bp, Homo sapiens
  source 1..8273: mol_type = unassigned DNA
agttggtgcagcggcggttggggtgagagcgcctacgccacccctcccctcctccggccccggcccccaccccgccgggcccagccccagccccggcccgggctccagccctagtacccgtcccagcccgagtcgggtccgtcccgtgcgggcaggtgccgcccctctgccggcgacgccccgggccgcccgcccgtccgcttgccaccatggagctggaggacggtgtggtgtatcaggaggagcccggcggctccggggccgtgatgtcggagcgggtgtccggcctggccggctccatctaccgcgagttcgagcggcttatcgggcgctatgacgaggaggtggtcaaagagctgatgccgctggtggtggctgtgctggagaacctggactcggtgttcgcgcaggaccaggagcaccaggtggagctggagctgctgcgggacgacaacgagcagctcatcacccagtacgagcgggagaaggcgctgcgcaagcacgctgaggagaaattcattgaatttgaagactctcaagaacaggaaaaaaaggacttacagacccgagtggaatctttagaatctcaaacaagacaacttgagctgaaagcgaaaaactatgctgaccagattagcagacttgaagaaagagaagcagaactgaagaaggaatataatgcattacatcaaagacacactgagatgatccataattatatggaacatttagaaagaacaaaacttcatcagctctcagggagtgatcaactagaatccacagctcatagtagaattagaaaagaacgccctatatcattaggaattttcccattacctgctggagatggattgcttacacctgatgctcagaaaggaggagagacccctggatctgagcaatggaaatttcaggaattaagtcaaccacgttctcataccagcctgaaggtcagcaatagtcctgaacctcagaaggctgtagaacaggaggatgagctttctgatgttagccaaggcggatctaaagctaccactccagcatcaacagctaattcagatgtggcaacaattcctactgatactcccttaaaggaagaaaacgaaggatttgtgaaggttacagatgcgccaaataaatcagagataagcaaacacattgaagtacaggtagcccaggaaactagaaatgtatctactggctctgctgaaaatgaagaaaagtcagaagttcaagcaatcatcgaatctactcctgagctggatatggacaaagatctcagtggatataaaggttcaagcactcccaccaaaggcatagagaacaaagcttttgatcgcaatacagaatctctctttgaagaactgtcttcagctggctcaggcctaataggagatgtggatgaaggagcagatttactaggaatgggtcgggaagttgagaatcttatattagaaaatacacaactgttggaaaccaaaaatgctttgaacatagtgaagaatgatttgatagcaaaagtggatgaactgacctgtgagaaagatgtgctgcaaggggaattggaggctgtgaagcaagccaaactgaaactagaggaaaagaacagagaattggaggaagagcttaggaaagctcgggcagaagctgaagatgcaaggcaaaaagcaaaagatgacgatgatagtgatattcccacagcccagaggaaacggtttactagagtagaaatggcccgtgttctcatggagcgaaaccagtataaagagagattgatggagcttcaggaagctgttcgatggacagagatgattcgggcatcacgagaaaatccagccatgcaggaaaaaaaaaggtcaagcatttggcagtttttcagccgacttttcagctcctcaagtaacacgactaagaagcctgaaccacctgttaatctgaagtacaatgcacccacgtctcatgttactccgtccgtcaagaaaagaagcagcaccttatctcagctccctggggataagtccaaagcctttgatttccttagtgaagaaactgaagctagtttagcctcacgcagagaacaaaagagagagcagtatcgtcaggtaaaagcacatgttcagaaggaagacggtagagtgcaggcttttggctggagtctgcctcagaagtacaaacaggtaaccaatggtcaaggtgaaaataagatgaaaaatttacctgtgcctgtctatctcagacctctggatgaaaaagatacatcaatgaagctgtggtgtgctgttggagtcaatttatctggtgggaagaccagagatggtggttctgttgttggagcaagtgtattttacaaggatgttgctggtttggatacagaaggcagtaaacagcgaagtgcctctcagagtagtttagataagttagatcaggaacttaaggaacagcagaaggagttaaaaaatcaagaagaattatccagtctagtttggatctgtaccagcactcattcggctacaaaagttcttattattgatgctgttcaacctggcaacatcctagacagtttcactgtttgcaactctcatgttctgtgcattgcaagtgtgccaggtgcacgagaaacagactaccctgcaggagaagatctttcagaatctggtcaggtagacaaagcatctttatgtggaagtatgacaagcaacagctcagcagagacagacagcctgttaggaggcatcacagtggttggttgttctgcagaaggtgtgacgggagctgccacttcccctagtacaaatggtgcttctccagtgatggataaaccaccagaaatggaagcagaaaatagtgaggttgatgaaaatgttccaacagcagaagaagcaactgaagctacagaagggaatgcggggtcagctgaagacacagtggacatctcccaaactggcgtctacacagagcatgtctttacagatcctttgggagttcagatcccagaagacctctccccagtgtatcagtcgagcaatgactcagatgcatataaagatcaaatatcagtactgccaaatgaacaagacttggtgagagaagaagcccagaaaatgagtagtcttttaccaactatgtggcttggagctcaaaatggctgtttgtatgtccattcatctgtagcccagtggaggaaatgtctccattccattaaacttaaagattcgattctcagtattgtacacgtgaagggaatcgtgttagtagccctggctgacggcacccttgcaatctttcacagaggagtggatgggcagtgggatttgtcaaactatcacctcttagaccttggacggcctcatcattccatccgttgcatgactgtggtacatgacaaagtctggtgtggctataggaacaaaatctatgtggtgcagccaaaggccatgaaaatagagaaatcttttgatgcacatcccaggaaggagagccaagtgcgacagcttgcgtgggtgggggatggcgtgtgggtctccattcgcttggattctacgctccgtctctatcatgcacacacttatcaacatctacaggatgtggacattgagccttatgtaagcaaaatgttaggtactggaaaactgggcttctcttttgtgagaattacagctcttatggtgtcttgtaatcgtttgtgggtggggacaggaaatggtgtcattatctccatcccattgacagaaacaaataaaacctcaggtgtaccaggaaatcgtcctggaagtgtaatccgtgtatatggtgatgaaaacagtgataaagtgactccagggacatttataccctattgttcaatggcacatgcacagctttgcttccatgggcaccgggatgctgtgaaattctttgtggcagtcccaggtcaagtcatcagcccacaaagtagcagtagtggcacggatctgacgggtgacaaagcagggccatctgcacaggagcctggtagtcagacgcccttgaagtctatgcttgtcatcagtggaggagagggctacatcgacttccgaatgggtgatgaaggtggagaatcagaacttcttggagaggatcttccacttgaaccttctgtcaccaaagcagaaaggagtcacttgatagtgtggcaagtgatgtatggcaatgagtgagcccatgggaaacaggtggagatggggaagccgtctcttctgcatggtttattttccctctatccttttatttaatgctcttttgtgagataagtttcaccacataatgtgtgagcattttttcctgttaactttatattacaaaatccgttctaccataacaatacagaggaactagctgtgttactgcaccagtgttataggtaacttcagtatattatgaacaaatcaaagaatgtttacttcctgcaaactggtgaattatagaaagcaatccagatgtggtttactctgccacagtctaatgtcattcacttcatttgatggggtcacttgttagctgtcactaataatggaattaatgggaaacacttgataaatgaaactgtaccgttaaatacaatagctgagttttccccagtgtattgtaaaattgacacacactaatacaagatggattatcaggatgtatctaaatgtcccgagagggttaaaagctaactgtaaattactttaactttcactttcaaatctgacaaatcttgtttatatggtatataaaactttgttttcatcagatttgggggggttttatattaaagaaattaagactacactatttaaataaacgtttcctgtttctgacttattagagctctaaagtttatgaggcctacttctctgaatattctgatgggttttttttgagaccagtctcattttcatactgacatgtctgaaagatttattatttataaagcttaggacatactctgggaagcttagaagatacttcagcactgggaggattttttaaaggaaatgtgttttgtatttcttgtaccagagaatggtgatgttgattgagttttttccatgtaaaaaatgtacttgtttgccaaatgttcctagattgctcttaacctgttaatacaagtaaaactgtagtggggatggagtctggcctaagtacagaatgagggatttaattagaaaagttattttcttttgttctgtatcaaactgcagaacagctatatacttggtattttgtacgtgaataacgttttagcttttgtgcccttttgagcttgaagggttatcctcaaaggggaaaactatgaaggggaagaagacaaacctaagataccataaagtaaaggttgacattacatattttcattcacaatgcccattaaaaaaaaaaaataggttgggcatggtggctcacgcctgtaatcccaacactttaggaggctgaggcagatggattgcttgagcccaggagttcaagaccagcctgggcaacatggcgaaaccctgtctctaccaaaaaaaaaaaacaaaataaattaaccgggtgtggtggcacatgcctgtagtcccagctacttgggaggctgaggtgggaggatgacctgggcccaggaggtggaggttgcagtgagccttgatagcaccactgcactccagcctgggtgacggagcaagaccctgtctcaaaacagacaaacaagcaaaaaatagattaaagtctggatttcactgattttcttgcttaataagttttttaaaaccacgatgctgcaattttttccctctcaagcttcttgaaaatgtgtgatttacccttttttatctattactctaggcaaagctaaatatgatttttttttttttttttgagacggagtctggctctgttgcccaggctggaatgcagtggtgcgatctcagctcactgcaacctccacctctcaggttcaagtagttctcctgcctcagcctcccaagtagctgggattacaggtgtgtgccaccctgcccagctaatttttgtatttttagtagagacagggtttcaccacattggccaggctggtctcaaactcctgacctcagatgatctacccgccttggcctcccgaagtgcttgaattacaggcgtgagcccccgcgccggtccgaagcaaagctaaatgtaattttatgtactgttttaacagtataaacctatgggataaaggcccccaatcatcagaaggactactgaaaagaaaagaaagcaaacgtagatgtcaaattgtctaaacattcttaagtaccactgattttttttttctggactattatacaaagatgtctgtaaaaagtataccagtggcttttatgcatatacacgattaggctagattgtgaagtacatgggatttcatgagccagaggaggcatttggatccattgggccacatgtgactataagcacattgtgtacacaataaaattgtagccactcatgtattaaaactgttttggtaaaagctgtattaaaagaataattttttgcttgagctacttagtcacttttttgcagggcaccaaaatgtaggctacttttccatagcttgtttgctatgtttttatttcatcttaaatctgagccatttttggcaatatcttttaaaaaatcattattaaacatttattggaaatgttgtatagattcacaagaaagagacaccaaagtgtttgggaattttaatcccaagaagtaaacatcccagagtcagatcccatttgctgttgttcagccatgtttgtatgactgaatgtaatttaggaaatcaggagttagagatgaaaaatacaaacatgtcaaatggttgtaattgctttttttgaacttactggctttaacttaagtaatataggtgtgtagttgttttatctaaagatgtcagattatctgtggccctgttaattaactgcagggaccagagagaggacaaaaatgcctgtataatttgctttaaaggcttgtccttatgtttgtaatttcagttaaatattttctacagattgcttcacttcccctttcccccaataacaagttcatattcttgtaatgtttactttggtcaacgtggtaatttttggaagaaaatgccaaaatgtaagcttctcacaagcagcaaaggaatgtaactgcctgtagctaccacatcaagggagagaagaggcttgcgtactttgggttgatctcactgtacaaaaaaagtgtacccctattggaagaaataaggaatacttgaaggtttctcctttttttacacttgagtcatgtgcaaggttgaaccatatgaaattgccagtgttcaaccattgctgatctgcaaaagcgacaatatcatatgcctcaacctaacacttactcttaaatgcaggttaaaatctctgtgaggcaaagggataatattctctaggaactcacttttgagagtatttttctctaacccatgtggatctaaattttaaaaataggaatgaatctcttaattgcagcttgtggagagtataaaacattttgagcacaatatgcagcacataacttttcagattgtgtttgcatagaaaaggttaaaatcaattctttcagttactgtattgttcatttcttgtaaaggtcttcctacatttgagacgagaccctttaacataggctgccttagtaacaaaataaaacagatgtgtcataatattaactgtcctaaagaacatgtgtcttgcaaatgccatggaactgaatatttatttccttgtgagtattatgaccgttaccaaaggactcaaccagatttagggctcttcttaattgatcatgttcagaaagggactcatttggtcccactttgtaacatgggaagagtagaagagaaaattaaatgtggaaatcataaatgcttttctaacagggttatgctattctgtaacactaaatgtctgtcttttctcttaaaagattaagttttattaattttgtcatacatttctctatttgaatatatcttaaccattttatgttccaaattcgttttttgtccaagacattctatcagaattttacttgcctctataatctgaaaaatgggttctagaatgtcccacttgctgtctcttagaggctgagcttcatttctatgagcaaagagctcatttagcaatgtagttatttcagtatttatttctattatggaatccctggggttcagaatgtaactttgtacatgagatatatataaatatgtatatgaacatgta

SEQ ID NO: 29719 - DNA, 4761 bp, Homo sapiens
  source 1..4761: mol_type = unassigned DNA
agttggtgcagcggcggttggggtgagagcgcctacgccacccctcccctcctccggccccggcccccaccccgccgggcccagccccagccccggcccgggctccagccctagtacccgtcccagcccgagtcgggtccgtcccgtgcgggcaggtgccgcccctctgccggcgacgccccgggccgcccgcccgtccgcttgccaccatggagctggaggacggtgtggtgtatcaggaggagcccggcggctccggggccgtgatgtcggagcgggtgtccggcctggccggctccatctaccgcgagttcgagcggcttatcgggcgctatgacgaggaggtggtcaaagagctgatgccgctggtggtggctgtgctggagaacctggactcggtgttcgcgcaggaccaggagcaccaggtggagctggagctgctgcgggacgacaacgagcagctcatcacccagtacgagcgggagaaggcgctgcgcaagcacgctgaggagaaattcattgaatttgaagactctcaagaacaggaaaaaaaggacttacagacccgagtggaatctttagaatctcaaacaagacaacttgagctgaaagcgaaaaactatgctgaccagattagcagacttgaagaaagagaagcagaactgaagaaggaatataatgcattacatcaaagacacactgagatgatccataattatatggaacatttagaaagaacaaaacttcatcagctctcagggagtgatcaactagaatccacagctcatagtagaattagaaaagaacgccctatatcattaggaattttcccattacctgctggagatggattgcttacacctgatgctcagaaaggaggagagacccctggatctgagcaatggaaatttcaggaattaagtcaaccacgttctcataccagcctgaaggatgagctttctgatgttagccaaggcggatctaaagctaccactccagcatcaacagctaattcagatgtggcaacaattcctactgatactcccttaaaggaagaaaacgaaggatttgtgaaggttacagatgcgccaaataaatcagagataagcaaacacattgaagtacaggtagcccaggaaactagaaatgtatctactggctctgctgaaaatgaagaaaagtcagaagttcaagcaatcatcgaatctactcctgagctggatatggacaaagatctcagtggatataaaggttcaagcactcccaccaaaggcatagagaacaaagcttttgatcgcaatacagaatctctctttgaagaactgtcttcagctggctcaggcctaataggagatgtggatgaaggagcagatttactaggaatgggtcgggaagttgagaatcttatattagaaaatacacaactgttggaaaccaaaaatgctttgaacatagtgaagaatgatttgatagcaaaagtggatgaactgacctgtgagaaagatgtgctgcaaggggaattggaggctgtgaagcaagccaaactgaaactagaggaaaagaacagagaattggaggaagagcttaggaaagctcgggcagaagctgaagatgcaaggcaaaaagcaaaagatgacgatgatagtgatattcccacagcccagaggaaacggtttactagagtagaaatggcccgtgttctcatggagcgaaaccagtataaagagagattgatggagcttcaggaagctgttcgatggacagagatgattcgggcatcacgagaaaatccagccatgcaggaaaaaaaaaggtcaagcatttggcagtttttcagccgacttttcagctcctcaagtaacacgactaagaagcctgaaccacctgttaatctgaagtacaatgcacccacgtctcatgttactccgtccgtcaagaaaagaagcagcaccttatctcagctccctggggataagtccaaagcctttgatttccttagtgaagaaactgaagctagtttagcctcacgcagagaacaaaagagagagcagtatcgtcaggtaaaagcacatgttcagaaggaagacggtagagtgcaggcttttggctggagtctgcctcagaagtacaaacaggtaaccaatggtcaaggtgaaaataagatgaaaaatttacctgtgcctgtctatctcagacctctggatgaaaaagatacatcaatgaagctgtggtgtgctgttggagtcaatttatctggtgggaagaccagagatggtggttctgttgttggagcaagtgtattttacaaggatgttgctggtttggatacagaaggcagtaaacagcgaagtgcctctcagagtagtttagataagttagatcaggaacttaaggaacagcagaaggagttaaaaaatcaagaagaattatccagtctagtttggatctgtaccagcactcattcggctacaaaagttcttattattgatgctgttcaacctggcaacatcctagacagtttcactgtttgcaactctcatgttctgtgcattgcaagtgtgccaggtgcacgagaaacagactaccctgcaggagaagatctttcagaatctggtcaggtagacaaagcatctttatgtggaagtatgacaagcaacagctcagcagagacagacagcctgttaggaggcatcacagtggttggttgttctgcagaaggtgtgacgggagctgccacttcccctagtacaaatggtgcttctccagtgatggataaaccaccagaaatggaagcagaaaatagtgaggttgatgaaaatgttccaacagcagaagaagcaactgaagctacagaagggaatgcggggtcagctgaagacacagtggacatctcccaaactggcgtctacacagagcatgtctttacagatcctttgggagttcagatcccagaagacctctccccagtgtatcagtcgagcaatgactcagatgcatataaagatcaaatatcagtactgccaaatgaacaagacttggtgagagaagaagcccagaaaatgagtagtcttttaccaactatgtggcttggagctcaaaatggctgtttgtatgtccattcatctgtagcccagtggaggaaatgtctccattccattaaacttaaagattcgattctcagtattgtacacgtgaagggaatcgtgttagtagccctggctgacggcacccttgcaatctttcacagaggagtggatgggcagtgggatttgtcaaactatcacctcttagaccttggacggcctcatcattccatccgttgcatgactgtggtacatgacaaagtctggtgtggctataggaacaaaatctatgtggtgcagccaaaggccatgaaaatagagaaatcttttgatgcacatcccaggaaggagagccaagtgcgacagcttgcgtgggtgggggatggcgtgtgggtctccattcgcttggattctacgctccgtctctatcatgcacacacttatcaacatctacaggatgtggacattgagccttatgtaagcaaaatgttaggtactggaaaactgggcttctcttttgtgagaattacagctcttatggtgtcttgtaatcgtttgtgggtggggacaggaaatggtgtcattatctccatcccattgacagaaacaaataaaacctcaggtgtaccaggaaatcgtcctggaagtgtaatccgtgtatatggtgatgaaaacagtgataaagtgactccagggacatttataccctattgttcaatggcacatgcacagctttgcttccatgggcaccgggatgctgtgaaattctttgtggcagtcccaggtcaagtcatcagcccacaaagtagcagtagtggcacggatctgacgggtgacaaagcagggccatctgcacaggagcctggtagtcagacgcccttgaagtctatgcttgtcatcagtggaggagagggctacatcgacttccgaatgggtgatgaaggtggagaatcagaacttcttggagaggatcttccacttgaaccttctgtcaccaaagcagaaaggagtcacttgatagtgtggcaagtgatgtatggcaatgagtgagcccatgggaaacaggtggagatggggaagccgtctcttctgcatggtttattttccctctatccttttatttaatgctcttttgtgagataagtttcaccacataatgtgtgagcattttttcctgttaactttatattacaaaatccgttctaccataacaatacagaggaactagctgtgttactgcaccagtgttataggtaacttcagtatattatgaacaaatcaaagaatgtttacttcctgcaaactggtgaattatagaaagcaatccagatgtggtttactctgccacagtctaatgtcattcacttcatttgatggggtcacttgttagctgtcactaataatggaattaatgggaaacacttgataaatgaaactgtaccgttaaatacaatagctgagttttccccagtgtattgtaaaattgacacacactaatacaagatggattatcaggatgtatctaaatgtcccgagagggttaaaagctaactgtaaattactttaactttcactttcaaatctgacaaatcttgtttatatggtatataaaactttgttttcatcagatttgggggggttttatattaaagaaattaagactacactatttaaataa

SEQ ID NO: 29720 - DNA, 1908 bp, Homo sapiens
  source 1..1908: mol_type = unassigned DNA
tcccttaaggatgagctttctgatgttagccaaggcggatctaaagctaccactccagcatcaacagctaattcagatgtggcaacaattcctactgatactcccttaaaggaagaaaacgaaggatttgtgaaggttacagatgcgccaaataaatcagagataagcaaacacattgaagtacaggtagcccaggaaactagaaatgtatctactggctctgctgaaaatgaagaaaagtcagaagttcaagcaatcatcgaatctactcctgagctggatatggacaaagatctcagtggatataaaggttcaagcactcccaccaaaggcatagagaacaaagcttttgatcgcaatacagaatctctctttgaaaaaagaagcagcaccttatctcagctccctggggataagtccaaagcctttgatttccttagtgaagaaactgaagctagtttagcctcacgcagagaacaaaagagagagcagtatcgtcaggtaaaagcacatgttcagaaggaagacggtagagtgcaggcttttggctggagtctgcctcagaagtacaaacaggtaaccaatggtcaaggtgaaaataagatgaaaaatttacctgtgcctgtctatctcagacctctggatgaaaaagatacatcaatgaagaagctgtggtgtgctgttggagtcaatttatctggtgggaagaccagagatggtggttctgttgttggagcaagtgtattttacaaggatgttgctggtttggatacagaaggcagtaaacagcgaagtgcctctcagagtagtttagataagttagatcaggaacttaaggaacagcagaaggagttaaaaaatcaagaagaattatccagtctagtttggatctgtaccagcactcattcggctacaaaagttcttattattgatgctgttcaacctggcaacatcctagacagtttcactgtttgcaactctcatgttctgtgcattgcaagtgtgccaggtgcacgagaaacagactaccctgcaggagaagatctttcagaatctggtcaggtagacaaagcatctttatgtggaagtatgacaagcaacagctcagcagagacagacagcctgttaggaggcatcacagtggttggttgttctgcagaaggtgtgacgggagctgccacttcccctagtacaaatggtgcttctccagtgatggataaaccaccagaaatggaagcagaaaatagtgaggttgatgaaaatgttccaacagcagaagaagcaactgaagctacagaagggaatgcggggtcagctgaagacacagtggacatctcccaaactggcgtctacacagagcatgtctttacagatcctttgggagttcagatcccagaagacctctccccagtgtatcagtcgagcaatgactcagatgcatataaagatcaaatatcagtactgccaaatgaacaagacttggtgagagaagaagcccagaaaatgagtagtcttttaccaactatgtggcttggagctcaaaatggctgtttgtatgtccattcatctgtagcccagtggaggaaatgtctccattccattaaacttaaagattcgattctcagtattgtacacgtgaagggaatcgtgttagtagccctggctgacggcacccttgcaatctttcacagaggagtggatgggcagtgggatttgtcaaactatcacctcttagaccttggacggcctcatcattccatccgttgcatgactgtggtacatgacaaagtctggtgtggctataggaacaaaatctatgtgctgcactccagcctgggtgacggagcaagaccctgtctcaaaacagacaaacaagcaaaaaatagattaaagtctggatttcactga

SEQ ID NO: 29721 - DNA, 7305 bp, Homo sapiens
  source 1..7305: mol_type = unassigned DNA
tcccttaaggatgagctttctgatgttagccaaggcggatctaaagctaccactccagcatcaacagctaattcagatgtggcaacaattcctactgatactcccttaaaggaagaaaacgaaggatttgtgaaggttacagatgcgccaaataaatcagagataagcaaacacattgaagtacaggtagcccaggaaactagaaatgtatctactggctctgctgaaaatgaagaaaagtcagaagttcaagcaatcatcgaatctactcctgagctggatatggacaaagatctcagtggatataaaggttcaagcactcccaccaaaggcatagagaacaaagcttttgatcgcaatacagaatctctctttgaagaactgtcttcagctggctcaggcctaataggagatgtggatgaaggagcagatttactaggaatgggtcgggaagttgagaatcttatattagaaaatacacaactgttggaaaccaaaaatgctttgaacatagtgaagaatgatttgatagcaaaagtggatgaactgacctgtgagaaagatgtgctgcaaggggaattggaggctgtgaagcaagccaaactgaaactagaggaaaagaacagagaattggaggaagagcttaggaaagctcgggcagaagctgaagatgcaaggcaaaaagcaaaagatgacgatgatagtgatattcccacagcccagaggaaacggtttactagagtagaaatggcccgtgttctcatggagcgaaaccagtataaagagagattgatggagcttcaggaagctgttcgatggacagagatgattcgggcatcacgagaaaatccagccatgcaggaaaaaaaaaggtcaagcatttggcagtttgtgccaactcgtttcagccgacttttcagctcctcaagtaacacgactaagaagcctgaaccacctgttaatctgaagtacaatgcacccacgtctcatgttactccgtccgtcaagaaaagaagcagcaccttatctcagctccctggggataagtccaaagcctttgatttccttagtgaagaaactgaagctagtttagcctcacgcagagaacaaaagagagagcagtatcgtcaggtaaaagcacatgttcagaaggaagacggtagagtgcaggcttttggctggagtctgcctcagaagtacaaacaggtaaccaatggtcaaggtgaaaataagatgaaaaatttacctgtgcctgtctatctcagacctctggatgaaaaagatacatcaatgaagaagctgtggtgtgctgttggagtcaatttatctggtgggaagaccagagatggtggttctgttgttggagcaagtgtattttacaaggatgttgctggtttggatacagaaggcagtaaacagcgaagtgcctctcagagtagtttagataagttagatcaggaacttaaggaacagcagaaggagttaaaaaatcaagaagaattatccagtctagtttggatctgtaccagcactcattcggctacaaaagttcttattattgatgctgttcaacctggcaacatcctagacagtttcactgtttgcaactctcatgttctgtgcattgcaagtgtgccaggtgcacgagaaacagactaccctgcaggagaagatctttcagaatctggtcaggtagacaaagcatctttatgtggaagtatgacaagcaacagctcagcagagacagacagcctgttaggaggcatcacagtggttggttgttctgcagaaggtgtgacgggagctgccacttcccctagtacaaatggtgcttctccagtgatggataaaccaccagaaatggaagcagaaaatagtgaggttgatgaaaatgttccaacagcagaagaagcaactgaagctacagaagggaatgcggggtcagctgaagacacagtggacatctcccaaactggcgtctacacagagcatgtctttacagatcctttgggagttcagatcccagaagacctctccccagtgtatcagtcgagcaatgactcagatgcatataaagatcaaatatcagtactgccaaatgaacaagacttggtgagagaagaagcccagaaaatgagtagtcttttaccaactatgtggcttggagctcaaaatggctgtttgtatgtccattcatctgtagcccagtggaggaaatgtctccattccattaaacttaaagattcgattctcagtattgtacacgtgaagggaatcgtgttagtagccctggctgacggcacccttgcaatctttcacagaggagtggatgggcagtgggatttgtcaaactatcacctcttagaccttggacggcctcatcattccatccgttgcatgactgtggtacatgacaaagtctggtgtggctataggaacaaaatctatgtggtgcagccaaaggccatgaaaatagagaaatcttttgatgcacatcccaggaaggagagccaagtgcgacagcttgcgtgggtgggggatggcgtgtgggtctccattcgcttggattctacgctccgtctctatcatgcacacacttatcaacatctacaggatgtggacattgagccttatgtaagcaaaatgttaggtactggaaaactgggcttctcttttgtgagaattacagctcttatggtgtcttgtaatcgtttgtgggtggggacaggaaatggtgtcattatctccatcccattgacagaaacaaataaaacctcaggtgtaccaggaaatcgtcctggaagtgtaatccgtgtatatggtgatgaaaacagtgataaagtgactccagggacatttataccctattgttcaatggcacatgcacagctttgcttccatgggcaccgggatgctgtgaaattctttgtggcagtcccaggtcaagtcatcagcccacaaagtagcagtagtggcacggatctgacgggtgacaaagcagggccatctgcacaggagcctggtagtcagacgcccttgaagtctatgcttgtcatcagtggaggagagggctacatcgacttccgaatgggtgatgaaggtggagaatcagaacttcttggagaggatcttccacttgaaccttctgtcaccaaagcagaaaggagtcacttgatagtgtggcaagtgatgtatggcaatgagtgagcccatgggaaacaggtggagatggggaagccgtctcttctgcatggtttattttccctctatccttttatttaatgctcttttgtgagataagtttcaccacataatgtgtgagcattttttcctgttaactttatattacaaaatccgttctaccataacaatacagaggaactagctgtgttactgcaccagtgttataggtaacttcagtatattatgaacaaatcaaagaatgtttacttcctgcaaactggtgaattatagaaagcaatccagatgtggtttactctgccacagtctaatgtcattcacttcatttgatggggtcacttgttagctgtcactaataatggaattaatgggaaacacttgataaatgaaactgtaccgttaaatacaatagctgagttttccccagtgtattgtaaaattgacacacactaatacaagatggattatcaggatgtatctaaatgtcccgagagggttaaaagctaactgtaaattactttaactttcactttcaaatctgacaaatcttgtttatatggtatataaaactttgttttcatcagatttgggggggttttatattaaagaaattaagactacactatttaaataaacgtttcctgtttctgacttattagagctctaaagtttatgaggcctacttctctgaatattctgatgggttttttttgagaccagtctcattttcatactgacatgtctgaaagatttattatttataaagcttaggacatactctgggaagcttagaagatacttcagcactgggaggattttttaaaggaaatgtgttttgtatttcttgtaccagagaatggtgatgttgattgagttttttccatgtaaaaaatgtacttgtttgccaaatgttcctagattgctcttaacctgttaatacaagtaaaactgtagtggggatggagtctggcctaagtacagaatgagggatttaattagaaaagttattttcttttgttctgtatcaaactgcagaacagctatatacttggtattttgtacgtgaataacgttttagcttttgtgcccttttgagcttgaagggttatcctcaaaggggaaaactatgaaggggaagaagacaaacctaagataccataaagtaaaggttgacattacatattttcattcacaatgcccattaaaaaaaaaaaataggttgggcatggtggctcacgcctgtaatcccaacactttaggaggctgaggcagatggattgcttgagcccaggagttcaagaccagcctgggcaacatggcgaaaccctgtctctaccaaaaaaaaaaaacaaaataaattaaccgggtgtggtggcacatgcctgtagtcccagctacttgggaggctgaggtgggaggatgacctgggcccaggaggtggaggttgcagtgagccttgatagcaccactgcactccagcctgggtgacggagcaagaccctgtctcaaaacagacaaacaagcaaaaaatagattaaagtctggatttcactgattttcttgcttaataagttttttaaaaccacgatgctgcaattttttccctctcaagcttcttgaaaatgtgtgatttacccttttttatctattactctaggcaaagctaaatatgatttttttttttttttttgagacggagtctggctctgttgcccaggctggaatgcagtggtgcgatctcagctcactgcaacctccacctctcaggttcaagtagttctcctgcctcagcctcccaagtagctgggattacaggtgtgtgccaccctgcccagctaatttttgtatttttagtagagacagggtttcaccacattggccaggctggtctcaaactcctgacctcagatgatctacccgccttggcctcccgaagtgcttgaattacaggcgtgagcccccgcgccggtccgaagcaaagctaaatgtaattttatgtactgttttaacagtataaacctatgggataaaggcccccaatcatcagaaggactactgaaaagaaaagaaagcaaacgtagatgtcaaattgtctaaacattcttaagtaccactgattttttttttctggactattatacaaagatgtctgtaaaaagtataccagtggcttttatgcatatacacgattaggctagattgtgaagtacatgggatttcatgagccagaggaggcatttggatccattgggccacatgtgactataagcacattgtgtacacaataaaattgtagccactcatgtattaaaactgttttggtaaaagctgtattaaaagaataattttttgcttgagctacttagtcacttttttgcagggcaccaaaatgtaggctacttttccatagcttgtttgctatgtttttatttcatcttaaatctgagccatttttggcaatatcttttaaaaaatcattattaaacatttattggaaatgttgtatagattcacaagaaagagacaccaaagtgtttgggaattttaatcccaagaagtaaacatcccagagtcagatcccatttgctgttgttcagccatgtttgtatgactgaatgtaatttaggaaatcaggagttagagatgaaaaatacaaacatgtcaaatggttgtaattgctttttttgaacttactggctttaacttaagtaatataggtgtgtagttgttttatctaaagatgtcagattatctgtggccctgttaattaactgcagggaccagagagaggacaaaaatgcctgtataatttgctttaaaggcttgtccttatgtttgtaatttcagttaaatattttctacagattgcttcacttcccctttcccccaataacaagttcatattcttgtaatgtttactttggtcaacgtggtaatttttggaagaaaatgccaaaatgtaagcttctcacaagcagcaaaggaatgtaactgcctgtagctaccacatcaagggagagaagaggcttgcgtactttgggttgatctcactgtacaaaaaaagtgtacccctattggaagaaataaggaatacttgaaggtttctcctttttttacacttgagtcatgtgcaaggttgaaccatatgaaattgccagtgttcaaccattgctgatctgcaaaagcgacaatatcatatgcctcaacctaacacttactcttaaatgcaggttaaaatctctgtgaggcaaagggataatattctctaggaactcacttttgagagtatttttctctaacccatgtggatctaaattttaaaaataggaatgaatctcttaattgcagcttgtggagagtataaaacattttgagcacaatatgcagcacataacttttcagattgtgtttgcatagaaaaggttaaaatcaattctttcagttactgtattgttcatttcttgtaaaggtcttcctacatttgagacgagaccctttaacataggctgccttagtaacaaaataaaacagatgtgtcataatattaactgtcctaaagaacatgtgtcttgcaaatgccatggaactgaatatttatttccttgtgagtattatgaccgttaccaaaggactcaaccagatttagggctcttcttaattgatcatgttcagaaagggactcatttggtcccactttgtaacatgggaagagtagaagagaaaattaaatgtggaaatcataaatgcttttctaacagggttatgctattctgtaacactaaatgtctgtcttttctcttaaaagattaagttttattaattttgtcatacatttctctatttgaatatatcttaaccattttatgttccaaattcgttttttgtccaagacattctatcagaattttacttgcctctataatctgaaaaatgggttctagaatgtcccacttgctgtctcttagaggctgagcttcatttctatgagcaaagagctcatttagcaatgtagttatttcagtatttatttctattatggaatccctggggttcagaatgtaactttgtacatgagatatatataaatatgtatatgaacatgta

SEQ ID NO: 29722 - DNA, 7335 bp, Homo sapiens
  source 1..7335: mol_type = unassigned DNA
agtgttaaggtcagcaatagtcctgaacctcagaaggctgtagaacaggaggatgagctttctgatgttagccaaggcggatctaaagctaccactccagcatcaacagctaattcagatgtggcaacaattcctactgatactcccttaaaggaagaaaacgaaggatttgtgaaggttacagatgcgccaaataaatcagagataagcaaacacattgaagtacaggtagcccaggaaactagaaatgtatctactggctctgctgaaaatgaagaaaagtcagaagttcaagcaatcatcgaatctactcctgagctggatatggacaaagatctcagtggatataaaggttcaagcactcccaccaaaggcatagagaacaaagcttttgatcgcaatacagaatctctctttgaagaactgtcttcagctggctcaggcctaataggagatgtggatgaaggagcagatttactaggaatgggtcgggaagttgagaatcttatattagaaaatacacaactgttggaaaccaaaaatgctttgaacatagtgaagaatgatttgatagcaaaagtggatgaactgacctgtgagaaagatgtgctgcaaggggaattggaggctgtgaagcaagccaaactgaaactagaggaaaagaacagagaattggaggaagagcttaggaaagctcgggcagaagctgaagatgcaaggcaaaaagcaaaagatgacgatgatagtgatattcccacagcccagaggaaacggtttactagagtagaaatggcccgtgttctcatggagcgaaaccagtataaagagagattgatggagcttcaggaagctgttcgatggacagagatgattcgggcatcacgagaaaatccagccatgcaggaaaaaaaaaggtcaagcatttggcagtttttcagccgacttttcagctcctcaagtaacacgactaagaagcctgaaccacctgttaatctgaagtacaatgcacccacgtctcatgttactccgtccgtcaagaaaagaagcagcaccttatctcagctccctggggataagtccaaagcctttgatttccttagtgaagaaactgaagctagtttagcctcacgcagagaacaaaagagagagcagtatcgtcaggtaaaagcacatgttcagaaggaagacggtagagtgcaggcttttggctggagtctgcctcagaagtacaaacaggtaaccaatggtcaaggtgaaaataagatgaaaaatttacctgtgcctgtctatctcagacctctggatgaaaaagatacatcaatgaagaagctgtggtgtgctgttggagtcaatttatctggtgggaagaccagagatggtggttctgttgttggagcaagtgtattttacaaggatgttgctggtttggatacagaaggcagtaaacagcgaagtgcctctcagagtagtttagataagttagatcaggaacttaaggaacagcagaaggagttaaaaaatcaagaagaattatccagtctagtttggatctgtaccagcactcattcggctacaaaagttcttattattgatgctgttcaacctggcaacatcctagacagtttcactgtttgcaactctcatgttctgtgcattgcaagtgtgccaggtgcacgagaaacagactaccctgcaggagaagatctttcagaatctggtcaggtagacaaagcatctttatgtggaagtatgacaagcaacagctcagcagagacagacagcctgttaggaggcatcacagtggttggttgttctgcagaaggtgtgacgggagctgccacttcccctagtacaaatggtgcttctccagtgatggataaaccaccagaaatggaagcagaaaatagtgaggttgatgaaaatgttccaacagcagaagaagcaactgaagctacagaagggaatgcggggtcagctgaagacacagtggacatctcccaaactggcgtctacacagagcatgtctttacagatcctttgggagttcagatcccagaagacctctccccagtgtatcagtcgagcaatgactcagatgcatataaagatcaaatatcagtactgccaaatgaacaagacttggtgagagaagaagcccagaaaatgagtagtcttttaccaactatgtggcttggagctcaaaatggctgtttgtatgtccattcatctgtagcccagtggaggaaatgtctccattccattaaacttaaagattcgattctcagtattgtacacgtgaagggaatcgtgttagtagccctggctgacggcacccttgcaatctttcacagaggagtggatgggcagtgggatttgtcaaactatcacctcttagaccttggacggcctcatcattccatccgttgcatgactgtggtacatgacaaagtctggtgtggctataggaacaaaatctatgtggtgcagccaaaggccatgaaaatagagaaatcttttgatgcacatcccaggaaggagagccaagtgcgacagcttgcgtgggtgggggatggcgtgtgggtctccattcgcttggattctacgctccgtctctatcatgcacacacttatcaacatctacaggatgtggacattgagccttatgtaagcaaaatgttaggtactggaaaactgggcttctcttttgtgagaattacagctcttatggtgtcttgtaatcgtttgtgggtggggacaggaaatggtgtcattatctccatcccattgacagaaacaaataaaacctcaggtgtaccaggaaatcgtcctggaagtgtaatccgtgtatatggtgatgaaaacagtgataaagtgactccagggacatttataccctattgttcaatggcacatgcacagctttgcttccatgggcaccgggatgctgtgaaattctttgtggcagtcccaggtcaagtcatcagcccacaaagtagcagtagtggcacggatctgacgggtgacaaagcagggccatctgcacaggagcctggtagtcagacgcccttgaagtctatgcttgtcatcagtggaggagagggctacatcgacttccgaatgggtgatgaaggtggagaatcagaacttcttggagaggatcttccacttgaaccttctgtcaccaaagcagaaaggagtcacttgatagtgtggcaagtgatgtatggcaatgagtgagcccatgggaaacaggtggagatggggaagccgtctcttctgcatggtttattttccctctatccttttatttaatgctcttttgtgagataagtttcaccacataatgtgtgagcattttttcctgttaactttatattacaaaatccgttctaccataacaatacagaggaactagctgtgttactgcaccagtgttataggtaacttcagtatattatgaacaaatcaaagaatgtttacttcctgcaaactggtgaattatagaaagcaatccagatgtggtttactctgccacagtctaatgtcattcacttcatttgatggggtcacttgttagctgtcactaataatggaattaatgggaaacacttgataaatgaaactgtaccgttaaatacaatagctgagttttccccagtgtattgtaaaattgacacacactaatacaagatggattatcaggatgtatctaaatgtcccgagagggttaaaagctaactgtaaattactttaactttcactttcaaatctgacaaatcttgtttatatggtatataaaactttgttttcatcagatttgggggggttttatattaaagaaattaagactacactatttaaataaacgtttcctgtttctgacttattagagctctaaagtttatgaggcctacttctctgaatattctgatgggttttttttgagaccagtctcattttcatactgacatgtctgaaagatttattatttataaagcttaggacatactctgggaagcttagaagatacttcagcactgggaggattttttaaaggaaatgtgttttgtatttcttgtaccagagaatggtgatgttgattgagttttttccatgtaaaaaatgtacttgtttgccaaatgttcctagattgctcttaacctgttaatacaagtaaaactgtagtggggatggagtctggcctaagtacagaatgagggatttaattagaaaagttattttcttttgttctgtatcaaactgcagaacagctatatacttggtattttgtacgtgaataacgttttagcttttgtgcccttttgagcttgaagggttatcctcaaaggggaaaactatgaaggggaagaagacaaacctaagataccataaagtaaaggttgacattacatattttcattcacaatgcccattaaaaaaaaaaaataggttgggcatggtggctcacgcctgtaatcccaacactttaggaggctgaggcagatggattgcttgagcccaggagttcaagaccagcctgggcaacatggcgaaaccctgtctctaccaaaaaaaaaaaacaaaataaattaaccgggtgtggtggcacatgcctgtagtcccagctacttgggaggctgaggtgggaggatgacctgggcccaggaggtggaggttgcagtgagccttgatagcaccactgcactccagcctgggtgacggagcaagaccctgtctcaaaacagacaaacaagcaaaaaatagattaaagtctggatttcactgattttcttgcttaataagttttttaaaaccacgatgctgcaattttttccctctcaagcttcttgaaaatgtgtgatttacccttttttatctattactctaggcaaagctaaatatgatttttttttttttttttgagacggagtctggctctgttgcccaggctggaatgcagtggtgcgatctcagctcactgcaacctccacctctcaggttcaagtagttctcctgcctcagcctcccaagtagctgggattacaggtgtgtgccaccctgcccagctaatttttgtatttttagtagagacagggtttcaccacattggccaggctggtctcaaactcctgacctcagatgatctacccgccttggcctcccgaagtgcttgaattacaggcgtgagcccccgcgccggtccgaagcaaagctaaatgtaattttatgtactgttttaacagtataaacctatgggataaaggcccccaatcatcagaaggactactgaaaagaaaagaaagcaaacgtagatgtcaaattgtctaaacattcttaagtaccactgattttttttttctggactattatacaaagatgtctgtaaaaagtataccagtggcttttatgcatatacacgattaggctagattgtgaagtacatgggatttcatgagccagaggaggcatttggatccattgggccacatgtgactataagcacattgtgtacacaataaaattgtagccactcatgtattaaaactgttttggtaaaagctgtattaaaagaataattttttgcttgagctacttagtcacttttttgcagggcaccaaaatgtaggctacttttccatagcttgtttgctatgtttttatttcatcttaaatctgagccatttttggcaatatcttttaaaaaatcattattaaacatttattggaaatgttgtatagattcacaagaaagagacaccaaagtgtttgggaattttaatcccaagaagtaaacatcccagagtcagatcccatttgctgttgttcagccatgtttgtatgactgaatgtaatttaggaaatcaggagttagagatgaaaaatacaaacatgtcaaatggttgtaattgctttttttgaacttactggctttaacttaagtaatataggtgtgtagttgttttatctaaagatgtcagattatctgtggccctgttaattaactgcagggaccagagagaggacaaaaatgcctgtataatttgctttaaaggcttgtccttatgtttgtaatttcagttaaatattttctacagattgcttcacttcccctttcccccaataacaagttcatattcttgtaatgtttactttggtcaacgtggtaatttttggaagaaaatgccaaaatgtaagcttctcacaagcagcaaaggaatgtaactgcctgtagctaccacatcaagggagagaagaggcttgcgtactttgggttgatctcactgtacaaaaaaagtgtacccctattggaagaaataaggaatacttgaaggtttctcctttttttacacttgagtcatgtgcaaggttgaaccatatgaaattgccagtgttcaaccattgctgatctgcaaaagcgacaatatcatatgcctcaacctaacacttactcttaaatgcaggttaaaatctctgtgaggcaaagggataatattctctaggaactcacttttgagagtatttttctctaacccatgtggatctaaattttaaaaataggaatgaatctcttaattgcagcttgtggagagtataaaacattttgagcacaatatgcagcacataacttttcagattgtgtttgcatagaaaaggttaaaatcaattctttcagttactgtattgttcatttcttgtaaaggtcttcctacatttgagacgagaccctttaacataggctgccttagtaacaaaataaaacagatgtgtcataatattaactgtcctaaagaacatgtgtcttgcaaatgccatggaactgaatatttatttccttgtgagtattatgaccgttaccaaaggactcaaccagatttagggctcttcttaattgatcatgttcagaaagggactcatttggtcccactttgtaacatgggaagagtagaagagaaaattaaatgtggaaatcataaatgcttttctaacagggttatgctattctgtaacactaaatgtctgtcttttctcttaaaagattaagttttattaattttgtcatacatttctctatttgaatatatcttaaccattttatgttccaaattcgttttttgtccaagacattctatcagaattttacttgcctctataatctgaaaaatgggttctagaatgtcccacttgctgtctcttagaggctgagcttcatttctatgagcaaagagctcatttagcaatgtagttatttcagtatttatttctattatggaatccctggggttcagaatgtaactttgtacatgagatatatataaatatgtatatgaacatgta

SEQ ID NO: 29723 - DNA, 4659 bp, Homo sapiens
  source 1..4659: mol_type = unassigned DNA
gtcgggtccgtcccgtgcgggcaggtgccgcccctctgccggcgacgccccgggccgcccgcccgtccgcttgccaccatggagctggaggacggtgtggtgtatcaggaggagcccggcggctccggggccgtgatgtcggagcgggtgtccggcctggccggctccatctaccgcgagttcgagcggcttatcgggcgctatgacgaggaggtggtcaaagagctgatgccgctggtggtggctgtgctggagaacctggactcggtgttcgcgcaggaccaggagcaccaggtggagctggagctgctgcgggacgacaacgagcagctcatcacccagtacgagcgggagaaggcgctgcgcaagcacgctgaggagaaattcattgaatttgaagactctcaagaacaggaaaaaaaggacttacagacccgagtggaatctttagaatctcaaacaagacaacttgagctgaaagcgaaaaactatgctgaccagattagcagacttgaagaaagagaagcagaactgaagaaggaatataatgcattacatcaaagacacactgagatgatccataattatatggaacatttagaaagaacaaaacttcatcagctctcagggagtgatcaactagaatccacagctcatagtagaattagaaaagaacgccctatatcattaggaattttcccattacctgctggagatggattgcttacacctgatgctcagaaaggaggagagacccctggatctgagcaatggaaatttcaggaattaagtcaaccacgttctcataccagcctgaaggatgagctttctgatgttagccaaggcggatctaaagctaccactccagcatcaacagctaattcagatgtggcaacaattcctactgatactcccttaaaggaagaaaacgaaggatttgtgaaggttacagatgcgccaaataaatcagagataagcaaacacattgaagtacaggtagcccaggaaactagaaatgtatctactggctctgctgaaaatgaagaaaagtcagaagttcaagcaatcatcgaatctactcctgagctggatatggacaaagatctcagtggatataaaggttcaagcactcccaccaaaggcatagagaacaaagcttttgatcgcaatacagaatctctctttgaagaactgtcttcagctggctcaggcctaataggagatgtggatgaaggagcagatttactaggaatgggtcgggaagttgagaatcttatattagaaaatacacaactgttggaaaccaaaaatgctttgaacatagtgaagaatgatttgatagcaaaagtggatgaactgacctgtgagaaagatgtgctgcaaggggaattggaggctgtgaagcaagccaaactgaaactagaggaaaagaacagagaattggaggaagagcttaggaaagctcgggcagaagctgaagatgcaaggcaaaaagcaaaagatgacgatgatagtgatattcccacagcccagaggaaacggtttactagagtagaaatggcccgtgttctcatggagcgaaaccagtataaagagagattgatggagcttcaggaagctgttcgatggacagagatgattcgggcatcacgagaaaatccagccatgcaggaaaaaaaaaggtcaagcatttggcagtttgtgccaactcgtttcagccgacttttcagctcctcaagtaacacgactaagaagcctgaaccacctgttaatctgaagtacaatgcacccacgtctcatgttactccgtccgtcaagaaaagaagcagcaccttatctcagctccctggggataagtccaaagcctttgatttccttagtgaagaaactgaagctagtttagcctcacgcagagaacaaaagagagagcagtatcgtcaggtaaaagcacatgttcagaaggaagacggtagagtgcaggcttttggctggagtctgcctcagaagtacaaacaggtaaccaatggtcaaggtgaaaataagatgaaaaatttacctgtgcctgtctatctcagacctctggatgaaaaagatacatcaatgaagctgtggtgtgctgttggagtcaatttatctggtgggaagaccagagatggtggttctgttgttggagcaagtgtattttacaaggatgttgctggtttggatacagaaggcagtaaacagcgaagtgcctctcagagtagtttagataagttagatcaggaacttaaggaacagcagaaggagttaaaaaatcaagaagaattatccagtctagtttggatctgtaccagcactcattcggctacaaaagttcttattattgatgctgttcaacctggcaacatcctagacagtttcactgtttgcaactctcatgttctgtgcattgcaagtgtgccaggtgcacgagaaacagactaccctgcaggagaagatctttcagaatctggtcaggtagacaaagcatctttatgtggaagtatgacaagcaacagctcagcagagacagacagcctgttaggaggcatcacagtggttggttgttctgcagaaggtgtgacgggagctgccacttcccctagtacaaatggtgcttctccagtgatggataaaccaccagaaatggaagcagaaaatagtgaggttgatgaaaatgttccaacagcagaagaagcaactgaagctacagaagggaatgcggggtcagctgaagacacagtggacatctcccaaactggcgtctacacagagcatgtctttacagatcctttgggagttcagatcccagaagacctctccccagtgtatcagtcgagcaatgactcagatgcatataaagatcaaatatcagtactgccaaatgaacaagacttggtgagagaagaagcccagaaaatgagtagtcttttaccaactatgtggcttggagctcaaaatggctgtttgtatgtccattcatctgtagcccagtggaggaaatgtctccattccattaaacttaaagattcgattctcagtattgtacacgtgaagggaatcgtgttagtagccctggctgacggcacccttgcaatctttcacagaggagtggatgggcagtgggatttgtcaaactatcacctcttagaccttggacggcctcatcattccatccgttgcatgactgtggtacatgacaaagtctggtgtggctataggaacaaaatctatgtggtgcagccaaaggccatgaaaatagagaaatcttttgatgcacatcccaggaaggagagccaagtgcgacagcttgcgtgggtgggggatggcgtgtgggtctccattcgcttggattctacgctccgtctctatcatgcacacacttatcaacatctacaggatgtggacattgagccttatgtaagcaaaatgttaggtactggaaaactgggcttctcttttgtgagaattacagctcttatggtgtcttgtaatcgtttgtgggtggggacaggaaatggtgtcattatctccatcccattgacagaaacaaataaaacctcaggtgtaccaggaaatcgtcctggaagtgtaatccgtgtatatggtgatgaaaacagtgataaagtgactccagggacatttataccctattgttcaatggcacatgcacagctttgcttccatgggcaccgggatgctgtgaaattctttgtggcagtcccaggtcaagtcatcagcccacaaagtagcagtagtggcacggatctgacgggtgacaaagcagggccatctgcacaggagcctggtagtcagacgcccttgaagtctatgcttgtcatcagtggaggagagggctacatcgacttccgaatgggtgatgaaggtggagaatcagaacttcttggagaggatcttccacttgaaccttctgtcaccaaagcagaaaggagtcacttgatagtgtggcaagtgatgtatggcaatgagtgagcccatgggaaacaggtggagatggggaagccgtctcttctgcatggtttattttccctctatccttttatttaatgctcttttgtgagataagtttcaccacataatgtgtgagcattttttcctgttaactttatattacaaaatccgttctaccataacaatacagaggaactagctgtgttactgcaccagtgttataggtaacttcagtatattatgaacaaatcaaagaatgtttacttcctgcaaactggtgaattatagaaagcaatccagatgtggtttactctgccacagtctaatgtcattcacttcatttgatggggtcacttgttagctgtcactaataatggaattaatgggaaacacttgataaatgaaactgtaccgttaaatacaatagctgagttttccccagtgtattgtaaaattgacacacactaatacaagatggattatcaggatgtatctaaatgtcccgagagggttaaaagctaactgtaaattactttaactttcactttcaaatctgacaaatcttgtttatatggtatataaaactttgttttcatcagatttgggggggttttatattaaagaaattaagactacactatttaaataaacgtttcctgtttctga

SEQ ID NO: 29724 - DNA, 4949 bp, Homo sapiens
  source 1..4949: mol_type = unassigned DNA
gcataaatgctaggagcagcagctctatggttatgaggtggggagaacggaatgacgtcatcgcttgggagctgctgcaggatggagtggaaagctgctgctgatggcattgtttttgtggcagcaagctgaatgacagatcctcactacaaagatacccctttggcccccgtgtaggcctccttggttcgggtgtttcaccatgccagcacagcgccatgagtcctggatgcatgctgctgtttgtgtttggctttgttggcggggcggtggtcattaattctgctatcttagtatctctctctgttttgctgcttgtgcacttttctatttctaccggtgtgccagctctgacgcagaacctaccaaggatactcagaaaagaacgccctatatcattaggaattttcccattacctgctggagatggattgcttacacctgatgctcagaaaggaggagagacccctggatctgagcaatggaaatttcaggaattaagtcaaccacgttctcataccagcctgaaggatgagctttctgatgttagccaaggcggatctaaagctaccactccagcatcaacagctaattcagatgtggcaacaattcctactgatactcccttaaaggaagaaaacgaaggatttgtgaaggttacagatgcgccaaataaatcagagataagcaaacacattgaagtacaggtagcccaggaaactagaaatgtatctactggctctgctgaaaatgaagaaaagtcagaagttcaagcaatcatcgaatctactcctgagctggatatggacaaagatctcagtggatataaaggttcaagcactcccaccaaaggcatagagaacaaagcttttgatcgcaatacagaatctctctttgaagaactgtcttcagctggctcaggcctaataggagatgtggatgaaggagcagatttactaggaatgggtcgggaagttgagaatcttatattagaaaatacacaactgttggaaaccaaaaatgctttgaacatagtgaagaatgatttgatagcaaaagtggatgaactgacctgtgagaaagatgtgctgcaaggggaattggaggctgtgaagcaagccaaactgaaactagaggaaaagaacagagaattggaggaagagcttaggaaagctcgggcagaagctgaagatgcaaggcaaaaagcaaaagatgacgatgatagtgatattcccacagcccagaggaaacggtttactagagtagaaatggcccgtgttctcatggagcgaaaccagtataaagagagattgatggagcttcaggaagctgttcgatggacagagatgattcgggcatcacgagaaaatccagccatgcaggaaaaaaaaaggtcaagcatttggcagtttttcagccgacttttcagctcctcaagtaacacgactaagaagcctgaaccacctgttaatctgaagtacaatgcacccacgtctcatgttactccgtccgtcaagaaaagaagcagcaccttatctcagctccctggggataagtccaaagcctttgatttccttagtgaagaaactgaagctagtttagcctcacgcagagaacaaaagagagagcagtatcgtcaggtaaaagcacatgttcagaaggaagacggtagagtgcaggcttttggctggagtctgcctcagaagtacaaacaggtaaccaatggtcaaggtgaaaataagatgaaaaatttacctgtgcctgtctatctcagacctctggatgaaaaagatacatcaatgaagctgtggtgtgctgttggagtcaatttatctggtgggaagaccagagatggtggttctgttgttggagcaagtgtattttacaaggatgttgctggtttggatacagaaggcagtaaacagcgaagtgcctctcagagtagtttagataagttagatcaggaacttaaggaacagcagaaggagttaaaaaatcaagaagaattatccagtctagtttggatctgtaccagcactcattcggctacaaaagttcttattattgatgctgttcaacctggcaacatcctagacagtttcactgtttgcaactctcatgttctgtgcattgcaagtgtgccaggtgcacgagaaacagactaccctgcaggagaagatctttcagaatctggtcaggtagacaaagcatctttatgtggaagtatgacaagcaacagctcagcagagacagacagcctgttaggaggcatcacagtggttggttgttctgcagaaggtgtgacgggagctgccacttcccctagtacaaatggtgcttctccagtgatggataaaccaccagaaatggaagcagaaaatagtgaggttgatgaaaatgttccaacagcagaagaagcaactgaagctacagaagggaatgcggggtcagctgaagacacagtggacatctcccaaactggcgtctacacagagcatgtctttacagatcctttgggagttcagatcccagaagacctctccccagtgtatcagtcgagcaatgactcagatgcatataaagatcaaatatcagtactgccaaatgaacaagacttggtgagagaagaagcccagaaaatgagtagtcttttaccaactatgtggcttggagctcaaaatggctgtttgtatgtccattcatctgtagcccagtggaggaaatgtctccattccattaaacttaaagattcgattctcagtattgtacacgtgaagggaatcgtgttagtagccctggctgacggcacccttgcaatctttcacagaggagtggatgggcagtgggatttgtcaaactatcacctcttagaccttggacggcctcatcattccatccgttgcatgactgtggtacatgacaaagtctggtgtggctataggaacaaaatctatgtggtgcagccaaaggccatgaaaatagagaaatcttttgatgcacatcccaggaaggagagccaagtgcgacagcttgcgtgggtgggggatggcgtgtgggtctccattcgcttggattctacgctccgtctctatcatgcacacacttatcaacatctacaggatgtggacattgagccttatgtaagcaaaatgttaggtactggaaaactgggcttctcttttgtgagaattacagctcttatggtgtcttgtaatcgtttgtgggtggggacaggaaatggtgtcattatctccatcccattgacagaaaccgtaatcctccaccagggacgtttactggggctgagggcaaataaaacctcaggtgtaccaggaaatcgtcctggaagtgtaatccgtgtatatggtgatgaaaacagtgataaagtgactccagggacatttataccctattgttcaatggcacatgcacagctttgcttccatgggcaccgggatgctgtgaaattctttgtggcagtcccaggtcaagtcatcagcccacaaagtagcagtagtggcacggatctgacgggtgacaaagcagggccatctgcacaggagcctggtagtcagacgcccttgaagtctatgcttgtcatcagtggaggagagggctacatcgacttccgaatgggtgatgaaggtggagaatcagaacttcttggagaggatcttccacttgaaccttctgtcaccaaagcagaaaggagtcacttgatagtgtggcaagtgatgtatggcaatgagtgagcccatgggaaacaggtggagatggggaagccgtctcttctgcatggtttattttccctctatccttttatttaatgctcttttgtgagataagtttcaccacataatgtgtgagcattttttcctgttaactttatattacaaaatccgttctaccataacaatacagaggaactagctgtgttactgcaccagtgttataggtaacttcagtatattatgaacaaatcaaagaatgtttacttcctgcaaactggtgaattatagaaagcaatccagatgtggtttactctgccacagtctaatgtcattcacttcatttgatggggtcacttgttagctgtcactaataatggaattaatgggaaacacttgataaatgaaactgtaccgttaaatacaatagctgagttttccccagtgtattgtaaaattgacacacactaatacaagatggattatcaggatgtatctaaatgtcccgagagggttaaaagctaactgtaaattactttaactttcactttcaaatctgacaaatcttgtttatatggtatataaaactttgttttcatcagatttgggggggttttatattaaagaaattaagactacactatttaaataaacgtttcctgtttctgacttattagagctctaaagtttatgaggcctacttctctgaatattctgatgggttttttttgagaccagtctcattttcatactgacatgtctgaaagatttattatttataaagcttaggacatactctgggaagcttagaagatacttcagcactgggaggattttttaaaggaaatgtgttttgtatttcttgtaccagagaatggtgatgttgattgagttttttccatgtaaaaaatgtacttgtttgccaaatgttcctagattgctcttaacctgttaatacaagtaaaactgtagtggggatggagtctggcctaagtacagaatgagggatttaattagaaaagttattttcttttgttctgtatcaaactgcagaacagctatatacttggtattttgtacgtgaataacgttttagcttttgtgcccttttgagcttgaagggttatcctcaaaggggaaaactatgaaggggaagaagacaaacctaagataccataaagtaaaggttgacattacatattttcattcacaatgcccatt

SEQ ID NO: 29725 - DNA, 3139 bp, Homo sapiens
  source 1..3139: mol_type = unassigned DNA
ataaatgctaggagcagcagctctatggttatgaggtggggagaacggaatgacgtcatcgcttgggagctgctgcaggatggagtggaaaatgctttgaacatagtgaagaatgatttgatagcaaaagtggatgaactgacctgtgagaaagatgtgctgcaaggggaattggaggctgtgaagcaagccaaactgaaactagaggaaaagaacagagaattggaggaagagcttaggaaagctcgggcagaagctgaagatgcaaggcaaaaagcaaaagatgacgatgatagtgatattcccacagcccagaggaaacggtttactagagtagaaatggcccgtgttctcatggagcgaaaccagtataaagagagattgatggagcttcaggaagctgttcgatggacagagatgattcgggcatcacgagaaaatccagccatgcaggaaaaaaaaaggtcaagcatttggcagtttttcagccgacttttcagctcctcaagtaacacgactaagaagcctgaaccacctgttaatctgaagtacaatgcacccacgtctcatgttactccgtccgtcaagaaaagaagcagcaccttatctcagctccctggggataagtccaaagcctttgatttccttagtgaagaaactgaagctagtttagcctcacgcagagaacaaaagagagagcagtatcgtcaggtaaaagcacatgttcagaaggaagacggtagagtgcaggcttttggctggagtctgcctcagaagtacaaacaggtaaccaatggtcaaggtgaaaataagatgaaaaatttacctgtgcctgtctatctcagacctctggatgaaaaagatacatcaatgaagctgtggtgtgctgttggagtcaatttatctggtgggaagaccagagatggtggttctgttgttggagcaagtgtattttacaaggatgttgctggtttggatacagaaggcagtaaacagcgaagtgcctctcagagtagtttagataagttagatcaggaacttaaggaacagcagaaggagttaaaaaatcaagaagaattatccagtctagtttggatctgtaccagcactcattcggctacaaaagttcttattattgatgctgttcaacctggcaacatcctagacagtttcactgtttgcaactctcatgttctgtgcattgcaagtgtgccaggtgcacgagaaacagactaccctgcaggagaagatctttcagaatctggtcaggtagacaaagcatctttatgtggaagtatgacaagcaacagctcagcagagacagacagcctgttaggaggcatcacagtggttggttgttctgcagaaggtgtgacgggagctgccacttcccctagtacaaatggtgcttctccagtgatggataaaccaccagaaatggaagcagaaaatagtgaggttgatgaaaatgttccaacagcagaagaagcaactgaagctacagaagggaatgcggggtcagctgaagacacagtggacatctcccaaactggcgtctacacagagcatgtctttacagatcctttgggagttcagatcccagaagacctctccccagtgtatcagtcgagcaatgactcagatgcatataaagatcaaatatcagtactgccaaatgaacaagacttggtgagagaagaagcccagaaaatgagtagtcttttaccaactatgtggcttggagctcaaaatggctgtttgtatgtccattcatctgtagcccagtggaggaaatgtctccattccattaaacttaaagattcgattctcagtattgtacacgtgaagggaatcgtgttagtagccctggctgacggcacccttgcaatctttcacagaggagtggatgggcagtgggatttgtcaaactatcacctcttagaccttggacggcctcatcattccatccgttgcatgactgtggtacatgacaaagtctggtgtggctataggaacaaaatctatgtggtgcagccaaaggccatgaaaatagagaaatcttttgatgcacatcccaggaaggagagccaagtgcgacagcttgcgtgggtgggggatggcgtgtgggtctccattcgcttggattctacgctccgtctctatcatgcacacacttatcaacatctacaggatgtggacattgagccttatgtaagcaaaatgttaggtactggaaaactgggcttctcttttgtgagaattacagctcttatggtgtcttgtaatcgtttgtgggtggggacaggaaatggtgtcattatctccatcccattgacagaaacaaataaaacctcaggtgtaccaggaaatcgtcctggaagtgtaatccgtgtatatggtgatgaaaacagtgataaagtgactccagggacatttataccctattgttcaatggcacatgcacagctttgcttccatgggcaccgggatgctgtgaaattctttgtggcagtcccaggtcaagtcatcagcccacaaagtagcagtagtggcacggatctgacgggtgacaaagcagggccatctgcacaggagcctggtagtcagacgcccttgaagtctatgcttgtcatcagtggaggagagggctacatcgacttccgaatgggtgatgaaggtggagaatcagaacttcttggagaggatcttccacttgaaccttctgtcaccaaagcagaaaggagtcacttgatagtgtggcaagtgatgtatggcaatgagtgagcccatgggaaacaggtggagatggggaagccgtctcttctgcatggtttattttccctctatccttttatttaatgctcttttgtgagataagtttcaccacataatgtgtgagcattttttcctgttaactttatattacaaaatccgttctaccataacaatacagaggaactagctgtgttactgcaccagtgttataggtaacttcagtatattatgaacaaatcaaagaatgtttacttcctgcaaactggtgaattatagaaagcaatccagatgtggtttactctgccacagtctaatgtcattcacttcatttgatggggtcacttgttagctgtcactaataatg

SEQ ID NO: 29726 - DNA, 1013 bp, Homo sapiens
  source 1..1013: mol_type = unassigned DNA
ggtgagagcgcctacgccacccctcccctcctccggccccggcccccaccccgccgggcccagccccagccccggcccgggctccagccctagtacccgtcccagcccgagtcgggtccgtcccgtgcgggcaggtgccgcccctctgccggcgacgccccgggccgcccgcccgtccgcttgccaccatggagctggaggacggtgtggtgtatcaggaggagcccggcggctccggggccgtgatgtcggagcgggtgtccggcctggccggctccatctaccgcgagttcgagcggcttatcgggcgctatgacgaggaggtggtcaaagagctgatgccgctggtggtggctgtgctggagaacctggactcggtgttcgcgcaggaccaggagcaccaggtggagctggagctgctgcgggacgacaacgagcagctcatcacccagtacgagcgggagaaggcgctgcgcaagcacgctgaggagaaattcattgaatttgaagactctcaagaacaggaaaaaaaggacttacagacccgagtggaatctttagaatctcaaacaagacaacttgagctgaaagcgaaaaactatgctgaccagagcgccatgagtcctggatgcatgctgctgtttgtgtttggctttgttggcggggcggtggtcattaattctgctatcttagtatctctctctgttttgctgcttgtgcacttttctatttctaccggtgtgccagctctgacgcagaacctaccaaggatactcagaaaagaacgccctatatcattaggaattttcccattacctgctggagatggattgcttacacctgatgctcagaaaggaggagagacccctggatctgagcaatggaaatttcaggaattaagtcaaccacgttctcataccagcctgaaggtcagcaatagtcctgaacctcagaaggctgtagaacaggaggtgagaatggtgcttcttaacattttgcaaaaagtatactaa

SEQ ID NO: 29727 - DNA, 1431 bp, Homo sapiens
  source 1..1431: mol_type = unassigned DNA
ctgcgcttgcgcgctggggacaaccgttgctgggtgtcccagggcctgaggcaggacggtactccgctgacaccttccctttcggccttgaggttcccagcctggtggccccaggacgttccggtcgcatggcagagtgctacggacgacgcctatgaagcccttagtccttctagttgcgcttttgctatggccttcgtctgtgccggcttatccgagcataactgtgacacctgatgaagagcaaaacttgaatcattatatacaagttttagagaacctagtacgaagtgttccctctggggagccaggtcgtgagaaaaaatctaactctccaaaacatgtttattctatagcatcaaagggatcaaaatttaaggagctagttacacatggagacgcttcaactgagaatgatgttttaaccaatcctatcagtgaagaaactacaactttccctacaggaggcttcacaccggaaataggaaagaaaaaacacacggaaagtaccccattctggtcgatcaaaccaaacaatgtttccattgttttgcatgcagaggaaccttatattgaaaatgaagagccagagccagagccggagccagctgcaaaacaaactgaggcaccaagaatgttgccagttgttactgaatcatctacaagtccatatgttacctcatacaagtcacctgtcaccactttagataagagcactggcattgggatctctacagaatcagaagatgttcctcagctctcaggtgaaactgcgatagaaaaacccgaagagtttggaaagcacccagagagttggaataatgatgacattttgaaaaaaattttagatattaattcacaagtgcaacaggcacttcttagtgacaccagcaacccagcatatagagaagatattgaagcctctaaagatcacctaaaacgaagccttgctctagcagcagcagcagaacataaattaaaaacaatgtataagtcccagttattgccagtaggacgaacaagtaataaaattgatgacatcgaaactgttattaacatgctgtgtaattctagatctaaactctatgaatatttagatattaaatgtgttccaccagagatgagagaaaaagctgctacagtattcaatacattaaaaaatatgtgtagatcaaggagagtcacagccttattaaaagtttattaaacaataatataaaaattttaaacctacttgatattccataacaaagctgatttaagcaaactgcattttttcacaggagaaataatcatattcgtaatttcaaaagttgtataaaaatattttctattgtagttcaaatgtgccaacatctttatgtgtcatgtgttatgaacaattttcatatgcactaaaaacctaatttaaaataaaattttggttcagga

SEQ ID NO: 29728 - DNA, 1580 bp, Homo sapiens
  source 1..1580: mol_type = unassigned DNA
agaaaacaatatggccgctcccagctgggacgtgagtctctggattaggcaggcagaggcagttatgggcttctgcagtggcgagaaaggaagcgcctgaagggtcgtgaggctggggcgggacccggcaccgctggggcggccaggccgtgaggacgccaatggcgagcagcgtggacgaggaggcgctgcaccagctgtacctgtgggtagacaacatccctctgtcccggcccaagcgaaacctctcccgggactttagcgatggagtccttgttgcagaggtcatcaagttttacttccccaagatggtggagatgcacaattatgtccccgccaactctctccagcagaagctcagcaactggggtcatctgaacaggaaggtactgaagaggctgaacttttcagtaccggatgacgtgatgcgcaagatcgcgcagtgcgccccaggcgtggtggagctggtgctcatcccgctgaggcagcgcctggaggagaggcagaggcgcaggaagcagggcgccggctccttacaggagctggctccccaggatggcagtggctacatggatgtgggtgtatcccagaaggcccgaggtgaaggtgtcccggacccccagggagggggtcagctcagctgggaccggccgccggcgcctcggcctccagcgtataaccgggcgttgcagggcgaccccagcttcgtcctccagatcgctgaaaaggagcaggagctgttggcctctcaagagaccgtgcaggtcctgcagatgaaggtaaggcgcctggagcacctgctccagctcaagaatgtgcggatcgaagacctctcccggcggctccagcaggcggagcgtaagcagcggtgagcggcggcccgggccgcgcggggacgcccgggtacccgccagagccccgacgccgcgccggacccacccaccgatggatagaccattgggagggcggagcccgctgctctcacgagcctgctggggcccgagtgccctccttccttgggatgggtgagcgtgggaggagatgggacaggaactctaggagcgcaggcccgggactgagccgcctcctaccactccggagatccgggtcaggagaatggaccgctttccagagcccagaagccacgtgcagagacctagcctgtcccccaaagcagtgtccaacaccttgggcccggccttgcatctcccggcgctgggccttggggggcggtcccttggctctgtccacacccccagaatcaggtccccgcccagctccgaggacggcggcgtctccatccaggctagttccccatgccctcagccatgggggaatctgtcccgggccgctgaggggctcccctgcccctcctgggagcttacctgggacccacctcggcgacggagaccgcagcagctggagaggaaggggtgaggcgtgggatcgccaggagtagggaggacatcgacgatgtgcccgtagcagtcgcccctccctcctcgcgcacggggtactgaggcggaaggtttgaaggttacggctcagggctgccccattaaagtcagtgttgtgttcta

SEQ ID NO: 29729 - DNA, 775 bp, Homo sapiens
  source 1..775: mol_type = unassigned DNA
ggttcagaaggctttggcttctgatagtcatggactcactaggctgctgaggaagatcaataatacctactggaatcagtcatgagaagtcaagcatggaaattgtgaattgtgtgtgtggccagaccagtacctccaagtgttcagaagatgtgtgaccagacaaaacacagtaaatgctgcccagcaaaaggcaatcaatgctgcccaccacagcagaaccagtgctgccagtcaaaaggcaatcaatgctgcccaccaaaacagaaccagtgctgccagccaaaaggcagtcaatgctgcccaccaaaacacaatcactgctgccagccaaaacccccatgctgcattcaggccaggtgctgtggtttggagaccaagcctgaagtctcaccccttaacatggagtctgagcccaactcaccgcaaactcaggacaagggctgtcaaacccagcagcagccccatagcccacaaaatgagtccaggccaagcaaatgagagcagaagaagtcaaacaaagaagaagtccctggggccatgcctttcactttgtagggtgggggattactgagagtcaggctagacctgtgtttagagaagcagttttcacagtgactaccatttccacccaatgagaggctcctatttcccatcatagctccctaccctagggaggcctccatctggaaatgggaggatgaagaggctagaatcatctttcctagtgatcctgacatttagacagcacagaaataaagagcaataaaaagaa

SEQ ID NO: 29730 - DNA, 691 bp, Homo sapiens; identical to SEQ ID NO: 29572
  source 1..691: mol_type = unassigned DNA

SEQ ID NO: 29731 - DNA, 3335 bp, Homo sapiens
  source 1..3335: mol_type = unassigned DNA
gcgccaccagggcagcagccgccgcagccgccgccgctgggcagaggagccggagacgcgagcgggcgaggtggcggcggcggcggagcgggagcgggtaccgggcgcgggcagagcgcggcggcgcggagacggggttttgccatgttgacctggctggtctcgaactcctgaacgcaagtgatccgcctgcctcagcctcccaaggtgctgggattacaggcacgagccactgtgcctggcctcaactgttgcttcttataaaggtgtgttccagagaacaagccttcagacatttgctatattgacgctgagctgtcaggggactcaggcttatgaggaggtattgttacacaaaacagtgtctagtgaagacgacaagaaagaggggaaaggatcggaaaaagaagctaaaatactatagaaaaccatgagatctattcgatcttttgctaatgatgatcgccatgttatggtgaaacattcaacaatctatccatctccggaggaacttgaagctgttcagaatatggtatctactgttgaatgtgctcttaaacatgtctcagattggttggatgaaacaaataaaggcacaaaaacagagggtgagacagaagtgaagaaagatgaggccggagaaaactattccaaggatcaaggtggtcggacattgtgtggtgtaatgaggattggcctggttgcaaaaggcttgctgattaaagatgatatggacttggagctggttttaatgtgcaaagacaaacccacagagaccctgttaaatacagtcaaagataatcttcctattcagattcagaaactcacagaagagaaatatcaagtggaacaatgtgtaaatgaggcatctattataattcggaatacaaaagagcccacgctaactttgaaggtgatacttacctcacctctaattagggacgaattggagaagaaggatggagaaaatgtttcgatgaaagatcctccggacttattggacaggcagaaatgcctgaacgccttggcgtctcttcgacatgccaaatggtttcaggcaagggcaaatggattaaaatcatgtgtaattgtcctccgcattctgcgtgatttgtgcaacagagtccccacatgggcaccattgaaaggatggccactagaacttatatgtgaaaagtctataggtacttgtaatagacctttgggcgctggggaggccttgagacgagtaatggagtgtttggcatctggaatactacttcctgggggtcctggtcttcatgatccttgtgagcgagacccaacagatgctctgagctatatgaccatccagcaaaaagaagatattacccacagtgcacagcatgcactcagactatcagcctttggccagatttacaaagtgctggagatggacccccttccatctagtaagccttttcagaagtattcctggtcagttactgataaagaaggtgctgggtcttcagctctaaagaggccatttgaagatggattaggggatgataaagaccccaacaagaagatgaaacgaaacttaaggaaaattctggatagtaaagcaatagaccttatgaatgcactaatgaggctaaatcagatcaggcctgggcttcagtataagctcctatctcagtctggccccgttcatgccccagtcttcacaatgtctgtagatgtggatggcacaacatatgaagcctcaggaccatccaagaaaacagcaaaacttcacgtagcggtgaaggtattgcaggcaatgggatatccaacaggctttgatgcagatattgaatgtatgagttccgatgaaaaatcagataatgaaagtaaaaatgaaacagtgtcttcaaactcaagcaataatactggaaattctacaactgaaacctccagtaccttagaggtaagaactcagggccctatcctcacagcaagtggcaaaaaccctgtaatggagctcaatgaaaaaagaagaggtctcaagtatgaactcatctcagagactggtggaagccatgacaagcgctttgtaatggaggtagaagtagatggacagaaattcagaggcgcaggtccaaataagaaagtggcaaaggcgagtgcagctttagctgccttggagaaactgttttctggacccaatgcggcaaataataagaaaaagaagattatccctcaggcaaagggcgttgtgaatacagctgtgtctgcagcagtccaagctgttcggggcagaggaagaggaactctaacaaggggagcttttgttggggcgacagctgctcctggctacatagctccaggctatggaacaccatatggttacagcacagctgcccctgcctatggtttacccaagagaatggttctgttacccgttatgaaatttccaacatatcctgttccccactactcattcttttagcaaatgacagaagctaattcctattgaacaacaatacagtacaacacagaatgttagagaaaaagcctttttatcctgctttctttgaacacatacttgatcaaaattatttgtaaagaacatctttcctactttttgattttaacaaatgcaaatttagttctctaaaacttgaaaaaaaaaaaagaaaccagttctgtgaaaacggtacctcatttctggaaaataacttataccagcccttctgttctagggaaataaaagtctagcagttcaaagtttaagttttaagagacgtatcagattatgtaaaattaaatttgtgaaggatgtatagagtctcaaacactgatcacaaataaactgctttgttgtaacacagagtactgcctggttcctgatgcagtcactgattcttagttgattgatatgtatttgccccagggcactttaatttgggctgtagttattttttttaatacaatagagacttttcatttaactttaactttgtaaatattgaagtgtgtaataaagccaataaaatatgggtttgaatattgttttagcttattatttttgatatgttttggtatcaaattacaaggaattgaaaactaataacttagccctagaagcccattcacttgtaagcaaagtgctaaaacaaagcaaaggtgattgttagtttgagccagtctactcactttgtaagccctttgtactcctgttgtacaagggccatccccatgataaaggttccattctgttatttgagcattgcttattaaaatgatggcactacccagagatggggaaggagaatgtgattatcctagtttatgaatttccaagtttttaaaaataataaattaatcaatcaatc

SEQ ID NO: 29732 - DNA, 2990 bp, Homo sapiens
  source 1..2990: mol_type = unassigned DNA
ccggagccgcgagcgccaccagggcagcagccgccgcagccgccgccgctgggcagaggagccggagacgcgagcgggcgaggtggcggcggcggcggagcgggagcgggtaccgggcgcgggcagagcgcggcggcgcgggtgtgttccagagaacaagccttcagacatttgctatattgacgctgagctgtcaggggactcaggcttatgaggaggtattgttacacaaaacagtgtctagtgaagacgacaagaaagaggggaaaggatcggaaaaagaagctaaaatactatagaaaaccatgataaacaagaacaaaagaggcaagactgttcataaaaaattgagaatgttttagtttgcgatggacttcaaaacaaaatatttaccatgtactaacatataatttcatagatctattcgatcttttgctaatgatgatcgccatgttatggtgaaacattcaacaatctatccatctccggaggaacttgaagctgttcagaatatggtatctactgttgaatgtgctcttaaacatgtctcagattggttggatgaaacaaataaaggcacaaaaacagagggtgagacagaagtgaagaaagatgaggccggagaaaactattccaaggatcaaggtggtcggacattgtgtggtgtaatgaggattggcctggttgcaaaaggcttgctgattaaagatgatatggacttggagctggttttaatgtgcaaagacaaacccacagagaccctgttaaatacagtcaaagataatcttcctattcagattcagaaactcacagaagagaaatatcaagtggaacaatgtgtaaatgaggcatctattataattcggaatacaaaagagcccacgctaactttgaaggtgatacttacctcacctctaattagggacgaattggagaagaaggatggagaaaatgtttcgatgaaagatcctccggacttattggacaggcagaaatgcctgaacgccttggcgtctcttcgacatgccaaatggtttcaggcaagggcaaatggattaaaatcatgtgtaattgtcctccgcattctgcgtgatttgtgcaacagagtccccacatgggcaccattgaaaggatggccactagaacttatatgtgaaaagtctataggtacttgtaatagacctttgggcgctggggaggccttgagacgagtaatggagtgtttggcatctggaatactacttcctgggggtcctggtcttcatgatccttgtgagcgagacccaacagatgctctgagctatatgaccatccagcaaaaagaagatattacccacagtgcacagcatgcactcagactatcagcctttggccagatttacaaagtgctggagatggacccccttccatctagtaagccttttcagaagtattcctggtcagttactgataaagaaggtgctgggtcttcagctctaaagaggccatttgaagatggattaggggatgataaagaccccaacaagaagatgaaacgaaacttaaggaaaattctggatagtaaagcaatagaccttatgaatgcactaatgaggctaaatcagatcaggcctgggcttcagtataagctcctatctcagtctggccccgttcatgccccagtcttcacaatgtctgtagatgtggatggcacaacatatgaagcctcaggaccatccaagaaaacagcaaaacttcacgtagcggtgaaggtattgcaggcaatgggatatccaacaggctttgatgcagatattgaatgtatgagttccgatgaaaaatcagataatgaaagtaaaaatgaaacagtgtcttcaaactcaagcaataatactggaaattctacaactgaaacctccagtaccttagaggtaagaactcagggccctatcctcacagcaagtggcaaaaaccctgtaatggagctcaatgaaaaaagaagaggtctcaagtatgaactcatctcagagactggtggaagccatgacaagcgctttgtaatggaggtagaagtagatggacagaaattcagaggcgcaggtccaaataagaaagtggcaaaggcgagtgcagctttagctgccttggagaaactgttttctggacccaatgcggcaaataataagaaaaagaagattatccctcaggcaaagggcgttgtgaatacagctgtgtctgcagcagtccaagctgttcggggcagaggaagaggaactctaacaaggggagcttttgttggggcgacagctgctcctggctacatagctccaggctatggaacaccatatggttacagcacagctgcccctgcctatggtttacccaagagaatggttctgttacccgttatgaaatttccaacatatcctgttccccactactcattcttttagcaaatgacagaagctaattcctattgaacaacaatacagtacaacacagaatgttagagaaaaagcctttttatcctgctttctttgaacacatacttgatcaaaattatttgtaaagaacatctttcctactttttgattttaacaaatgcaaatttagttctctaaaacttgaaaaaaaaaaaagaaaccagttctgtgaaaacggtacctcatttctggaaaataacttataccagcccttctgttctagggaaataaaagtctagcagttcaaagtttaagttttaagagacgtatcagattatgtaaaattaaatttgtgaaggatgtatagagtctcaaacactgatcacaaataaactgctttgttgtaacacagagtactgcctggttcctgatgcagtcactgattcttagttgattgatatgtatttgccccagggcactttaatttgggctgtagttattttttttaatacaatagagacttttcatttaactttaactttgtaaatattgaagtgtgtaataaagccaataaaatatgggtttgaa

SEQ ID NO: 29733 - DNA, 2751 bp, Homo sapiens
  source 1..2751: mol_type = unassigned DNA
gcgccaccagggcagcagccgccgcagccgccgccgctgggcagaggagccggagacgcgagcgggcgaggtggcggcggcggcggagcgggagcgggtaccgggcgcgggcagagcgcggcggcgcgggtgtgttccagagaacaagccttcagacatttgctatattgacgctgagctgtcaggggactcaggcttatgaggaggtattgttacacaaaacagtgtctagtgaagacgacaagaaagaggggaaaggatcggaaaaagaagctaaaatactatagaaaaccatgagatctattcgatcttttgctaatgatgatcgccatgttatggtgaaacattcaacaatctatccatctccggaggaacttgaagctgttcagaatatggtatctactgttgaatgtgctcttaaacatgtctcagattggttggatgaaacaaataaaggcacaaaaacagagggtgagacagaagtgaagaaagatgaggccggagaaaactattccaagtggtcggacattgtgtggtgtaatgaggattggcctggttgcaaaaggcttgctgattaaagatgatatggacttggagctggttttaatgtgcaaagacaaacccacagagaccctgttaaatacagtcaaagataatcttcctattcagattcagaaactcacagaagagaaatatcaagtggaacaatgtgtaaatgaggcatctattataattcggaatacaaaagagcccacgctaactttgaaggtgatacttacctcacctctaattagggacgaattggagaagaaggatggagctttacagttcaccattaactgtagaactataaaatgatttctgaagtgtcaagataaatgttaattctgaaaatgtttcgatgaaagatcctccggacttattggacaggcagaaatgcctgaacgccttggcgtctcttcgacatgccaaatggtttcaggcaagggcaaatggattaaaatcatgtgtaattgtcctccgcattctgcgtgatttgtgcaacagagtccccacatgggcaccattgaaaggatggccactagaacttatatgtgaaaagtctataggtacttgtaatagacctttgggcgctggggaggccttgagacgagtaatggagtgtttggcatctggaatactacttcctgggggtcctggtcttcatgatccttgtgagcgagacccaacagatgctctgagctatatgaccatccagcaaaaagaagatattacccacagtgcacagcatgcactcagactatcagcctttggccagatttacaaagtgctggagatggacccccttccatctagtaagccttttcagaagtattcctggtcagttactgataaagaaggtgctgggtcttcagctctaaagaggccatttgaagatggattaggggatgataaagaccccaacaagaagatgaaacgaaacttaaggaaaattctggatagtaaagcaatagaccttatgaatgcactaatgaggctaaatcagatcaggcctgggcttcagtataagctcctatctcagtctggccccgttcatgccccagtcttcacaatgtctgtagatgtggatggcacaacatatgaagcctcaggaccatccaagaaaacagcaaaacttcacgtagcggtgaaggtattgcaggcaatgggatatccaacaggctttgatgcagatattgaatgtatgagttccgatgaaaaatcagataatgaaagtaaaaatgaaacagtgtcttcaaactcaagcaataatactggaaattctacaactgaaacctccagtaccttagaggtaagaactcagggccctatcctcacagcaagtggcaaaaaccctgtaatggagctcaatgaaaaaagaagaggtctcaagtatgaactcatctcagagactggtggaagccatgacaagcgctttgtaatggaggtagaagtagatggacagaaattcagaggcgcaggtccaaataagaaagtggcaaaggcgagtgcagctttagctgccttggagaaactgttttctggacccaatgcggcaaataataagaaaaagaagattatccctcaggcaaagggcgttgtgaatacagctgtgtctgcagcagtccaagctgttcggggcagaggaagaggaactctaacaaggggagcttttgttggggcgacagctgctcctggctacatagctccaggctatggaacaccatatggttacagcacagctgcccctgcctatggtttacccaagagaatggttctgttacccgttatgaaatttccaacatatcctgttccccactactcattcttttagcaaatgacagaagctaattcctattgaacaacaatacagtacaacacagaatgttagagaaaaagcctttttatcctgctttctttgaacacatacttgatcaaaattatttgtaaagaacatctttcctactttttgattttaacaaatgcaaatttagttctctaaaacttgaaaaaaaaaaaagaaaccagttctgtgaaaacggtacctcatttctggaaaataacttataccagcccttctgttctagggaaataaaagtctagcagttcaaagtttaagttttaagagacgtatcagattatgtaaaattaaatttgtgaaggatgtatagagtctcaaacactgatcacaaataaactgctttgttgtaa

SEQ ID NO: 29734 - DNA, 6290 bp, Homo sapiens
  source 1..6290: mol_type = unassigned DNA
ccggagccgcgagcgccaccagggcagcagccgccgcagccgccgccgctgggcagaggagccggagacgcgagcgggcgaggtggcggcggcggcggagcgggagcgggtaccgggcgcgggcagagcgcggcggcgcgggtgtgttccagagaacaagccttcagacatttgctatattgacgctgagctgtcaggggactcaggcttatgaggaggtattgttacacaaaacagtgtctagtgaagacgacaagaaagaggggaaaggatcggaaaaagaagctaaaatactatagaaaaccatgagatctattcgatcttttgctaatgatgatcgccatgttatggtgaaacattcaacaatctatccatctccggaggaacttgaagctgttcagaatatggtatctactgttgaatgtgctcttaaacatgtctcagattggttggatgaaacaaataaaggcacaaaaacagagggtgagacagaagtgaagaaagatgaggccggagaaaactattccaaggatcaaggtggtcggacattgtgtggtgtaatgaggattggcctggttgcaaaaggcttgctgattaaagatgatatggacttggagctggttttaatgtgcaaagacaaacccacagagaccctgttaaatacagtcaaagataatcttcctattcagattcagaaactcacagaagagaaatatcaagtggaacaatgtgtaaatgaggcatctattataattcggaatacaaaagagcccacgctaactttgaaggtgatacttacctcacctctaattagggacgaattggagaagaaggatggagaaaatgtttcgatgaaagatcctccggacttattggacaggcagaaatgcctgaacgccttggcgtctcttcgacatgccaaatggtttcaggcaagggcaaatggattaaaatcatgtgtaattgtcctccgcattctgcgtgatttgtgcaacagagtccccacatgggcaccattgaaaggatggccactagaacttatatgtgaaaagtctataggtacttgtaatagacctttgggcgctggggaggccttgagacgagtaatggagtgtttggcatctggaatactacttcctgggggtcctggtcttcatgatccttgtgagcgagacccaacagatgctctgagctatatgaccatccagcaaaaagaagatattacccacagtgcacagcatgcactcagactatcagcctttggccagatttacaaagtgctggagatggacccccttccatctagtaagccttttcagaagtattcctggtcagttactgataaagaaggtgctgggtcttcagctctaaagaggccatttgaagatggattaggggatgataaagaccccaacaagaagatgaaacgaaacttaaggaaaattctggatagtaaagcaatagaccttatgaatgcactaatgaggctaaatcagatcaggcctgggcttcagtataagctcctatctcagtctggccccgttcatgccccagtcttcacaatgtctgtagatgtggatggcacaacatatgaagcctcaggaccatccaagaaaacagcaaaacttcacgtagcggtgaaggtattgcaggcaatgggatatccaacaggctttgatgcagatattgaatgtatgagttccgatgaaaaatcagataatgaaagtaaaaatgaaacagtgtcttcaaactcaagcaataatactggaaattctacaactgaaacctccagtaccttagaggtaagaactcagggccctatcctcacagcaagtggcaaaaaccctgtaatggagctcaatgaaaaaagaagaggtctcaagtatgaactcatctcagagactggtggaagccatgacaagcgctttgtaatggaggtagaagtagatggacagaaattcagaggcgcaggtccaaataagaaagtggcaaaggcgagtgcagctttagctgccttggagaaactgttttctggacccaatgcggcaaataataagaaaaagaagattatccctcaggcaaagggcgttgtgaatacagctgtgtctgcagcagtccaagctgttcggggcagaggaagaggaactctaacaaggggagcttttgttggggcgacagctgctcctggctacatagctccaggctatggaacaccatatggttacagcacagctgcccctgcctatggtttacccaagagaatggttctgttacccgttatgaaatttccaacatatcctgttccccactactcattcttttagcaaatgacagaagctaattcctattgaacaacaatacagtacaacacagaatgttagagaaaaagcctttttatcctgctttctttgaacacatacttgatcaaaattatttgtaaagaacatctttcctactttttgattttaacaaatgcaaatttagttctctaaaacttgaaaaaaaaaaaagaaaccagttctgtgaaaacggtacctcatttctggaaaataacttataccagcccttctgttctagggaaataaaagtctagcagttcaaagtttaagttttaagagacgtatcagattatgtaaaattaaatttgtgaaggatgtatagagtctcaaacactgatcacaaataaactgctttgttgtaacacagagtactgcctggttcctgatgcagtcactgattcttagttgattgatatgtatttgccccagggcactttaatttgggctgtagttattttttttaatacaatagagacttttcatttaactttaactttgtaaatattgaagtgtgtaataaagccaataaaatatgggtttgaatattgttttagcttattatttttgatatgttttggtatcaaattacaaggaattgaaaactaataacttagccctagaagcccattcacttgtaagcaaagtgctaaaacaaagcaaaggtgattgttagtttgagccagtctactcactttgtaagccctttgtactcctgttgtacaagggccatccccatgataaaggttccattctgttatttgagcattgcttattaaaatgatggcactacccagagatggggaaggagaatgtgattatcctagtttatgaatttccaagtttttaaaaataataaattaatcaatcaatcaccctctcttgttcttgtggccttcttcactctgtaagatattgtgttcactccctggcttttttcatgcagatagaagattagtgattttgctgggattcattgaagggtctcctttcctcttcaattacatcagaatctaaagcagcaacagggtccccataaaaacttgctcttcgattgtcccagttcttgttgagtgctgctgtgaaaagtgacaggtttcagccatgggtcagcatttctttttaagacacctgatgatgctggtggaaatggatcagtgggtaacattgtgctgttctgtaaagggtgcagacctaagtcctccacttgcattctcaccttgtttggaaagccaatgatgttactaggtcaatggtttcattaaggtactcacccccatgaaggagcagcagtgtggtcccctgtcaatatttataaggcaccatgtcttaaaaatgtctgtttttagtatgaattagctttcattttccctattcagttctgcttttgggaacttgacagggcccatccatgagaatgggcttcacaaaatatggcaaatgtatgtaccaaattccttcgggaccactaaataaaggtgaaatgggcaatgtacaacaaatgttagtgtcacttctcagatatatattacacaatgattagtttgtttcttctccttggtcttttgtctttattagtggtgggtgatactttaataaaacctcatcacttgctggaaatagctgtaacttatcattctcatcctgtgcattagtggctagacataaacaagagggcccatttcagctgggagttttcatgtttcattgatgcgttttgctgacctatggatgaaacagagccatcactgagaagaaaaagcatggctgatagtgtccagtttttattaattaaatctttacagtagtcctcattgtctttggaatactattaattggcagctgcggctgtattgttatttgaaattggtcatcaaatttggattccacgttggaatctctagatatttctcgttagaaaattcttttgaagtagctgactctgcttcataactcacgcgctctgtaatggtgaaaagggagctgtgctgttttccaacatgatggcagtcatttcaaatggtttctaccaagtcttttttttttttttttaattttgttgtttgttggaagttactaaccatgttgtaaacctgcccagttgctgcaaacttttacatttctctgctttacttaaaataatcgagctgtcagtcctttgttagaagtggtaaccatgcaagttcaactgtttaaattctgtaatgaattaagtgtccccccacctgttgcccttcccacccttccattttgtaatgaaaattccacttacagctgaaagagcagagaaatataaatgaagctcttggcttcaccaaattgcctgagattaacatgaagttttgcttctctgctcttttctccactgtaggtggttttttcattgacagcccctattgccagcctctgagcgtcgcaccatttattattcacttgggccctcaagatttcttctctgacttctagaaccatcaggttgtctggcttgaaatggcaatttctatgtcttggtcttaagagcaatgtgacaccctgaggctatccagctttcagacactccactctgacaccctctttttgaaagcaatgactgatcattttaaagaagagcaatactttgttcaaagccacggtgtctgttttaaaacttttcctttggaaacctagcaatatctgtacttaacccctttttagcatagtttcttgtcagggagtttacaggtcagtgtagagcttaaaattagcgtgtgagctgtgctatgttctgacagttttttacactttttagcacataaatagttacattcctgactgcgtcagttagcgttactataatttctcagagataggggtcctccttgaagccatatcctctgcacggggactggcccctagccagggatgtggcttgcagcttgtgtttcttcaggctgcaggagtaccccatctcttgtgcaaggtaattggtccagtagatttccaacatacctcatgctgactagatgaagtgcatgggtggtgaagtaaggagttgagtttatatagttctgaagtcgtttgtagtctctctcaaattgttagcctggggaacaaaccactgagagattttgctggtattggccttttctttttttttttttttttaattttgggtgaatgtttgaaaatcatgaatcagccaccattattaattgaagagctgggaatacctcgttaatgtatttttaaaactggtgttggaccctctgtgtatttcaggttaatacttttaagcagttttcagcacgtttatctcactttattctcgttctcctcggaccttcgtagccatatcacttgtataaaataggctgagatatagtgactgtaagctgtgatctcagtatacaaaggtaagctcttttattttctgattaaagagaaaaatagtcaattaagacaacatgcatatatgacaatcatatatgatgtatttgatctcttaggtcatatgtcatcgcattacctttaaaaattgtatggtctaaatgtaaaatagttatttttcaacatttgttttaatacccttgtaactgctttttactcaagacagacatttcacttacactaagtgtgtgtgtgtgtgtgtgtgtgtgtagaaacttaggatataacacgtatgtaaattacacacacatacctgtttaaatgtaagaattcagtgataggaacagttcatctaagaagattttaatgacagggcactcttttggccaaagcagtggaatttcctaagcagcaaggttggtaatagtgctggtaggatctgtatgtgtaagctgttacacaagctgaggatcaaagtgccaatttctcaaggagaaaaacttctccgagaaatgaaagtctctgatctgtgttgtatgccctaatacaacaacagcaagaagccatagaaaaaagcaatagaaaatg

SEQ ID NO: 29735 - DNA, 832 bp, Homo sapiens
  source 1..832: mol_type = unassigned DNA
gctttgtcacgctggctggagtacagtggcgcaatctcggctcactgcaatctccgcctcccaggttcaagcaattctgcctcggcttcctgagtagctgggactacaggtgcgcaccaccatgcctggctaatttttgtatttttagtagcgtcggggtttcaccatgttggccaggctggtctcgaactcctgacctcaggtgatccacccgccttggctcctaaagtgctggaattacaggtatgagccactgtgactggccgcaggtggtctgattctagtcctggctctgtcgcagactagctgcttgatctcaggaaatgtctctatttctagattgtcttcaatgttcttatcctgcttatctgtggataatattcttgatagtcatgtgaaggatctatcttgggaaagccaaggacatctgggaatgtttgacaggtgtgttccagagaacaagccttcagacatttgctatattgacgctgagctgtcaggggactcaggcttatgaggaggtattgttacacaaaacagtgtctagtgaagacgacaagaaagaggggaaaggatcggaaaaagaagctaaaatactatagaaaaccatgagatctattcgatcttttgctaatgatgatcgccatgttatggtgaaacattcaacaatctatccatctccggaggaacttgaagctgttcagaatatggtatctactgttgaatgtgctcttaaacatgtctcagattggttggatgaaacaaataaaggcacaaaaacagagggtgagacagaagtgaagaaagatgaggccggagaaaactattccaa

SEQ ID NO: 29736 - DNA, 1954 bp, Homo sapiens
  source 1..1954: mol_type = unassigned DNA
agactctgcaccctccttcagcccaggcaaggcctggggccctgggcagcctccaggtgcagtgccctcccgtgggccgcacccttgccactgccccagggcatgtctctactcaccaattatgaagggcttcggcatcagatagagaggctggtgcgggaaaatgaggaactgaagaagttggtgcggctcattcgggagaatcacgagctcaagtcagcgatcaagactcaggcaggcgggctcggcatcagcgggttcacgagtgggcttggtgaggcaacagcaggcctttcctcacgccagaacaatggtgtcttcctgcccccgtccccagcagtggcaaacgaacgagtcctcgaagaagtggggatcatggccttggcacccctggccgagatgctaaccagcttgcagcccagcgccacaccgggctcactcatgagccccctgacaggcaccctcagcacgctgctgtctggcccagcacccacgtcacagagcagccccctcaccagcttcctgaccagtcccattgcgggacccctaacaggcacactggccagttccctgggcctgccctccactggcaccctgactcccagcagcctcgtggcaggccctgtggccatgtcccagagcagccccctgatagcccctgtgatgggcacggtggctgtctctctgagcagccccctcctcagctccactgccaccccaccaggggtctctcagaacctgctggccaaccccatgagcaacctggtcctgccagaggccccaaggctgcggctggctgagccactccgcggaggccccactgggccccagtccccagcttgcgtggtacccactgccaccaccaaagtcccactctccactgagcccccccagtcgacccaggacccagagcctctcagcatggcgtttgcaggagcacccctccagacctccacccctatcggagccatgggcacacctgctcccaagacggccttctccttcaacacttcggacacacaggcccagcccagtgccgcccaggaacaagtggtccctgcatctgtccccacctcccccaccacctcccccacggtcaccgtccttgcctctgcccccgcccttgccccccaggttgccaccagctacacaccctcaagcaccacccacatcgcccagggtgccccccatcccccttcccgaatgcataattccccaacccagaacctgcctgtcccccactgtcctccacacaacgcccactccccacctcgtacctcatcctccccggcttcagtcaatgactctcgaggtccacgcaccacagaaccgtcgacgaagagcatgatggaggtggaacggaagctggcccaccgcaagaccagcaagttccccgagaacccccgagagtcgaagcagctggcctgggagaggctggtgggtgagattgccttccagctggaccgcaggatcctgtccagcatcttcccagagcgcgtacggctctacggcttcactgtctccaacatcccagagaagatcatccaggcttccctgaaccccagtgaccacaagctggatgagaagctgtgccagaggctcacacagcgctatgtgagcgtcatgaacaggctgcagagtctgggctacaacgggcgggtgcaccctgcgctgaccgagcagctggtgaacgcttatggcatcctgcgagagcgcccggagctggcggcgtctgagggcggcccctacaccgtggacttcctgcagcgtgtggtggtggagaccgtgcaccccggcatgctcgccgacgcgctgctgctgctctcctgcctcagccagctggcgcacgatgacggcaagcccatgttcatctggtgacgctggagctgggaggtccaggctcgctcagccccacagccctgtgcacggccattaaagcttcccacagacactg

SEQ ID NO: 29737 - DNA, 1795 bp, Homo sapiens
  source 1..1795: mol_type = unassigned DNA
ctccttcagcccaggcaaggcctggggccctgggcagcctccaggtgcagtgccctcccgtgggccgcacccttgccactgccccagggcatgtctctactcaccaattatgaagggcttcggcatcagatagagaggctggtgcgggaaaatgaggaactgaagaagttggtgcggctcattcgggagaatcacgagctcaagtcagcgatcaagactcaggcaggcgggctcggcatcagcgggttcacgagtgggcttggtgaggcaacagcaggcctttcctcacgccagaacaatggtgtcttcctgcccccgtccccagcagtggcaaacgaacgagtcctcgaagaagtggggatcatggccttggcacccctggccgagatgctaaccagcttgcagcccagcgccacaccgggctcactcatgagccccctgacaggcaccctcagcacgctgctgtctggcccagcacccacgtcacagagcagccccctcaccagcttcctgaccagtcccattgcgggacccctaacaggcacactggccagttccctgggcctgccctccactggcaccctgactcccagcagcctcgtggcaggccctgtggccatgtcccagagcagccccctgatagcccctgtgatgggcacggtggctgtctctctgagcagccccctcctcagctccactgccaccccaccaggggtctctcagaacctgctggccaaccccatgagcaacctggtcctgccagaggccccaaggctgcggctggctgagccactccgcggaggccccactgggccccagtccccagcttgcgtggtacccactgccaccaccaaagtcccactctccactgagcccccccagtcgacccaggacccagagcctctcagcatggcgtttgcaggagcacccctccagacctccacccctatcggagccatgggcacacctgctcccaagacggccttctccttcaacacttcggacacacaggcccagcccagtgccgcccaggaacaagtggtccctgcatctgtccccacctcccccaccacctcccccacggtcaccgtccttgcctctgcccccgcccttgccccccaggttgccaccagctacacaccctcaagcaccacccacatcgcccagggtgccccccatcccccttcccgaatgcataattccccaacccagaacctgcctgtcccccactgtcctccacacaacgcccactccccacctcgtacctcatcctccccggcttcagtcaatgactctcgaggtccacgcaccacagaaccgtcgacgaagagcatgatggaggtggaacggaagctggcccaccgcaagaccagcaagttccccgagaacccccgaggcttccctgaaccccagtgaccacaagctggatgagaagctgtgccagaggctcacacagcgctatgtgagcgtcatgaacaggctgcagagtctgggctacaacgggcgggtgcaccctgcgctgaccgagcagctggtgaacgcttatggcatcctgcgagagcgcccggagctggcggcgtctgagggcggcccctacaccgtggacttcctgcagcgtgtggtggtggagaccgtgcaccccggcatgctcgccgacgcgctgctgctgctctcctgcctcagccagctggcgcacgatgacggcaagcccatgttcatctggtgacgctggagctgggaggtccaggctcgctcagccccacagccctgtgcacggccattaaagcttcccaca

SEQ ID NO: 29738 - DNA, 2413 bp, Homo sapiens
  source 1..2413: mol_type = unassigned DNA
ccaggaagtgggtacacctgtccccacccccacagtaggagtcagaatcagggactggaagggatggggttcctggaggaagctcacagcagcagcagcctctgagtcacaactcagcccctccctggcatatccctttgtttgctgggagttgagctgtgactcacaaaggctctggtcccgggctgggcccatgtgacccagggtcctgactgccctgcccacagtcactgagaaaattctttgtgcaggctcaccttcccctcatctcccccactcttcctgatcctgcagcgtcagatcccagcctgcagtatcagacctcaaaaggagcctctggtgtcttccaaaagggaaggaaagagagagaaagccactggagttgggcagcgtgggaagctgtgaaagtggacaagcgtgaaagagcttccaagtagtggaaacagcagaagcaaagatgtgaacatgggaaaacctctgcagtatctgggtgactgtggggtttggctctgtttgagcaccccgggatgattggtggtggggtgtggctgaaggtgaattggaacagtgcactcagagccaggttgcaagagtgctgcatgctcctcagggattggctccggccaagtgccccagcctccttttctggagaattctgtttttgacttgggccccatgtccagttctgctctgacttgtgggtccaccttagaaaagtcaggagacacctgggaaatgaaggcactagactcttccagactcgttccatggccacccagaggccttgggtcatccacccaacatcccaacaaaccccactgtgcactggcatcatgccagggtccaggtgtcctgccaggagcagcctctgccctcccagagctgacatttcagggggatgtgtgccaaagtgagacctgtcagagatatttacaagcagccatctctcttgacatcgctgtatcccaaataaatcttctgggaagaccctcttcacctccagctctcctgatacagcaaggcagttgtgagcaagttattcataactctacacctcaatttcttggtatggaagatggggataatgagaggaccacaggatggttgtggagactgtgtgaggatatagatgccgagcccagtagcacagggtgcagccgttcaaaccaactgacatttactgagggctgctttgtcaggtccctctctacagtatactccaacacacacatacacacacatctgtaatcaataataatcctgcaacatctgagagtctggcagctgtttgtctgggcctttgcacatgctatgccctcccttccatcccccacccccaccaggggtgactcgtagccatccctttctgcatcttcttagatatcactttttccaagaagcctccctgtcacacttccccaatatcacagatgaagaaatcaagattcagaaaggttaagttactggcacaaggtcacacaatccagatctcatactcttagcccccggggaaccttcactgtattaaatgacatcaattgatcaatcaatcgatcaatcaatgaaagagtgggaggcatgcatctcctgatccccgatcctatacattttcatctctttattgtttctatcaaagcctgctaagtaattactttccctctgggtaagtgccactaggtgatgaggtgaggtaatcaaatgacatagaagaggaaggagtccactgccagggtaggtgcagtggagcaagtcttacaatgtgcaggattataactccagcaatgacccctaggctcatgctcattccccaggtggcagtttcagaacacattgctcaggtctcaccctgtaaatgtaggtaccagccttctagttgaccatcagaacacacaacgccaagatcttactccagccacctgccaggacctggagggcaggaggagagttctgcctacattgtctcattttccctccccttctgcagtgagatagaccatgtccagtgctcaggagttgactggccacactggggagtttgaccacaacattgggctccatatgcatggaatgaggttgcatgcaattgtccatgaggctgctccctcatttgtctgggtttctgctccaatgctatctcctcagaaagaccttctctgactgaagccagctctgcctccatcccatcactctggatctccttccccagcttcatctccattacactggccactctccctcacatcttattactgatctagttgtctactgtccatctccaccactgggatgtaaactccacaagggaggaatgctgtcagtttctttgactgctgtgtggtcagtaccagggcaatgcctcgcacagagtagccctctctccctaaatgtttttgaataaatgaaataaatgagc

SEQ ID NO: 29739 - DNA, 2080 bp, Homo sapiens
  source 1..2080: mol_type = unassigned DNA
gtgatgcttggggaccggctcctcggtcacaccccagtcctgctctgaaggttgccgttttccaaacagaaggatggtagctagaggggagatagcaagattctggagtctggaaagccttcacttggggtgctttcatgtatcatcattccacttgaggctcaaagcacaccaataacaagtacttgttcagaatgtataaacaaccctgagagatgggttttatcatccacattcaacaggtgaaaaaacaaagaaagaaacttgaccaaggactcatactcaaaaaagaaaaatatagaaaagaaaaaaaatgtgcatcgctatcatttgaagtttcttcagatggaggtactgagccctctgccttagtggatgacaacggtagtgaggaggacttcagctatgaagacctctgccaggccagccctcggtacctgcagcccggcggggagcagctggccatcaatgagctgatcagtgatggcaacgtggtctgcgcagaagccctgtgggaccatgtgaccatggatgaccaggaactgggcttcaaagccggggatgtcatccaggttctggaagcctccaacaaggactggtggtggggccgcagtgaagataaggaagcctggttccccgcgagcttcgtcagattgcgagtgaatcaggaagagctgtcggaaaactccagcagcacccccagtgaggagcaggacgaggaggccagccagagccgccacagacactgtgagaacaagcagcagatgcggaccaacgtcatccgggagatcatggacaccgagcgggtgtacatcaaacacctcagggacatctgtgagggctatatccgacagtgccgcaagcacacaggaatgttcaccgttgcgcagctagccactatttttggaaacattgaagatatttacaaattccaaagaaagtttctgaaagaccttgagaaacagtacaacaaagaggaacctcacttaagtgaaataggatcttgctttcttcaaaatcaagagggctttgccatctattccgagtactgcaacaaccacccgggcgcctgcctggagctcgccaacctcatgaagcagggcaagtacagacatttctttgaagcctgccgcctgctgcagcagatgattgacatcgccatcgacgggttcctgctcacaccagtgcagaagatctgcaaatacccgctgcagctggccgagctgctcaagtataccacacaggaacacggtgattacagcaacataaaggcagcatatgaggccatgaagaatgtggcctgtctgatcaacgagcgcaagcgcaagctggagagcatcgacaagatagctcgctggcaggtgtctatcgtgggctgggagggactggatatcttagaccgaagctcagaattgattcattctggggagctgaccaaaatcactaagcaaggcaaaagccagcagcggacgttcttcctgtttgaccaccagctggtgtcctgcaagaaggacctgctgcgcagggacatgctgtactacaagggccggctggacatggatgagatggagcttgtggacctgggggatgggcgcgacaaggactgcaacctcagcgtgaaaaatgccttcaagctcgtcagtaggaccacagacgaggtttatttgttttgtgccaaaaaacaagaagacaaggcgaggtggctgcaggcctgtgcagatgaaaggaggcgggtgcaagaggacaaggagatgggaatggaaatttcagaaaaccagaagaaacttgccatgttaaatgctcaaaaggcaggacatggaaagtcaaaaggctacaacaggtgccctgtggccccaccgcaccagggcctgcaccccatccaccagcgccacatcactatgcccacaagcgtcccccagcagcaggtctttggcctggcggaacccaagaggaagtcctcgctcttctggcacaccttcaacaggctcacccccttccggaaatgaaaacaggaggctgtgcttccatggagctgggtgtcaagagaagaactgtctttgtttcttgtgtgcttcaatcc

SEQ ID NO: 29740 - DNA, 6665 bp, Homo sapiens
  source 1..6665: mol_type = unassigned DNA
gtgtgcgttgcgctttctcccgcgatcgccctgccggtcgctagctccgagggcgcgcactggatcccaggctcctccgagagtgcggcgacctcggggctccgccggcaccggaggtggctctgagggcagggacgtgttggacacgctgactttgtaggctccgccaagaggcgccgcaggaggtcgtccctgatggcccctggaggcgaagctcatcacaggatgaggaaaggacagaggcacagagaacccccaagaggagatggggctctgggagacggccaaggcctcggccattctctgactacggccagctggccagccgcagtttgtctattcctgaagactcggttgctgcagacccccagaaggaagaccgtgtggacgaggacccccaggcaagcatgacttctgccagccctgaagaccagaatgctccagtgggctgccccaaaggagcccggagaaggcgccccatttccgtgataggtggggtcagcttgtatgggaccaaccagacggaggaactggacaatcttctgacccaaccggcttccaggccgcccatgcctgctcaccaggtgccaccctacaaggctgtgtcggcccggttccggcccttcacattctcccagagcacccccattgggttggaccgtgtgggacgccggcggcagatgagagcatccaacgtttcttcagatggaggtactgagccctctgccttagtggatgacaacggtagtgaggaggacttcagctatgaagacctctgccaggccagccctcggtacctgcagcccggcggggagcagctggccatcaatgagctgatcagtgatggcaacgtggtctgcgcagaagccctgtgggaccatgtgaccatggatgaccaggaactgggcttcaaagccggggatgtcatccaggttctggaagcctccaacaaggactggtggtggggccgcagtgaagataaggaagcctggttccccgcgagcttcgtcagattgcgagtgaatcaggaagagctgtcggaaaactccagcagcacccccagtgaggagcaggacgaggaggccagccagagccgccacagacactgtgagaacaagcagcagatgcggaccaacgtcatccgggagatcatggacaccgagcgggtgtacatcaaacacctcagggacatctgtgagggctatatccgacagtgccgcaagcacacaggaatgttcaccgttgcgcagctagccactatttttggaaacattgaagatatttacaaattccaaagaaagtttctgaaagaccttgagaaacagtacaacaaagaggaacctcacttaagtgaaataggatcttgctttcttcaaaatcaagagggctttgccatctattccgagtactgcaacaaccacccgggcgcctgcctggagctcgccaacctcatgaagcagggcaagtacagacatttctttgaagcctgccgcctgctgcagcagatgattgacatcgccatcgacgggttcctgctcacaccagtgcagaagatctgcaaatacccgctgcagctggccgagctgctcaagtataccacacaggaacacggtgattacagcaacataaaggcagcatatgaggccatgaagaatgtggcctgtctgatcaacgagcgcaagcgcaagctggagagcatcgacaagatagctcgctggcaggtgtctatcgtgggctgggagggactggatatcttagaccgaagctcagaattgattcattctggggagctgaccaaaatcactaagcaaggcaaaagccagcagcggacgttcttcctgtttgaccaccagctggtgtcctgcaagaaggacctgctgcgcagggacatgctgtactacaagggccggctggacatggatgagatggagcttgtggacctgggggatgggcgcgacaaggactgcaacctcagcgtgaaaaatgccttcaagctcgtcagtaggaccacagacgaggtttatttgttttgtgccaaaaaacaagaagacaaggcgaggtggctgcaggcctgtgcagatgaaaggaggcgggtgcaagaggacaaggagatgggaatggaaatttcagaaaaccagaagaaacttgccatgttaaatgctcaaaaggcaggacatggaaagtcaaaaggctacaacaggtgccctgtggccccaccgcaccagggcctgcaccccatccaccagcgccacatcactatgcccacaagcgtcccccagcagcaggtctttggcctggcggaacccaagaggaagtcctcgctcttctggcacaccttcaacaggctcacccccttccggaaatgaaaacaggaggctgtgcttccatggagctgggtgtcaagagaagaactgtctttgtttcttgtgtgcttcaatccagggaaagtttcttggacccagtgataaaaacttccttttagggatcaatgaaggagagaaggtcttggaatcaccttcagtctttggagacccagctgcctttgtggaagggaggagacggtcatgacacaaagctttatcctacacagaaacacccgtgacccactatgagatggcccagatgtgggacccggtaccatgctctaaagcgagtgattaggcagcagctgaagccacccctgctgatgatgagcaagtgcctgctgcaggtccaaacacagcatccagggctttgcagttcctaaggagtgatgaggttagaggatcacttctgcatttgattttcaaggatgccgtcaagacggggttgacacaatgctgcacgtgtctggtcacacttagaaattgagctcttactctcttctgtaatactgggggacctacagctgccgtggggctgaccacggtgttccctggcatcgtctgtgtccacacagatgctaactggtagtgcaaatgtcatcctgcaaggttcctcttcctgcaagcaaagtggagagaaagaagatgcatctgtcaccttcatcagggtcctcagtgcagagcaacttacgcatcctcaagaatccactgcttttcaggcaaggagggagaaatcctgctgcacactggctttgtcccggagtcggattccctcctgcctgcacgccttcagtaactccgagcagaaatcacatcttgcccacatgctgtaacctaagaaactgctatgcaaggctgggtgctgtggctcatgcctgtaatcccagcactttgggaggccaaggcaggtggatcacctgaggtcaggagttcgagacaagcgtggccaatatggcaaagcccagtctctactaataatacaaaaattagctgggcatggtggcgcatgcctgtaatcccagctactgggaaggctgaggtaggagaatcttttgaatctgggaagcggaggttgcagtgagctgagatcgcaccactgcactccagcctgggagatacagcgagactgtctccaaaaacaaaaacaaaaacaaaaaacattcaaacaactgtttgcaatataaaaagctcatttactgtaatatttatgatacagtgaatatgaaaatgcactggtcagaaggcactctcaaagagccgcactgctcctgacatcgtccttagcaatgaagtcacaaagacagccaaagcagtcctgcttcttggaaatcagaagctgcctttatcacatataaagccaaacagggcataaccatgtcacgtgagcatgtcatcaggcttctgaggacttgttctttataaaaaaagaccttcacaaaatatcttggcttagagatagcagtctttattaacaaaggccacctaggctgacacctgcagataatcatctccttttctttgtctatgttgtacattttcatgatataacttttaactatgtctagagaaggcaggctctgcaagagaggtgccctttcaacccgctcagtgccctggacaggagatgctgtgttaaactgttaatggatatctatatgagaagctcatttttgtatgctatccctgcagtttttttttttctaacaggcccatgtttgagaataaacaagtctgtgatgtcagagacaaaggtgtattcttcagtctgcaggtgtgtggcacctcccttctcccctgcagccccccacatccagagccgttcctgagagtgacatcatgcatcaagaaaacataaccttggtcctcaggtgaacccttggaacattctgtgaccgcctgatgtccattctgagccaccttggcacacatgcttacaggcagcactgctaagggttcaggtgccccatggctgacagcccgagttgcttctgtggaccatcatgccgctcggcacgtcctgagacagaagttgctgcaggaaggagcttctggagaggtcctgtggcatgtgtgggggtgtgtgtgtgtatgtttccttcttgaacagacattccaactttagatgtgtttatagaactgacctttttactaacaaaatacaatgatatatgttggaaactacttaatatgcttttcctgcacaccttagcaataactgtaggggtctctgctagagttgtttgtatgtacagcaattttgaacaaattgttttaaatgtaatataagagaattagtttaaggaagtaaagagaatcatttgcttgtgttacattttcagtgaggattcagtttaagagtcattcttaggacttccatttcctaatatttattcatgggtaatgaagaaatggtttgcattttgtggccagtcctaatttattttccagctgagccctaacttccggctcccacctacctccacggacttcctaacagagacttatgaataccaggatgtgtttttgttaagtcaggttcaattcgttgcccctgtcagttttatagagtgtgagggtcactccattaaagatctctcctgggtggatcctacttggatgttcaggtgattttgaaaactgctaacatttttaaaaggctagaacatcctttgacttcttgaaaatctgcatgtctggcttgggttttattaccacatgcctgagttcttcaagaatggaaggctcaagtattctcatcttccatttgccaaacttccttcctgatttgagtcacgtgttccacttggaaagaaagggaacagagagcctcctccatggacagtgtatgaatttcattgggaatcttgctctctcccgcctctatgcctttctctctttttaaccttactttacataatattatagatgggccaagaaaagaaaagatgacataacattttgatgaatttcacctattccattcttcacgtttcagaattggtcgactttgttagaagataattgaagtagccttgggtcaaaagcaaccttttcaattgtgatcatacctaaaacatataaaaaccctgccgtagattaaaagcaattataaaatcataaaattgaatgtttgcagaatcctggagcagtagatttctttgtctttggcctgcggactagaaagagggcagcagtagtatgctggagcttccctgggataccagccacatggtttcttttcattagatctgatttttgtttcccactgtagatctgattttgtagttgaaaacatttcaccaccatcaaacactatttctgaatattgtgcctttttatacctagcctagatgaaaaccgatgccattcttattcagaaaatccccccatcctacatgactgttatctagacataaagcaaagtgcatttaattcaaaatttggttcacaatataagtattttgtaaaagccagctgaaccagcattttatcaggtggaaatctctgcaagccaaattgctgatactccttcatgcagatcaacttggtgtcccagtcagaatagaacagcataattacctggagttagggggagtatttctgcactattacttgtcagggagagaagaaacttagaattgtccctcaaaggagtgtcaagaagtatgaataaatgtcctttcaccagctcacaggccagaaatggaggacccaagtcaactaggtgaaactactagcagacccagctttcccataataacctaatctgcaaattgttctattaaagtctcattgttttcaggatgcaatgaaagtggatttcaaaaggctttggaaaaataagtggaacatgactgatcttgaaaaaaaaagcaaaagcttaaatatttgatacaagtttacttagctacaacatactttacattgttgcctttagttatctcacaggcactgacattttatatttagaaaatacttttaatctttctaatctttttttgtaaatattagtgtccattctgtatgactcgctaacctactttgcaaggctttgggcaacattttagctcattaacttcaagatgatgtgtcatctgtataggtcaaagaatgggacttctgaactgaggaatttgctgttgacagccaaagtatagtgtacaagattgatgtaacttgatatgtatttttgttgaagttttttgtaaaaaaaaattatttacaatgttatttgaatgatttttttaaatgctgtgaatctatatttgttgttttgtatattaaaattcatttgccaaactc

SEQ ID NO: 29741 - DNA, 8457 bp, Homo sapiens
  source 1..8457: mol_type = unassigned DNA
gtgtgctgccgcggcgcgggaggagagtgtgcgttgcgctttctcccgcgatcgccctgccggtcgctagctccgagggcgcgcactggatcccaggctcctccgagagtgcggcgacctcggggctccgccggcaccggaggtggctctgagggcagggacgtgttggacacgctgactttgtaggctccgccaagaggcgccgcaggagcccgtggccacccaggagcccgatgtgcaaggcaggtgtgagtgccaggacggcattcctggagatgaaggcctggagctgcggtctgcggactcggcagtgcccgtggccatgacccaggctgccgtgcggccctgggcaccctgcctggagaacatgaccactgccccaaacggcctcgggccaggccccgcagccccctgtgcaggctcggacctgaaagacgccaagatggtgacctcccttgcgtgtggaaatggagtctgtggctgcagccctggtggcgacacggacacccaggaagccaaactcagcccagccaagcttgtgcgcctcttttccaccagtcggaagaggacgggtgcccaccccgagcggccccactccatggtcctggtggggaactcctccacatggaacaccctcgcctccttccggaaaatgggatcctttaagaaactgaagtcctcagtcctgaaaggaattcagagccgagaggggtcaaatgcctgttcaaagggagaggcttcggagcatggcctgggaaagtccatcccaaatggcgctgtcccaggagcccaggcaagcaggggctcccccttagcaccgggaccagcatgtggtgccctcaggccagcagagtggggcacattggatggctccgacctcgaggacacggacgatgccttccagcggagcacacaccgctcccgcagcctccgcagagcctacggcctgggccgcatctgcctgctggatgcgccccagaaccatgcgacacccacgatagccactggccaggtgcccgccgtgtgtgagattctcgtgagggaccctgaaaacaacagcatgggctacaggaggagcaagagcacggacaatcttgcctttctgaagaagagctcctttaagcggaagtccacctccaatcttgcagacctcaggacggcccatgacgcacgggtaccacagaggaccctgagcagttcctccactgactcccaaaagcttgggtcaggaaggaccaaacgctggaggagcccgataagggccaaggactttgacagagtcttcaaacttgtgagcaatgtgactgaggctgcctggaggagggagagtcctaggagtggggccccatcccctggagaggccagcctgagacttcaggcacacagccggctgcatgacgactactcccgccgcgtctccaggagcactgagcaggacagcaggcggggcggggcggtcatgcatgggaccactgcaacctgcaccgtggcccccggtttcggctcagccacctctaaggggccccacctagacgctgacactgccgtatttcctcttgaaaccaaaagttcctgggcggtggaaagcgacagttcctgcacttgcagctctttgccaagcccgattgtccaggatgtgttgagcaaagactcctgtgacccaaacgctggcagccagttgacatttgaccctgagcagcctcccacccctctaaggcccaccacacccaagccccagagccctcagagcccccagagccccggggcaggaagtgccagctgtcacagcaatcacagtgccctgtccgcgaattcagaggaaagtgaaggaagggcagaagagcctgctcagagagagccagggcctgtgtccttgcaggatcccctggaagccacacatggtgatgagggcagcaaggaccttctggtgaacattggtgtggcagccggcccagaagaaaaggagaaggaggaggtcgtccctgatggcccctggaggcgaagctcatcacaggatgaggaaaggacagaggcacagagaacccccaagaggagatggggctctgggagacggccaaggcctcggccattctctgactacggccagctggccagccgcagtttgtctattcctgaagactcggttgctgcagacccccagaaggaagaccgtgtggacgaggacccccaggcaagcatgacttctgccagccctgaagaccagaatgctccagtgggctgccccaaaggagcccggagaaggcgccccatttccgtgataggtggggtcagcttgtatgggaccaaccagacggaggaactggacaatcttctgacccaaccggcttccaggccgcccatgcctgctcaccaggtgccaccctacaaggctgtgtcggcccggttccggcccttcacattctcccagagcacccccattgggttggaccgtgtgggacgccggcggcagatgagagcatccaacgtttcttcagatggaggtactgagccctctgccttagtggatgacaacggtagtgaggaggacttcagctatgaagacctctgccaggccagccctcggtacctgcagcccggcggggagcagctggccatcaatgagctgatcagtgatggcaacgtggtctgcgcagaagccctgtgggaccatgtgaccatggatgaccaggaactgggcttcaaagccggggatgtcatccaggttctggaagcctccaacaaggactggtggtggggccgcagtgaagataaggaagcctggttccccgcgagcttcgtcagattgcgagtgaatcaggaagagctgtcggaaaactccagcagcacccccagtgaggagcaggacgaggaggccagccagagccgccacagacactgtgagaacaagcagcagatgcggaccaacgtcatccgggagatcatggacaccgagcgggtgtacatcaaacacctcagggacatctgtgagggctatatccgacagtgccgcaagcacacaggaatgttcaccgttgcgcagctagccactatttttggaaacattgaagatatttacaaattccaaagaaagtttctgaaagaccttgagaaacagtacaacaaagaggaacctcacttaagtgaaataggatcttgctttcttcaaaatcaagagggctttgccatctattccgagtactgcaacaaccacccgggcgcctgcctggagctcgccaacctcatgaagcagggcaagtacagacatttctttgaagcctgccgcctgctgcagcagatgattgacatcgccatcgacgggttcctgctcacaccagtgcagaagatctgcaaatacccgctgcagctggccgagctgctcaagtataccacacaggaacacggtgattacagcaacataaaggcagcatatgaggccatgaagaatgtggcctgtctgatcaacgagcgcaagcgcaagctggagagcatcgacaagatagctcgctggcaggtgtctatcgtgggctgggagggactggatatcttagaccgaagctcagaattgattcattctggggagctgaccaaaatcactaagcaaggcaaaagccagcagcggacgttcttcctgtttgaccaccagctggtgtcctgcaagaaggacctgctgcgcagggacatgctgtactacaagggccggctggacatggatgagatggagcttgtggacctgggggatgggcgcgacaaggactgcaacctcagcgtgaaaaatgccttcaagctcgtcagtaggaccacagacgaggtttatttgttttgtgccaaaaaacaagaagacaaggcgaggtggctgcaggcctgtgcagatgaaaggaggcgggtgcaagaggacaaggagatgggaatggaaatttcagaaaaccagaagaaacttgccatgttaaatgctcaaaaggcaggacatggaaagtcaaaaggctacaacaggtgccctgtggccccaccgcaccagggcctgcaccccatccaccagcgccacatcactatgcccacaagcgtcccccagcagcaggtctttggcctggcggaacccaagaggaagtcctcgctcttctggcacaccttcaacaggctcacccccttccggaaatgaaaacaggaggctgtgcttccatggagctgggtgtcaagagaagaactgtctttgtttcttgtgtgcttcaatccagggaaagtttcttggacccagtgataaaaacttccttttagggatcaatgaaggagagaaggtcttggaatcaccttcagtctttggagacccagctgcctttgtggaagggaggagacggtcatgacacaaagctttatcctacacagaaacacccgtgacccactatgagatggcccagatgtgggacccggtaccatgctctaaagcgagtgattaggcagcagctgaagccacccctgctgatgatgagcaagtgcctgctgcaggtccaaacacagcatccagggctttgcagttcctaaggagtgatgaggttagaggatcacttctgcatttgattttcaaggatgccgtcaagacggggttgacacaatgctgcacgtgtctggtcacacttagaaattgagctcttactctcttctgtaatactgggggacctacagctgccgtggggctgaccacggtgttccctggcatcgtctgtgtccacacagatgctaactggtagtgcaaatgtcatcctgcaaggttcctcttcctgcaagcaaagtggagagaaagaagatgcatctgtcaccttcatcagggtcctcagtgcagagcaacttacgcatcctcaagaatccactgcttttcaggcaaggagggagaaatcctgctgcacactggctttgtcccggagtcggattccctcctgcctgcacgccttcagtaactccgagcagaaatcacatcttgcccacatgctgtaacctaagaaactgctatgcaaggctgggtgctgtggctcatgcctgtaatcccagcactttgggaggccaaggcaggtggatcacctgaggtcaggagttcgagacaagcgtggccaatatggcaaagcccagtctctactaataatacaaaaattagctgggcatggtggcgcatgcctgtaatcccagctactgggaaggctgaggtaggagaatcttttgaatctgggaagcggaggttgcagtgagctgagatcgcaccactgcactccagcctgggagatacagcgagactgtctccaaaaacaaaaacaaaaacaaaaaacattcaaacaactgtttgcaatataaaaagctcatttactgtaatatttatgatacagtgaatatgaaaatgcactggtcagaaggcactctcaaagagccgcactgctcctgacatcgtccttagcaatgaagtcacaaagacagccaaagcagtcctgcttcttggaaatcagaagctgcctttatcacatataaagccaaacagggcataaccatgtcacgtgagcatgtcatcaggcttctgaggacttgttctttataaaaaaagaccttcacaaaatatcttggcttagagatagcagtctttattaacaaaggccacctaggctgacacctgcagataatcatctccttttctttgtctatgttgtacattttcatgatataacttttaactatgtctagagaaggcaggctctgcaagagaggtgccctttcaacccgctcagtgccctggacaggagatgctgtgttaaactgttaatggatatctatatgagaagctcatttttgtatgctatccctgcagtttttttttttctaacaggcccatgtttgagaataaacaagtctgtgatgtcagagacaaaggtgtattcttcagtctgcaggtgtgtggcacctcccttctcccctgcagccccccacatccagagccgttcctgagagtgacatcatgcatcaagaaaacataaccttggtcctcaggtgaacccttggaacattctgtgaccgcctgatgtccattctgagccaccttggcacacatgcttacaggcagcactgctaagggttcaggtgccccatggctgacagcccgagttgcttctgtggaccatcatgccgctcggcacgtcctgagacagaagttgctgcaggaaggagcttctggagaggtcctgtggcatgtgtgggggtgtgtgtgtgtatgtttccttcttgaacagacattccaactttagatgtgtttatagaactgacctttttactaacaaaatacaatgatatatgttggaaactacttaatatgcttttcctgcacaccttagcaataactgtaggggtctctgctagagttgtttgtatgtacagcaattttgaacaaattgttttaaatgtaatataagagaattagtttaaggaagtaaagagaatcatttgcttgtgttacattttcagtgaggattcagtttaagagtcattcttaggacttccatttcctaatatttattcatgggtaatgaagaaatggtttgcattttgtggccagtcctaatttattttccagctgagccctaacttccggctcccacctacctccacggacttcctaacagagacttatgaataccaggatgtgtttttgttaagtcaggttcaattcgttgcccctgtcagttttatagagtgtgagggtcactccattaaagatctctcctgggtggatcctacttggatgttcaggtgattttgaaaactgctaacatttttaaaaggctagaacatcctttgacttcttgaaaatctgcatgtctggcttgggttttattaccacatgcctgagttcttcaagaatggaaggctcaagtattctcatcttccatttgccaaacttccttcctgatttgagtcacgtgttccacttggaaagaaagggaacagagagcctcctccatggacagtgtatgaatttcattgggaatcttgctctctcccgcctctatgcctttctctctttttaaccttactttacataatattatagatgggccaagaaaagaaaagatgacataacattttgatgaatttcacctattccattcttcacgtttcagaattggtcgactttgttagaagataattgaagtagccttgggtcaaaagcaaccttttcaattgtgatcatacctaaaacatataaaaaccctgccgtagattaaaagcaattataaaatcataaaattgaatgtttgcagaatcctggagcagtagatttctttgtctttggcctgcggactagaaagagggcagcagtagtatgctggagcttccctgggataccagccacatggtttcttttcattagatctgatttttgtttcccactgtagatctgattttgtagttgaaaacatttcaccaccatcaaacactatttctgaatattgtgcctttttatacctagcctagatgaaaaccgatgccattcttattcagaaaatccccccatcctacatgactgttatctagacataaagcaaagtgcatttaattcaaaatttggttcacaatataagtattttgtaaaagccagctgaaccagcattttatcaggtggaaatctctgcaagccaaattgctgatactccttcatgcagatcaacttggtgtcccagtcagaatagaacagcataattacctggagttagggggagtatttctgcactattacttgtcagggagagaagaaacttagaattgtccctcaaaggagtgtcaagaagtatgaataaatgtcctttcaccagctcacaggccagaaatggaggacccaagtcaactaggtgaaactactagcagacccagctttcccataataacctaatctgcaaattgttctattaaagtctcattgttttcaggatgcaatgaaagtggatttcaaaaggctttggaaaaataagtggaacatgactgatcttgaaaaaaaaagcaaaagcttaaatatttgatacaagtttacttagctacaacatactttacattgttgcctttagttatctcacaggcactgacattttatatttagaaaatacttttaatctttctaatctttttttgtaaatattagtgtccattctgtatgactcgctaacctactttgcaaggctttgggcaacattttagctcattaacttcaagatgatgtgtcatctgtataggtcaaagaatgggacttctgaactgaggaatttgctgttgacagccaaagtatagtgtacaagattgatgtaacttgatatgtatttttgttgaagttttttgtaaaaaaaaattatttacaatgttatttgaatgatttttttaaatgctgtgaatctatatttgttgttttgtatattaaaattcatttgccaaactcgt

SEQ ID NO: 29742 - DNA, 8242 bp, Homo sapiens
  source 1..8242: mol_type = unassigned DNA
gcccgtggccacccaggagcccgatgtgcaaggcaggtgtgagtgccaggacggcattcctggagatgaaggcctggagctgcggtctgcggactcggcagtgcccgtggccatgacccaggctgccgtgcggccctgggcaccctgcctggagaacatgaccactgccccaaacggcctcgggccaggccccgcagccccctgtgcaggctcggacctgaaagacgccaagatggtgacctcccttgcgtgtggaaatggagtctgtggctgcagccctggtggcgacacggacacccaggaagccaaactcagcccagccaagcttgtgcgcctcttttccaccagtcggaagaggacgggtgcccaccccgagcggccccactccatggtcctggtggggaactcctccacatggaacaccctcgcctccttccggaaaatgggatcctttaagaaactgaagtcctcagtcctgaaaggaattcagagccgagaggggtcaaatgcctgttcaaagggagaggcttcggagcatggcctgggaaagtccatcccaaatggcgctgtcccaggagcccaggcaagcaggggctcccccttagcaccgggaccagcatgtggtgccctcaggccagcagagtggggcacattggatggctccgacctcgaggacacggacgatgccttccagcggagcacacaccgctcccgcagcctccgcagagcctacggcctgggccgcatctgcctgctggatgcgccccagaaccatgcgacacccacgatagccactggccaggtgcccgccgtgtgtgagattctcgtgagggaccctgaaaacaacagcatgggctacaggaggagcaagagcacggacaatcttgcctttctgaagaagagctcctttaagcggaagtccacctccaatcttgcagacctcaggacggcccatgacgcacgggtaccacagaggaccctgagcagttcctccactgactcccaaaagcttgggtcaggaaggaccaaacgctggaggagcccgataagggccaaggactttgacagagtcttcaaacttgtgagcaatgtgactgaggctgcctggaggagggagagtcctaggagtggggccccatcccctggagaggccagcctgagacttcaggcacacagccggctgcatgacgactactcccgccgcgtctccaggagcactgagcaggacagcaggcggggcggggcggtcatgcatgggaccactgcaacctgcaccgtggcccccggtttcggctcagccacctctaaggggccccacctagacgctgacactgccgtatttcctcttgaaaccaaaagttcctgggcggtggaaagcgacagttcctgcacttgcagctctttgccaagcccgattgtccaggatgtgttgagcaaagactcctgtgacccaaacgctggcagccagttgacatttgaccctgagcagcctcccacccctctaaggcccaccacacccaagccccagagccctcagagcccccagagccccggggcaggaagtgccagctgtcacagcaatcacagtgccctgtccgcgaattcagaggaaagtgaaggaagggcagaagagcctgctcagagagagccagggcctgtgtccttgcaggatcccctggaagccacacatggtgatgagggcagcaaggaccttctggtgaacattggtgtggcagccggcccagaagaaaaggagaaggaggaggtcgtccctgatggcccctggaggcgaagctcatcacaggatgaggaaaggacagaggcacagagaacccccaagaggagatggggctctgggagacggccaaggcctcggccattctctgactacggccagctggccagccgcagtttgtctattcctgaagactcggttgctgcagacccccagaaggaagaccgtgtggacgaggacccccaggcaagcatgacttctgccagccctgaagaccagaatgctccagtgggctgccccaaaggagcccggagaaggcgccccatttccgtgataggtggggtcagcttgtatgggaccaaccagacggaggaactggacaatcttctgacccaaccggcttccaggccgcccatgcctgctcaccaggtgccaccctacaaggctgtgtcggcccggttccggcccttcacattctcccagagcacccccattgggttggaccgtgtgggacgccggcggcagatgagagcatccaacgtttcttcagatggaggtactgagccctctgccttagtggatgacaacggtagtgaggaggacttcagctatgaagacctctgccaggccagccctcggtacctgcagcccggcggggagcagctggccatcaatgagctgatcagtgatggcaacgtggtctgcgcagaagccctgtgggaccatgtgaccatggatgaccaggaactgggcttcaaagccggggatgtcatccaggttctggaagcctccaacaaggactggtggtggggccgcagtgaagataaggaagcctggttccccgcgagcttcgtcagattgcgagtgaatcaggaagagctgtcggaaaactccagcagcacccccagtgaggagcaggacgaggaggccagccagagccgccacagacactgtgagaacaagcagcagatgcggaccaacgtcatccgggagatcatggacaccgagcgggtgtacatcaaacacctcagggacatctgtgagggctatatccgacagtgccgcaagcacacaggaatgttcaccgttgcgcagctagccactatttttggaaacattgaagatatttacaaattccaaagaaagtttctgaaagaccttgagaaacagtacaacaaagaggaacctcacttaagtgaaataggatcttgctttcttcaaaatcaagagggctttgccatctattccgagtactgcaacaaccacccgggcgcctgcctggagctcgccaacctcatgaagcagggcaagtacagacatttctttgaagcctgccgcctgctgcagcagatgattgacatcgccatcgacgggttcctgctcacaccagtgcagaagatctgcaaatacccgctgcagctggccgagctgctcaagtataccacacaggaacacggtgattacagcaacataaaggcagcatatgaggccatgaagaatgtggcctgtctgatcaacgagcgcaagcgcaagctggagagcatcgacaagatagctcgctggcaggtgtctatcgtgggctgggagggactggatatcttagaccgaagctcagaattgattcattctggggagctgaccaaaatcactaagcaaggcaaaagccagcagcggacgttcttcctgtttgaccaccagctggtgtcctgcaagaaggacctgctgcgcagggacatgctgtactacaagggccggctggacatggatgagatggagcttgtggacctgggggatgggcgcgacaaggactgcaacctcagcgtgaaaaatgccttcaagctcgtcagtaggaccacagacgaggtttatttgttttgtgccaaaaaacaagaagacaaggcgaggtggctgcaggcctgtgcagatgaaaggaggcgggtgcaagaggacaaggagatgggaatggaaatttcagaaaaccagaagaaacttgccatgttaaatgctcaaaaggcaggacatggaaagtcaaaaggctacaacaggtgccctgtggccccaccgcaccagggcctgcaccccatccaccagcgccacatcactatgcccacaagcgtcccccagcagcaggtctttggcctggcggaacccaagaggaagtcctcgctcttctggcacaccttcaacaggctcacccccttccggaaatgaaaacaggaggctgtgcttccatggagctgggtgtcaagagaagaactgtctttgtttcttgtgtgcttcaatccagggaaagtttcttggacccagtgataaaaacttccttttagggatcaatgaaggagagaaggtcttggaatcaccttcagtctttggagacccagctgcctttgtggaagggaggagacggtcatgacacaaagctttatcctacacagaaacacccgtgacccactatgagatggcccagatgtgggacccggtaccatgctctaaagcgagtgattaggcagcagctgaagccacccctgctgatgatgagcaagtgcctgctgcaggtccaaacacagcatccagggctttgcagttcctaaggagtgatgaggttagaggatcacttctgcatttgattttcaaggatgccgtcaagacggggttgacacaatgctgcacgtgtctggtcacacttagaaattgagctcttactctcttctgtaatactgggggacctacagctgccgtggggctgaccacggtgttccctggcatcgtctgtgtccacacagatgctaactggtagtgcaaatgtcatcctgcaaggttcctcttcctgcaagcaaagtggagagaaagaagatgcatctgtcaccttcatcagggtcctcagtgcagagcaacttacgcatcctcaagaatccactgcttttcaggcaaggagggagaaatcctgctgcacactggctttgtcccggagtcggattccctcctgcctgcacgccttcagtaactccgagcagaaatcacatcttgcccacatgctgtaacctaagaaactgctatgcaaggctgggtgctgtggctcatgcctgtaatcccagcactttgggaggccaaggcaggtggatcacctgaggtcaggagttcgagacaagcgtggccaatatggcaaagcccagtctctactaataatacaaaaattagctgggcatggtggcgcatgcctgtaatcccagctactgggaaggctgaggtaggagaatcttttgaatctgggaagcggaggttgcagtgagctgagatcgcaccactgcactccagcctgggagatacagcgagactgtctccaaaaacaaaaacaaaaacaaaaaacattcaaacaactgtttgcaatataaaaagctcatttactgtaatatttatgatacagtgaatatgaaaatgcactggtcagaaggcactctcaaagagccgcactgctcctgacatcgtccttagcaatgaagtcacaaagacagccaaagcagtcctgcttcttggaaatcagaagctgcctttatcacatataaagccaaacagggcataaccatgtcacgtgagcatgtcatcaggcttctgaggacttgttctttataaaaaaagaccttcacaaaatatcttggcttagagatagcagtctttattaacaaaggccacctaggctgacacctgcagataatcatctccttttctttgtctatgttgtacattttcatgatataacttttaactatgtctagagaaggcaggctctgcaagagaggtgccctttcaacccgctcagtgccctggacaggagatgctgtgttaaactgttaatggatatctatatgagaagctcatttttgtatgctatccctgcagtttttttttttctaacaggcccatgtttgagaataaacaagtctgtgatgtcagagacaaaggtgtattcttcagtctgcaggtgtgtggcacctcccttctcccctgcagccccccacatccagagccgttcctgagagtgacatcatgcatcaagaaaacataaccttggtcctcaggtgaacccttggaacattctgtgaccgcctgatgtccattctgagccaccttggcacacatgcttacaggcagcactgctaagggttcaggtgccccatggctgacagcccgagttgcttctgtggaccatcatgccgctcggcacgtcctgagacagaagttgctgcaggaaggagcttctggagaggtcctgtggcatgtgtgggggtgtgtgtgtgtatgtttccttcttgaacagacattccaactttagatgtgtttatagaactgacctttttactaacaaaatacaatgatatatgttggaaactacttaatatgcttttcctgcacaccttagcaataactgtaggggtctctgctagagttgtttgtatgtacagcaattttgaacaaattgttttaaatgtaatataagagaattagtttaaggaagtaaagagaatcatttgcttgtgttacattttcagtgaggattcagtttaagagtcattcttaggacttccatttcctaatatttattcatgggtaatgaagaaatggtttgcattttgtggccagtcctaatttattttccagctgagccctaacttccggctcccacctacctccacggacttcctaacagagacttatgaataccaggatgtgtttttgttaagtcaggttcaattcgttgcccctgtcagttttatagagtgtgagggtcactccattaaagatctctcctgggtggatcctacttggatgttcaggtgattttgaaaactgctaacatttttaaaaggctagaacatcctttgacttcttgaaaatctgcatgtctggcttgggttttattaccacatgcctgagttcttcaagaatggaaggctcaagtattctcatcttccatttgccaaacttccttcctgatttgagtcacgtgttccacttggaaagaaagggaacagagagcctcctccatggacagtgtatgaatttcattgggaatcttgctctctcccgcctctatgcctttctctctttttaaccttactttacataatattatagatgggccaagaaaagaaaagatgacataacattttgatgaatttcacctattccattcttcacgtttcagaattggtcgactttgttagaagataattgaagtagccttgggtcaaaagcaaccttttcaattgtgatcatacctaaaacatataaaaaccctgccgtagattaaaagcaattataaaatcataaaattgaatgtttgcagaatcctggagcagtagatttctttgtctttggcctgcggactagaaagagggcagcagtagtatgctggagcttccctgggataccagccacatggtttcttttcattagatctgatttttgtttcccactgtagatctgattttgtagttgaaaacatttcaccaccatcaaacactatttctgaatattgtgcctttttatacctagcctagatgaaaaccgatgccattcttattcagaaaatccccccatcctacatgactgttatctagacataaagcaaagtgcatttaattcaaaatttggttcacaatataagtattttgtaaaagccagctgaaccagcattttatcaggtggaaatctctgcaagccaaattgctgatactccttcatgcagatcaacttggtgtcccagtcagaatagaacagcataattacctggagttagggggagtatttctgcactattacttgtcagggagagaagaaacttagaattgtccctcaaaggagtgtcaagaagtatgaataaatgtcctttcaccagctcacaggccagaaatggaggacccaagtcaactaggtgaaactactagcagacccagctttcccataataacctaatctgcaaattgttctattaaagtctcattgttttcaggatgcaatgaaagtggatttcaaaaggctttggaaaaataagtggaacatgactgatcttgaaaaaaaaagcaaaagcttaaatatttgatacaagtttacttagctacaacatactttacattgttgcctttagttatctcacaggcactgacattttatatttagaaaatacttttaatctttctaatctttttttgtaaatattagtgtccattctgtatgactcgctaacctactttgcaaggctttgggcaacattttagctcattaacttcaagatgatgtgtcatctgtataggtcaaagaatgggacttctgaactgaggaatttgctgttgacagccaaagtatagtgtacaagattgatgtaacttgatatgtatttttgttgaagttttttgtaaaaaaaaattatttacaatgttatttgaatgatttttttaaatgctgtgaatctatatttgttgttttgtatattaaaattcatttgccaaa

SEQ ID NO: 29743 - DNA, 2111 bp, Homo sapiens
  source 1..2111: mol_type = unassigned DNA
acagattttgctttctttttgcagccggcttccaggccgcccatgcctgctcaccaggtgccaccctacaaggctgtgtcggcccggttccggcccttcacattctcccagagcacccccattgggttggaccgtgtgggacgccggcggcagatgagagcatccaacgtttcttcagatggaggtactgagccctctgccttagtggatgacaacggtagtgaggaggacttcagctatgaagacctctgccaggccagccctcggtacctgcagcccggcggggagcagctggccatcaatgagctgatcagtgatggcaacgtggtctgcgcagaagccctgtgggaccatgtgaccatggatgaccaggaactgggcttcaaagccggggatgtcatccaggttctggaagcctccaacaaggactggtggtggggccgcagtgaagataaggaagcctggttccccgcgagcttcgtcagattgcgagtgaatcaggaagagctgtcggaaaactccagcagcacccccagtgaggagcaggacgaggaggccagccagagccgccacagacactgtgagaacaagcagcagatgcggaccaacgtcatccgggagatcatggacaccgagcgggtgtacatcaaacacctcagggacatctgtgagggctatatccgacagtgccgcaagcacacaggaatgttcaccgttgcgcagctagccactatttttggaaacattgaagatatttacaaattccaaagaaagtttctgaaagaccttgagaaacagtacaacaaagaggaacctcacttaagtgaaataggatcttgctttcttcaaaatcaagagggctttgccatctattccgagtactgcaacaaccacccgggcgcctgcctggagctcgccaacctcatgaagcagggcaagtacagacatttctttgaagcctgccgcctgctgcagcagatgattgacatcgccatcgacgggttcctgctcacaccagtgcagaagatctgcaaatacccgctgcagctggccgagctgctcaagtataccacacaggaacacggtgattacagcaacataaaggcagcatatgaggccatgaagaatgtggcctgtctgatcaacgagcgcaagcgcaagctggagagcatcgacaagatagctcgctggcaggtgtctatcgtgggctgggagggactggatatcttagaccgaagctcagaattgattcattctggggagctgaccaaaatcactaagcaaggcaaaagccagcagcggacgttcttcctgtttgaccaccagctggtgtcctgcaagaaggacctgctgcgcagggacatgctgtactacaagggccggctggacatggatgagatggagcttgtggacctgggggatgggcgcgacaaggactgcaacctcagcgtgaaaaatgccttcaagctcgtcagtaggaccacagacgaggtttatttgttttgtgccaaaaaacaagaagacaaggcgaggtggctgcaggcctgtgcagatgaaaggaggcgggtgcaagaggacaaggagatgggaatggaaatttcagaaaaccagaagaaacttgccatgttaaatgctcaaaaggcaggacatggaaagtcaaaagtcaggctacaacaggtgccctgtggccccaccgcaccagggcctgcaccccatccaccagcgccacatcactatgcccacaagcgtcccccagcagcaggtctttggcctggcggaacccaagaggaagtcctcgctcttctggcacaccttcaacaggctcacccccttccggaaatgaaaacaggaggctgtgcttccatggagctgggtgtcaagagaagaaattgagctcttactctcttctgtaatactgggggacctacagctgccgtggggctgaccacggtgttccctggcatcgtctgtgtccacacagatgctaactggtagtgcaaatgtcatcctgcaaggttcctcttcctgcaagcaaagtggagagaaagaagatgcatctgtcaccttcatcagggtcctcagtgcagagcaacttacgcatcctcaagaat

SEQ ID NO: 29744 - DNA, 2106 bp, Homo sapiens
  source 1..2106: mol_type = unassigned DNA
atgggcctcgtggcacgggacgtttcaagtcctggcgtccccgcgagcaagcagcctgatcaggcctcgcagtgggacgttgggaagccggtgttggcagatgctgtggctgggaggagtccagagcttcgccctgtccccgcggggctgagccacaactgcttaggagttttgggcaggatcgatggatgcaggaagcagtaggagtttggagaatgcagtgaataggatctatcatgatcagcttgttccaaagataaacacaagcaagaaaatgtccaccttagcgcacccacctaacatcctggaaatgtcacaagagattaagaaaaactgtggaggtaaacaggtagaaatcacacttgaaagaacaaaaatgacaaagggcatcaaagaaaaacaaagcaatgatttagagaaagcagcctttaaacggaaggcagaaggtgaagaaaagccaactagaaagaaacaggcaaagataacagaacttgacaatcagttaatcaccatgcctctgcctcacatccccttaaagaacataatggatgtggaaatgaagttggtctacattgatgaaatgggtgttcgctatgagtttgtagagtccttcatgtctactgggagtcagccaacatgccaagctgctgaaatagtagaccctttgagtgtacataatttcagctttctgcctcagattgacaaatggcttcaggtagccttaaaggatgccagctcttgctatagacaaaagaaatacgccttggcagcaggacagttcagaacagcacttgagctttgcagcaaaggagcagttctgggagaaccatttgatgcacctgctgaagatatagcaagcgtggcaagtttcattgagacaaagcttgttacctgttatctacggatgaggaaaccagatcttgccctgaatcatgcacacaggagcattgttttaaacccagcctatttccggaatcatcttcgtcaagcaacagtgtttagatgtctggagaggtattcagaggctgcccggagtgccatgattgctgactacatgttctggcttggtggaggaagggaagagagcataagcaagctcatcaaactgtattggcaggccatgattgaggaagccatcaccagagctgaatctttctcggttatgtacacaccatttgcgacaaaaataagagctgataaaatagaaaaagtaaaagatgctttcacaaaaactcatcctgcatatgcagagtatatgtacacagatcttcaagcactccacatgttgcctcagacagttgactggtcatcttttcctccccaacaatatctcttgactcttgggttcaaaaacaaagatgatggaaaatttttggaaaaaatatcaagcaggaagctgccgatattcacagagcataaaacacctttcggtctgaccagagaagatacagtgaggcaaatggagacaatggggaagcgaatcttgccaatattggattttattagaagcacccaattgaatgggagttttcctgcatcctcaggtgtgatggagaagttgcaatatgccagcctcctcagccagctgcagagagtaaaggagcagtcccaggtgattaatcaagcaatggcagagctagcaaccattccctacctacaggacatcagtcaacaggaggcagaattgctgcagtcactaatggcagatgctatggacacccttgaaggaagaagaaacaataatgaacgtgtgtggaatatgatccaaaaggttggacaaattgaagattttctataccaattagaggacagtttcttaaaaactaaaaaactgagaactgctcgaaggcaaaaaacaaaaatgaagcgacttcaaactgttcagcaaaggtagtcattagggagcaggcactaccactaagatatcccagaagaagaggcaagggcatccactccaatgcccacctagtactgtgaagctggataacaaaagcttgtcaccaaaagaaagaggtggtattcccctcagttcatctttaccaaagacactctatgtttcattaatctcaactggcagcaataaatattctcagcaagtttgacttg

SEQ ID NO: 29745 - DNA, 5818 bp, Homo sapiens
  source 1..5818: mol_type = unassigned DNA
cagttaccatggagaccggtagtaacaccagttgtaaacccaaggccaagagaccatggccacgttagcccggctgcaagctaggtcgtcgactgtaggaaatcagtactactttaggaacagtgttgtagatccatttagaaaaaaggagaatgatgcagcagttaaaatccaaagctggtttcgaggatgtcaagttcgggcatatatcaggcatttaaacaggattgtaacaattattcaaaaatggtggagaagtttcttaggcagaaagcaatatcaactaactgtgcaggtagcatattatactatgatgatgaatctctacaatgcaatggctgtcaggattcagagacgatggcgaggctatagggttcggaagtacctctttaattattattatttgaaagagtacctgaaagtcgtttcagagaccaatgatgcaattaggaaggcactggaggagtttgcagaaatgaaagaaagagaagagaagaaggctaacctcgaaagggaagagaagaaaagagattaccaagcccgaaagatgcattacctcctcagcacaaagcagattccaggaatatacaattcacccttcagaaaagagcctgatccatgggagctgcaattacagaaggcaaagcctttaacacaccgaagacctaaagttaagcagaaggactccaccagccttactgattggctagcttgtacaagcgcccgttcttttcctcggtctgaaattctaccacctattaatagaaagcaatgtcaggggcccttccgagatatcaccgaagtattagaacaacgctacaggcctttggagccaacgttgcgggtggcagaaccaatcgatgagttaaagttggccagagaggagctcagaagagaggaatggctgcaaaatgtaaatgacaatatgtttttgccattttcttcataccataaaaatgaaaagtacatcccatcaatgcatttatcaagcaagtatggtcctatttcttacaaagaacaattccgaagtgaaaatcctaagaaatggatctgtgacaaggatttccagactgtattaccatcatttgagctcttctcaaagtatggaaaattatattcaaaagctggacagattgtataaaggcgtcagaagaagaaactgaagccatctgcattttaaaacttaacagttctgaaaggaaaacacagatgaagatcctgtaggaaatatacttgctatgattcaataaactataaaattttgtagctctagtcatgaattaattattgtgtgtatgtatttgaaatctcttagacatatcttttcaaacaaatacttaaacttgagtctgttacctctgagaatgtctgtcacaatcacagcccctggtgaccaacagtgccataaatggttcccctgaaatacccatattctgaccccatcacccgggtcacaaatgatgacaccagtgctgggtacccaaattaagggcgactaacatgtaagtaggatgatgaatggtttgaagtgtaaattgtgtgaaatagttcagcatgaaagctctgccctgagaaataatgactgattataccagttagaaacccttcagactgttgaacttgagacacacagacacaacagacacagactagtgggtgtgggagcagaagcataggcactctcaaatagagaagacatttgcaagtctctgctgccaagggagcaaagagataatctcgatgccagggctgtgtcagatcctgcatggctctgaactacagttggtttccaaaaagctgggcttttgtgaggtttctgttttttatgcgatgcttagattttcctggaatccttggaagttaactcaacatttgaggttcctatatcctttaatcccatcccatgtgtatctttacaataaaacttcctgctagaggtatcctgagggaatctttgtttcttgcatctgaagagaataacactaaacttattgcatatgatttgggggttggatccaatgatagcacagagggacaggaaatgtgatttattgaccataaaagctttaatttaaaattgctggccagcgaaatccagactctgggaaatgttataggccaaatgatctgtttcttcaacaaataaattacaaaactgaggggaaaaaaaggaacctattaaaaagacattatctatcaatcactgtgtgtgtacagttttgagctcctgatttaaataaacaaattgtaaaataaaagatcttttgaaacaattggaagtttgaacactgattggatattggtggtataaaagaattattggttttttttaggtgtcatggtattgttttggtttacaaagttatagatataaatgttgaaatatttacagatgcagtgatatgttggctgggatttaatttgaaagtcaaagaagtgagttaaaatacatatactcctcctcttataatcggttatgtgccaataaatccattgtaaattgaaaatatcctaagttgaaaatattgtaagttaaaaatgcatttaatacagctaacttaccagacagcttagcttagcctcacctaccttaaatatgctcagaacacatacgttagcctatagttgggcaaaatcatctaacacaaagcctattttataatattgaacagcccatgtaatttattgaatattgtactaaaagtgaaaaactgaatagttgtatgcatactcaaagtatggtttctactgaatgcattgtaaaccagaaagtatctgagacaatgttttttttttttttttttttttttttaatttctgagacagagtctcattctgtcacccaggttggagtgcagtggcatgaactcagctcactgcaaccttcacctcccaggctcaagcagtcctcccatctcagcctcccaagtagctgggaccacaggcatgggccaacaagcctggctaaatattttgtacttttggtagacacgggtttttaccatgttgtgcaggctggtcttgaacgcctgagctcaagtgatctgcctgcctcggcctcccaaagtactgggattacaggcatgagtcactgaacccagccctgagacatgtctcaattagtttagaagtttatttggccaaggttaaggacatgcccttgacactgcacctgtcagtacaggtcctgacaacatgtgtccaaggtggtcaagctatacaacttggttttatacattttaaggagacataagacatcaataaatacatggaagatgtacattggttcagtctggaaaggcaggatgcctcaaacttgaaacaagagaatggggggtgggaggatgtgggagatgcttccaggtcatagttggagtcaaagactttccaattggcaattggttcaaagaatttatctaaagacctggaatccatagaaggctttacctggattaaaataaggggaccaaggttctcatgcagatgaagcctccaggtggcagacttcagagagcatagattgtaaatgtttcttatctgacttaaaaaggtgtcagactcttagtaaattatctcctggatcagtgaaaagatgtgaaaaaaggttctctacagaatgtagattttccccataagagatagcttcgcagggccattgcaaaatatgtcaaaaatatatattttagggtaaaatgcctcaatttatttcaaggcctgatatttgtcatgtgatgctatactacagtcaggctgaaacttggcatcttattgctatgaaaaatcttaagatctctattttaatgttaatgctggtcactggtgcctgaattccaaagggaggagggtataatgaagcatgtccaattccccatgccccacccccacccccacatcctataatggcctgaactagtttttcaggttaactttggaatacccttggccaagaagaggggtccatgcagatgtttggaggggggggtcttaaagctttatttttagattacagcatattgcttttgcactatcataaagtaaaaacatcataagtcaagccaccataaatagcggaccatctgtatatctgaaagaagatgaaccaagacttggttattgttaaagctgatgattggctgtatgaagatttactatacaattttgtgtacttttgtaagttcttggttgtttctaaacttataacaaaataaataattggccatcttcattggattgtgaagccatttcctcccacatgttcgtaaaaatggtagccatggcccctgactgaacccaggtatgaatggccttcattgattttgtagaccctgaccttctctgttcttccagagaaggtggtactcagataaaaactttgaagcattttattgttcagaatatgactttgatcttctcataagactcaagtttttgaatgcttaaggctctttatcgctagtgtatgtaagtaatatcattgtccttaaccaccatctgcctctccccccagacacacataagtttatgataactacagaggtgtccagatgagtaaaaactgcctttgcattaaggtgagagaagaccgagatgaaatcttattagaaaatataactggggaaagcagtttgtctgtttctcctggaaaactactagactacatcaacttatatactacttcttttctatattctcaatatgagccacttaagaaaattaatgagactttatgtttgaccaaagctggtaattccttgatcttattctccaaacttgattctgaatgactactgaccactaaaaacactaagagtaccactgtggatgtttaaaaacatacaccctaagagccttcagaattagacgcttcaattcttctgaaatcaaaagtcacaccagctttgctgtagttaatcaggtaatacctttcttctccactactctctaatttccttgagggcaaatattgtctttcttgataaatgccctggacccaacatctaacagaatacctggcataaagtgaaatccatcgaatgtgctaatgataaataaagaagttcaaaaaaatcttttaatagaagctataaaatagcagataagctaagtcattctcataaaacaccatttgtcatttgaatgcgtgcattgtggcctgttacttttaactagtctcactaatttatagttatatatgatgtagatctagattgtgatgtacactaagtgggttgatcctgagatcaagctatgattgctgcttgcgtaaagtgttccttttgggaaataaataatctttcatatctgtaaactttggtataattggttatttatgcaatgtattgttgtggttgtcaactcaagattgtattctcatctggggacattatgaatcttgttattttatccccttttttgctctgttttttcacatttatggcctacctgttacagctgcacggtatccattttctgtgctaaattcatctttaatttattattttttttcaacctcagcttttaactttgccctgattttctcttccattttattttcacttccattttaagctggctcaaagccttttaggaacaataagttactgaattatatgaacctatttgaggtaatgatgatgcctgggaaggagcagtattgctggatcagaattcactttttccaagttacagattttaataaaccactgtgcaaagcattaggataaatttttattgaaaattgagtgaatgactgaacaaatcgctgggtaatgctgtttaggttgttctattttccacggattaaattaaattctatgta

SEQ ID NO: 29746 - DNA, 4396 bp, Homo sapiens
  source 1..4396: mol_type = unassigned DNA
acccagggcggggcggcgcgggcgttgccacgacgcgggccgcgcgcgtccctggcagccaacccgtccacgtcaaggtttgtttaataatcgccagggtatctatggccgggctcaggcggctgctggggagccaggagaccgcgcgggacggcggatgaggcgcggcggctgcggcccagggcacctcccctctggcttcccgaacccggccaggtccgacccgagggggaggatggaaacacctgccgcgctctgagccccccagaagagaacacccttcccgccatatcaccccacggtcctgcggaggccaccgcctggtccccccaagtctccatcgcgcagcgtggggccgagaggaatagtgagcgatggcggaaaacctgaaaagactggtctcaaacgaaactttacgaacgttgcaggaaaagctagacttctggctgaaggagtacaacacaaacacgtgtgatcaaaatctaaaccattgccttgaactcattgagcaagttgccaaggtgcagggacaactctttgggatcctcacagcagcagcccaagaaggaggacgtaatgatggtgtggaaacaatcaagtcacgccttttgccttggctggaggcttcctttactgctgcttccctgggaaaatctgttgacagcaaggtcccctctctgcaggacacgtttgatagggagagacataaagatcccagtcctcgggatcgggatatgcaacagttagactctaatttgaactcaacccggagtcaatgcaaccaggttcaagacgatctggttgaaactgaaaagaatcttgaagaaagcaagaacagatcggccatatcccttttggctgcagaggaggaaataaatcagctgaaaaagcagcttaaatctcttcaagctcaggaggatgcccgccacagaaacacagatcagaggagctcagagaataggcggtcagagccttggagcttggaggagcggaagcgtgagcagtggaactcactcaagcagaatgcagaccagcaggacacagaagccatgtccgattataagaaacagctccgaaacctgaaggaggagatagctgttctgtctgctgagaaaagtgcactccaaggaaggtcctccaggagccggtctcccagccctgcccctcgcagccgtagctgcagccgcagcagatctgccagcccctccaccgctgtcaaggtcaggagaccgtccccaaaccgctccaagctgtccaatgtggcgcgcaaggctgccctcttgtcccggttcagcgattcctattcccaggcccgcctggacgcgcagtgcctgctgcggcgctgcatcgacaaggctgagaccgttcagcggatcatctacatcgccacagtggaggcattccatgtagcaaaaatggcattcagacacttcaagatccatgtgagaaaatcgttgacaccatcttatgtggggtcgaatgactttgagaatgctgtcttggattatgtcatttgtcatcttgatctatatgattctcaaagcagtgtcaatgatgtgatccgagccatgaatgtcaatcccaagatttcattccctcctgtcgttgacttttgccttctcagtgacttcatccaggagatatgttgcattgcctttgcaatgcaggccttagaaccacccctagatattgcatatggagcagatggagaagtttttaatgattgcaaataccgccgcagctacgactcggatttcactgctcccttagtcctctatcacgtgtggcctgctctcatggagaatgactgtgtcattatgaagggagaagctgtcaccaggagaggggctttttggaattcggtgcgatctgtaagtcgttgtcgaagcaggagtttaagtcccatttgcccccgtagccaaattggtttaaacacgatgtctcgaagtcggagtccttctccaataagatgtggattgccaagattttaaaagcaccagacctgctcctttgacccagtgcgtggaaacagctgctttctccagtgccgccatctgtcttctgtgtctgcctcagacctcacttaagataatgtcaaaaggcaattctgtgtatcaccccacacagagagttaaatgttttggcttggcgcatttgtaactttagatatattgcattctattttattttatagatactaattccattaatttcataaaaatgattgtataggcatttaggatcatattcattcgaagcaaagtccgttacaaaggttcaagatttccatctcaaaacactacgctcttttatgggaactgtgtgaactgaagtggaaagcatctaccatgctgaggctaaaagaaaagatgaatcattttagtttgcagatggatcgtaaatataattgttggtatcagctttagctcaaaaccaatattaggtgttttaatttccttttaaggtttggaagacagccctaatctcaggttggggagctcatgttagtagcagtgacttaaggctaagtgtagaagataatttaagatacattttctttatatattagccaacaaattatatttattggttggcttgcttttccgttctgattttgagagtgcccagtttggtttagttgaccaatgaatgtcaaagctacttagttgagagaatttccttgttcataaatgtagagcagtgatttgattagaagccagctttgagataaatgttaattacctcatgcatatctcctgggaatatttcaaactgttttaatgcatgtgttatatataaaagtttcttgggacatgctcttcacctgttctacctagttatttgcaaattcagacctcctattgaactctgtctgaccaaaactacttaaactcaaggcccaaaactaggggcaccatttactgattttaaattgagtatatatcccttgacttcttcactgtcaaatacttttgaaacttcacgttcaagataagaatggaatgttgctttcttgcaataagtaatgttctttctgcctttttttcacttttaagtcagccttaaacacatgcctcacaaacatctactttctccacatacctttgagagagacactgaattggcctcagctcagttttgcataagcttagtgccagaaccagcacctgatgcttttcaggtgaaaataaaacaaacagcttctctaaagcatcttacccctgtgctggaggtttgagggacctcttcagtgcctgccccttgagtctaatggtcaccacctcattctgaagtatgagttgaattttttgccctctttgcatatttacattagtcatcactttgaagcaatgcagtgtgctggaaggagcactatctgcctaggtaactgctagtcatgacttggtcatcagcttgctttgtggcactgagcaagttacttcacttctctgagccttggttttatcatagggtgaggaggttggatacaattagtgcccctcttaaccctgcagactcaatgttcccttttataacaagtattttattctgaatatgaaatgaaaattaaagttaatataatcatctatgtgcatgtataattttaagcagtgaacatagtaccctaactataatataaagcagaaaaaaaggcaacttttaataaaataaaatgtatttcaataaaaaagcttgggtataaccaccctagaagataaaattaagtcattagatggctgaacctgcatgtagagccaccagctacaaatgaaaatcaatgtgtgtattggcaacagaaaatcacggtgttgtcattggatgtgactttctgaagtggtgggcaattcttgttaatgttttaaacaaaaaaaaaaaaaccttacagtcttgccctgatttacacagcagtcacattcctggaaaattcaagtgtttattaaaactatgcaacagttactgtgtgttatacgttgaaaggtcttcactaatatctcactaagtaatgagaatgcctacatatcagaattttttttttcaggagccaagcacatatactgatttggaaaaaggcacaggtagctcagtttatttgctttctaccctgcctggccacttgctgtttcttcagtttctaatttgagctgtaactacacaaggaaagctaaatagtctggaaaatttttggaaagaatccacaaagccaaaggagactggcctatactcattttatctggggatgtaccttacccttagagactttgaaaaatgtgaagctcttattttgtaacctgggtaaatgttagtttctagattttcggcttaacatctaataataacatttaaaaagtgcttttgtaactattagttatttgcaataaaatgctttccttctaca

SEQ ID NO: 29747 - DNA, 861 bp, Homo sapiens
  source 1..861: mol_type = unassigned DNA
aggcagcttcaatggaaggagggagccaagaagggggcctggtatacattcaaagatgataattacgacatggattgtgtatattcttgctcggaaaggtgtagggcttcccttcctaccaataaccagttcggacattgacgttgtggaaagtgaggctgtgtctgtactacatcattggttgaaaaaaacagaagaagaggcttctcggggcataaaggaaaagctgtccatcaaccacccttcccagggtgtaagggagaagatgtccactgactcccctcccacccatggccaggacatccacgtgaccagagatgtggtgaagcaccacctctctaagtctgatttgttggcaaaccagagccaagaggtcctagaggagagaacacgaatccagttcataagatggagccacactcgtatcttccaagtgccaagtgagatgacagaggacatcatgcgagatcgaatagagcaggtgagacgaagcatatcccgtcttacagatgtctcagctcaggacttcagtatgagaccctcctcctcagactgctgagagcaacagatggagctttgggaacgcggagaacagtggggttacagggagtcatcatcagccctaccccttggccaaccacatctccctgctgtgtcccctgggcatttctctacctcccaggtggaagtccttcagggtccagcagcaacctgtatcagaagaacatccttctctgcttgacctgaagaagggccagacctgggcagaaagactccagcaggtgagctcttcatgcgacagtgtcagcactggagtcttcttgctgaactgcgaataaagagatgtgctgtttaacaacc

SEQ ID NO: 29748 - DNA, 653 bp, Homo sapiens
  source 1..653: mol_type = unassigned DNA
ctcccttcaatgaccttcctgtcccataggagttctcaggcagcttcaatggaaggagggagccaagaagggggcctggtatacattcaaagatgataattacgacatggattgtgtatattcttgctcggaaaggtgtagggcttcccttcctaccaataaccagttcggacattgacgttgtggaaagtgaggctgtgtctgtactacatcattggttgaaaaaaacagaagaagaggcttctcggggcataaaggaaaagctgtccatcaaccacccttcccagggtgtaagggagaagatgtccactgactcccctcccacccatggccaggacatccacgtgaccagagatgtggtgaagcaccacctctctaagtctgatttgttggcaaaccagagccaagaggtcctagaggagagaacacgaatccagttcataagatggagccacactcgtatcttccaagtgccaagtgagatgacagaggacatcatgcgagatcgaatagagcaggtgagacgaagcatatcccgtcttacagatgtctcagctcaggacttcagtatgagaccctcctcctcagactgctgagagcaacaggtggaagtccttcagggtccagcagcaacctgtatcagaagaacatcc

SEQ ID NO: 29749 - DNA, 4022 bp, Homo sapiens
  source 1..4022: mol_type = unassigned DNA
cccgggtactggtctcagtacccctgcagccggccggagaggctagagcccgacggggcccggctccggcggcagccgcgcctctcgcttgcttccctcggccgggccgtcctcggcggcagtgtcaggagcactccgctggtccaggcggcaacatgtccatgcttttagtgatgtccctgcctctaatccagaagccatggaggagataaggtagcccccctcgatcggatggggaagcccagttcaatggatactaaattcaaggatgacttatttcggaagtacgtgcagttccatgagagcaaagtggataccaccaccagcaggcagcggcctggcagcgatgagtgcctgcgggtggcagcctcaaccctgctcagcctgcacaaggtggatcccttttatcgattccggctgatccagttctatgaggtggtggagagctccttgcgctcgctcagctcctctagcctgcgggctctgcacggcgccttcagcatgctggagacggtgggcatcaacctcttcctctacccgtggaagaaggaattcagaagcatcaagacctacacgggcccttttgtttattatgtcaagtcgacattactggaagaggacatccgagccatcctgagctgcatgggctacacacctgagctgggcactgcatacaagctcagagagctcgtggagaccctccaggtgaagatggtctcctttgagctctttctggccaaagtcgagtgtgagcagatgctagaaatccactcacaagtgaaggacaagggctactccgagctggacattgtgagcgagcgcaagagcagtgcagaggatgtgcgcggctgctcggacgccctgcggcggcgggcagagggccgggagcacctgacggcctccatgtcacgagtggcactccagaagtcggccagcgagcgggcggccaaggactactacaagccccgcgtgaccaagccctcgaggtcagtggatgcctatgacagctactgggagagccggaagccacccctgaaggcctcattgagtcttcggaaggagcctgtggcaacggatgtgggggacgacctcaaggatgagatcatccgcccatccccttcgctgctgaccatggccagctccccccacggcagcccggatgtgcttccacccgcctcccccagcaacggcccggccctgctgcgcggtacctacttctccactcaggatgacgtggatctgtacacagactctgaacccagggccacctaccgtcggcaggatgctctgcggccggatgtgtggctgctcagaaacgatgcccactccctctaccacaagcgctcgccccctgccaaagagtccgccctctccaagtgccaaagctgcgggctgtcctgcagctcctccctctgccagcgctgtgacagcctgctcacctgtcctccagcttccaagcccagcgccttccccagcaaggcctcgactcatgacagcctggcccacggggcatctctgcgggagaagtacccaggccagactcagggcctcgaccgcctcccgcaccttcactccaaatccaagccctccaccacgcccacttcccgctgtggcttctgcaaccgcccaggcgccaccaacacctgcacccagtgttcaaaagtctcatgtgacgcctgcctcagcgcttaccattatgacccctgctacaaaaagagtgagctgcacaagttcatgcccaacaaccagctgaactacaagtccacccagctctcccatctcgtgtacagatagaccggcctcgccccttccagctccaagggctacatcaaccgacctttcgggtttcacggtgaagaagtactaacgcattgatctcagaggcggaggcctgcacttgaccatgtaggtggcagagatcgtgggctggctgtgtccacgtgggagttcacttagcgactcagatatctcaaccaatggctgctttgttgtctgacaagggagaaggtggcacttccgttcagattcattttgctaatctctccactccctgttcagttggttctttttttggggttttgttttgttttgttttgttgttttgttttttcctttaaagaggatttctgtctctgggaccctcgctgcacctacccctcccattgcaaagccaacttggactgggaagggcccttcaggtcaccaaacatccacctggagcggcgagctagaggcctgttggcttgtgaaatgagccctcctgccacacggggcctctcccaaaggctcatcccttggccgcccccttcctaaacacaaggatccccagctggactccccaccccctggcttccccacctctccaggtgtcaaaggtgaaccgagtccagtattagctgaatgtcatttcgtacaccacagctcagtcagcccatggccttcgtgaactttgctccaacacactgatgtgtgggcttcccacagcaggactgacttccccctttctgttgtttgcacatgcccctcttactgtactgtcaatagatatttttgagatttatttttaaataaatattcaacttgctgtgtgtttcaacgtggttaaaaaaatgaattatgtagctatttattaaatgccctgggttctttagtcttccaagggagggcctcgcgcccattcgtgttgtatcctccactcactatggcccgaggggagaggagagtttggggcagggaggaacagacatgaagcctccttttcttgagctggtggagagccactgtcttccctgcagtaactatctatacacctacctccagtgtgcacttagggggtgagcgcgggtgtcgaggtctgtgtgtctgcagactgctaacctatgacaattcagggacctcacctgtcggacctatagcttgctgagcaggaaccttgcacttcacacttcttgagtctcgtttcagaaggaaaatcatttgggattcctactgcccctccatctcaatcctcttctcttcaccagtttccaggactcatctgcaacatttgcaatctttttgcactaaaagtgggcaggagtcggcatgtgcccatcagagagacggctcctcagatgctcagctaagcctaagcgcttccaagcctgaaggccccttcagcttctcatgtgaattaccaacccctggattttccttgtgggggtacaagagcaggagtggggcaagagtttgaaaataaagccgcttccttgtgaactaactatattttagccataactgtttgtgatgtacacaatgttaagggatttatatgcagtgggcttttctgggagaaagttattcagctcttgagcaagtttaagtctggctgaatcctgaggccactgtgaatttgctgatgttcttccaactcagttgagtgattttaaggttttccaaatcttctatggctctctttttaatatatatatatatatatatatatatatatatatatatatatatatatatctatctggtagatcacatgtagatgtacagtgtgtatattaagctgaatttcaaccaactttattactaagaccagcctagcagggcattcatctttgatgttcttccttttcacatttcagaatcggcaatgcctggcccactcctgagagctctagttttctagttttccatttccagattgcgccagcattacagtaactaactctttctaaccaaccgtgatgccacgtaacttaccctatggacaaaagcaggaatgactaacacatcctaggagggaaagtccagtgtacctgtcatcacggacgcactgtggtcacagactggaatacgaaatactacagccctgctcccaggtgtgcatcttactggatgaggttgctgtgattgagatagttaaatacatgctaatttaaaaatgcagatgttttacatttgatttctaccaagagttgaaatgttgagagatgattaaaaataataataataaagtgtcttccattgttaaa

SEQ ID NO: 29750 - DNA, 4138 bp, Homo sapiens
  source 1..4138: mol_type = unassigned DNA
gagcttacatcatatagagattagctctcctagccccattcggtgtgggaagatgggaattttgctactacaggaatttttgtaactcaactctgctcgcgccgccataaggcattctaacttagccaaacactttcgagtagagctgtccagcagatgcagcaggatggctttgcaagagtcggagttttggcgttagacctaggttcagagctcagatccacttcttcctagccttacgacttaggagcactccgctggtccaggcggcaacatgtccatgcttttagtgatgtccctgcctctaatccagaagccatggaggagataaggtagcccccctcgatcggatggggaagcccagttcaatggatactaaattcaaggatgacttatttcggaagtacgtgcagttccatgagagcaaagtggataccaccaccagcaggcagcggcctggcagcgatgagtgcctgcgggtggcagcctcaaccctgctcagcctgcacaaggtggatcccttttatcgattccggctgatccagttctatgaggtggtggagagctccttgcgctcgctcagctcctctagcctgcgggctctgcacggcgccttcagcatgctggagacggtgggcatcaacctcttcctctacccgtggaagaaggaattcagaagcatcaagacctacacgggcccttttgtttattatgtcaagtcgacattactggaagaggacatccgagccatcctgagctgcatgggctacacacctgagctgggcactgcatacaagctcagagagctcgtggagaccctccaggtgaagatggtctcctttgagctctttctggccaaagtcgagtgtgagcagatgctagaaatccactcacaagtgaaggacaagggctactccgagctggacattgtgagcgagcgcaagagcagtgcagaggatgtgcgcggctgctcggacgccctgcggcggcgggcagagggccgggagcacctgacggcctccatgtcacgagtggcactccagaagtcggccagcgagcgggcggccaaggactactacaagccccgcgtgaccaagccctcgaggtcagtggatgcctatgacagctactgggagagccggaagccacccctgaaggcctcattgagtcttcggaaggagcctgtggcaacggatgtgggggacgacctcaaggatgagatcatccgcccatccccttcgctgctgaccatggccagctccccccacggcagcccggatgtgcttccacccgcctcccccagcaacggcccggccctgctgcgcggtacctacttctccactcaggatgacgtggatctgtacacagactctgaacccagggccacctaccgtcggcaggatgctctgcggccggatgtgtggctgctcagaaacgatgcccactccctctaccacaagcgctcgccccctgccaaagagtccgccctctccaagtgccaaagctgcgggctgtcctgcagctcctccctctgccagcgctgtgacagcctgctcacctgtcctccagcttccaagcccagcgccttccccagcaaggcctcgactcatgacagcctggcccacggggcatctctgcgggagaagtacccaggccagactcagggcctcgaccgcctcccgcaccttcactccaaatccaagccctccaccacgcccacttcccgctgtggcttctgcaaccgcccaggcgccaccaacacctgcacccagtgttcaaaagtctcatgtgacgcctgcctcagcgcttaccattatgacccctgctacaaaaagagtgagctgcacaagttcatgcccaacaaccagctgaactacaagtccacccagctctcccatctcgtgtacagatagaccggcctcgccccttccagctccaagggctacatcaaccgacctttcgggtttcacggtgaagaagtactaacgcattgatctcagaggcggaggcctgcacttgaccatgtaggtggcagagatcgtgggctggctgtgtccacgtgggagttcacttagcgactcagatatctcaaccaatggctgctttgttgtctgacaagggagaaggtggcacttccgttcagattcattttgctaatctctccactccctgttcagttggttctttttttggggttttgttttgttttgttttgttgttttgttttttcctttaaagaggatttctgtctctgggaccctcgctgcacctacccctcccattgcaaagccaacttggactgggaagggcccttcaggtcaccaaacatccacctggagcggcgagctagaggcctgttggcttgtgaaatgagccctcctgccacacggggcctctcccaaaggctcatcccttggccgcccccttcctaaacacaaggatccccagctggactccccaccccctggcttccccacctctccaggtgtcaaaggtgaaccgagtccagtattagctgaatgtcatttcgtacaccacagctcagtcagcccatggccttcgtgaactttgctccaacacactgatgtgtgggcttcccacagcaggactgacttccccctttctgttgtttgcacatgcccctcttactgtactgtcaatagatatttttgagatttatttttaaataaatattcaacttgctgtgtgtttcaacgtggttaaaaaaatgaattatgtagctatttattaaatgccctgggttctttagtcttccaagggagggcctcgcgcccattcgtgttgtatcctccactcactatggcccgaggggagaggagagtttggggcagggaggaacagacatgaagcctccttttcttgagctggtggagagccactgtcttccctgcagtaactatctatacacctacctccagtgtgcacttagggggtgagcgcgggtgtcgaggtctgtgtgtctgcagactgctaacctatgacaattcagggacctcacctgtcggacctatagcttgctgagcaggaaccttgcacttcacacttcttgagtctcgtttcagaaggaaaatcatttgggattcctactgcccctccatctcaatcctcttctcttcaccagtttccaggactcatctgcaacatttgcaatctttttgcactaaaagtgggcaggagtcggcatgtgcccatcagagagacggctcctcagatgctcagctaagcctaagcgcttccaagcctgaaggccccttcagcttctcatgtgaattaccaacccctggattttccttgtgggggtacaagagcaggagtggggcaagagtttgaaaataaagccgcttccttgtgaactaactatattttagccataactgtttgtgatgtacacaatgttaagggatttatatgcagtgggcttttctgggagaaagttattcagctcttgagcaagtttaagtctggctgaatcctgaggccactgtgaatttgctgatgttcttccaactcagttgagtgattttaaggttttccaaatcttctatggctctctttttaatatatatatatatatatatatatatatatatatatatatatatatatatctatctggtagatcacatgtagatgtacagtgtgtatattaagctgaatttcaaccaactttattactaagaccagcctagcagggcattcatctttgatgttcttccttttcacatttcagaatcggcaatgcctggcccactcctgagagctctagttttctagttttccatttccagattgcgccagcattacagtaactaactctttctaaccaaccgtgatgccacgtaacttaccctatggacaaaagcaggaatgactaacacatcctaggagggaaagtccagtgtacctgtcatcacggacgcactgtggtcacagactggaatacgaaatactacagccctgctcccaggtgtgcatcttactggatgaggttgctgtgattgagatagttaaatacatgctaatttaaaaatgcagatgttttacatttgatttctaccaagagttgaaatgttgagagatgattaaaaataataataataaagtgtcttccattgtt

SEQ ID NO: 29751 - DNA, 1669 bp, Homo sapiens
  source 1..1669: mol_type = unassigned DNA
tttccgggccgagtgtttccgggtcgctgctggcccccgggtactggtctcagtacccctgcagccggccggagaggctagagcccgacggggcccggctccggcggcagccgcgcctctcgcttgcttccctcggccgggccgtcctcggcggcagtgtcaggacctacacgggcccttttgtttattatgtcaagtcgacattactggaagaggacatccgagccatcctgagctgcatgggctacacacctgagctgggcactgcatacaagctcagagagctcgtggagaccctccaggtgaagatggtctcctttgagctctttctggccaaagtcgagtgtgagcagatgctagaaatccactcacaagtgaaggacaagggctactccgagctggacattgtgagcgagcgcaagagcagtgcagaggatgtgcgcggctgctcggacgccctgcggcggcgggcagagggccgggagcacctgacggcctccatgtcacgagtggcactccagaagtcggccagcgagcgggcggccaaggactactacaagccccgcgtgaccaagccctcgaggtcagtggatgcctatgacagctactgggagagccggaagccacccctgaaggcctcattgagtcttcggaaggagcctgtggcaacggatgtgggggacgacctcaaggatgagatcatccgcccatccccttcgctgctgaccatggccagctccccccacggcagcccggatgtgcttccacccgcctcccccagcaacggcccggccctgctgcgcggtacctacttctccactcaggatgacgtggatctgtacacagactctgaacccagggccacctaccgtcggcaggatgctctgcggccggatgtgtggctgctcagaaacgatgcccactccctctaccacaagcgctcgccccctgccaaagagtccgccctctccaagtgccaaagctgcgggctgtcctgcagctcctccctctgccagcgctgtgacagcctgctcacctgtcctccagcttccaagcccagcgccttccccagcaaggcctcgactcatgacagcctggcccacggggcatctctgcgggagaagtacccaggccagactcagggcctcgaccgcctcccgcaccttcactccaaatccaagccctccaccacgcccacttcccgctgtggcttctgcaaccgcccaggcgccaccaacacctgcacccagtgttcaaaagtctcatgtgacgcctgcctcagcgcttaccattatgacccctgctacaaaaagagtgagctgcacaagttcatgcccaacaaccagctgaactacaagtccacccagctctcccatctcgtgtacagatagaccggcctcgccccttccagctccaagggctacatcaaccgacctttcgggtttcacggtgaagaagtactaacgcattgatctcagaggcggaggcctgcacttgaccatgtaggtggcagagatcgtgggctggctgtgtccacgtgggagttcacttagcgactcagatatctcaaccaatggctgctttgttgtctgacaagggagaaggtggcacttccgttcagattcattttgctaatctctccactccctgttcagttggttcttttttt

SEQ ID NO: 29752 - DNA, 2719 bp, Homo sapiens
  source 1..2719: mol_type = unassigned DNA
acactgtcccaagtcccggcgaagacccgcccgcggctccgtaggtgcccggcccgcccctcgcagcctcctgacttcccttcctgtcctcagcggccgggcccacggccccgagcagccatgctgggcgcgcgggcctggttgggccgcgtccttctgctgccccgcgccggtgcaggcctcgccgcgagccgcaggtgtcctggagtctggcccaggacctggccccacaggagtcccagcaggggtagctcctcccgggacaaggaccgaagtgcgacggtcagtagttcagtgcccatgcctgctggagggaaaggaagccatccttcatctacaccccagagggtccccaaccgcctgatccacgagaagtcaccatacctcctacaacatgcctacaatcctgtggactggtacccctggggacaggaagccttcgacaaggccaggaaggaaaacaagccgattttcctctcagtcgggtactccacctgccactggtgccacatgatggaagaggagtccttccagaatgaggagattggccgcctgctcagtgaggactttgtgagtgtgaaggtagaccgtgaggagcggcctgacgtggacaaggtgtacatgacgttcgtgcaggccaccagcagcggcgggggctggcccatgaatgtgtggctgactcccaacctccagccctttgtcgggggcacctatttccctcctgaggatggcttgacccgagtcggcttccgcacagtgttgctgagaatacgagaacagtggaaacagaacaagaacaccctgctagaaaatagccagcgtgtcaccactgccctgctggcccgatcagagatcagcgtgggtgaccgccagctgccgccctctgccgccaccgtgaacaatcgctgcttccagcagctggatgagggctatgatgaggaatacggtggcttcgctgaggcccccaagtttcccacgccggtgatcctgagcttcctgttctcctactggctcagccatcgactgactcaggatggctctcgggcccagcagatggccttgcataccctgaaaatgatggctaacgggggcatccgggaccatgtggggcagggctttcaccgctactccacagaccgccagtggcacgtccctcactttgagaagatgctctatgaccaggcacagctcgctgtggcctattcgcaggccttccagctctctggtgatgaattctactctgacgtggccaaaggcatcctgcagtacgtggctcggagcctgagccaccggtccggaggcttctatagcgcagaagatgcagactcgcccccagagcggggccagcggcccaaagagggcgcctactatgtgtggacggtcaaagaggttcagcagctcctcccggagcctgtgttgggtgccaccgagccgctgacctcaggccagctcctcatgaagcactacggcctcacagaggctggtaacatcagccccagtcaggaccccaagggggagctgcagggccagaatgtgctgaccgtccggtactcgctggagctgactgctgcccgctttggcttggatgtggaggccgtgcggaccttgctcaattcagggctggagaagctcttccaggcccggaagcatcggcccaagccgcacctggacagcaagatgctggctgcctggaatggcttgatggtgtcaggctatgctgtgactggggctgtcctgggccaagacaggctgatcaactatgccaccaatggtgccaagttcctgaagcggcacatgtttgatgtggccagtggccgcctgatgcggacctgctacaccggccctggggggactgtggagcacagcaacccaccctgctggggcttcctggaggactacgccttcgtggtgcggggcctgctggacctgtatgaggcctcacaggagagtgcgtggctcgagtgggctctgcggctgcaggacacacaggacaagctcttttgggactcccagggtggcggctacttctgcagtgaggctgagctgggggctggcctgcccctgcgtctgaaggacgaccaggatggagcagagcccagcgccaattccgtgtcagcccacaacctgctccggctgcatggcttcacgggccacaaggactggatggacaagtgtgtgtgcctattgaccgccttttccgagcgcatgcgtcgtgtcccggtggcgttgcccgagatggtccgcgccctctcagcccagcagcagaccctcaagcagatcgtgatctgtggagaccgtcaggccaaggacaccaaggccctggtgcagtgcgtccactctgtctacattcctaacaaggtgctgattctggctgatggggacccctcgagcttcctgtcccgccagctgcctttcctgagtaccctccgacggttggaagaccaggccactgcatatgtgtgtgagaatcaagcctgctcagtgcccatcactgatccctgcgaattacgaaaactactacatccatgactgccccaacccccttggggtggggcagaaggtgaagcatcccaactgactagagactcaggccctgcagggccctatagaacctgtggccatccctgagcaccctgccaccaggtgacctcggccatactcactgccccccttgggcacccactcaccctagaataaacttaacagtgtcccgtggtaa

SEQ ID NO: 29753 - DNA, 2634 bp, Homo sapiens
  source 1..2634: mol_type = unassigned DNA
tccgtaggtgcccggcccgcccctcgcagcctcctgacttcccttcctgtcctcagcggccgggcccacggccccgagcagccatgctgggcgcgcgggcctggttgggccgcgtccttctgctgccccgcgccggtgcaggcctcgccgcgagccgcaggggtagctcctcccgggacaaggaccgaagtgcgacggtcagtagttcagtgcccatgcctgctggagggaaaggaagccatccttcatctacaccccagagggtccccaaccgcctgatccacgagaagtcaccatacctcctacaacatgcctacaatcctgtggactggtacccctggggacaggaagccttcgacaaggccaggaaggaaaacaagccgattttcctctcagtcgggtactccacctgccactggtgccacatgatggaagaggagtccttccagaatgaggagattggccgcctgctcagtgaggactttgtgagtgtgaaggtagaccgtgaggagcggcctgacgtggacaaggtgtacatgacgttcgtgcaggccaccagcagcggcgggggctggcccatgaatgtgtggctgactcccaacctccagccctttgtcgggggcacctatttccctcctgaggatggcttgacccgagtcggcttccgcacagtgttgctgagaatacgagaacagtggaaacagaacaagaacaccctgctagaaaatagccagcgtgtcaccactgccctgctggcccgatcagagatcagcgtgggtgaccgccagctgccgccctctgccgccaccgtgaacaatcgctgcttccagcagctggatgagggctatgatgaggaatacggtggcttcgctgaggcccccaagtttcccacgccggtgatcctgagcttcctgttctcctactggctcagccatcgactgactcaggatggctctcgggcccagcagatggccttgcataccctgaaaatgatggctaacgggggcatccgggaccatgtggggcagggctttcaccgctactccacagaccgccagtggcacgtccctcactttgagaagatgctctatgaccaggcacagctcgctgtggcctattcgcaggccttccagctctctggtgatgaattctactctgacgtggccaaaggcatcctgcagtacgtggctcggagcctgagccaccggtccggaggcttctatagcgcagaagatgcagactcgcccccagagcggggccagcggcccaaagagggcgcctactatgtgtggacggtcaaagaggttcagcagctcctcccggagcctgtgttgggtgccaccgagccgctgacctcaggccagctcctcatgaagcactacggcctcacagaggctggtaacatcagccccagtcaggaccccaagggggagctgcagggccagaatgtgctgaccgtccggtactcgctggagctgactgctgcccgctttggcttggatgtggaggccgtgcggaccttgctcaattcagggctggagaagctcttccaggcccggaagcatcggcccaagccgcacctggacagcaagatgctggctgcctggaatggcttgatggtgtcaggctatgctgtgactggggctgtcctgggccaagacaggctgatcaactatgccaccaatggtgccaagttcctgaagcggcacatgtttgatgtggccagtggccgcctgatgcggacctgctacaccggccctggggggactgtggagcacagcaacccaccctgctggggcttcctggaggactacgccttcgtggtgcggggcctgctggacctgtatgaggcctcacaggagagtgcgtggctcgagtgggctctgcggctgcaggacacacaggacaagctcttttgggactcccagggtggcggctacttctgcagtgaggctgagctgggggctggcctgcccctgcgtctgaaggacgaccaggatggagcagagcccagcgccaattccgtgtcagcccacaacctgctccggctgcatggcttcacgggccacaaggactggatggacaagtgtgtgtgcctattgaccgccttttccgagcgcatgcgtcgtgtcccggtggcgttgcccgagatggtccgcgccctctcagcccagcagcagaccctcaagcagatcgtgatctgtggagaccgtcaggccaaggacaccaaggccctggtgcagtgcgtccactctgtctacattcctaacaaggtgctgattctggctgatggggacccctcgagcttcctgtcccgccagctgcctttcctgagtaccctccgacggttggaagaccaggccactgcatatgtgtgtgagaatcaagcctgctcagtgcccatcactgatccctgcgaattacgaaaactactacatccatgactgccccaacccccttggggtggggcagaaggtgaagcatcccaactgactagagactcaggccctgcagggccctatagaacctgtggccatccctgagcaccctgccaccaggtgacctcggccatactcactgccccccttgggcacccactcaccctagaataaacttaacagtgtcccgtggtaa

SEQ ID NO: 29754 - DNA, 2702 bp, Homo sapiens
  source 1..2702: mol_type = unassigned DNA
ctgacttcccttcctgtcctcagcggccgggcccacggccccgagcagccatgctgggcgcgcgggcctggttgggccgcgtccttctgctgccccgcgccggtgcaggcctcgccgcgagccgcaggtctgcctgcagtcccacttccaggctgaactccctgaggtctctgattccctaggtgtcctggagtctggcccaggacctggccccacaggagtcccagcaggggtagctcctcccgggacaaggaccgaagtgcgacggtcagtagttcagtgcccatgcctgctggagggaaaggaagccatccttcatctacaccccagagggtccccaaccgcctgatccacgagaagtcaccatacctcctacaacatgcctacaatcctgtggactggtacccctggggacaggaagccttcgacaaggccaggaaggaaaacaagccgattttcctctcagtcgggtactccacctgccactggtgccacatgatggaagaggagtccttccagaatgaggagattggccgcctgctcagtgaggactttgtgagtgtgaaggtagaccgtgaggagcggcctgacgtggacaaggtgtacatgacgttcgtgcaggccaccagcagcggcgggggctggcccatgaatgtgtggctgactcccaacctccagccctttgtcgggggcacctatttccctcctgaggatggcttgacccgagtcggcttccgcacagtgttgctgagaatacgagaacagtggaaacagaacaagaacaccctgctagaaaatagccagcgtgtcaccactgccctgctggcccgatcagagatcagcgtgggtgaccgccagctgccgccctctgccgccaccgtgaacaatcgctgcttccagcagctggatgagggctatgatgaggaatacggtggcttcgctgaggcccccaagtttcccacgccggtgatcctgagcttcctgttctcctactggctcagccatcgactgactcaggatggctctcgggcccagcagatggccttgcataccctgaaaatgatggctaacgggggcatccgggaccatgtggggcagggctttcaccgctactccacagaccgccagtggcacgtccctcactttgagaagatgctctatgaccaggcacagctcgctgtggcctattcgcaggccttccagctctctggtgatgaattctactctgacgtggccaaaggcatcctgcagtacgtggctcggagcctgagccaccggtccggaggcttctatagcgcagaagatgcagactcgcccccagagcggggccagcggcccaaagagggcgcctactatgtgtggacggtcaaagaggttcagcagctcctcccggagcctgtgttgggtgccaccgagccgctgacctcaggccagctcctcatgaagcactacggcctcacagaggctggtaacatcagccccagtcaggaccccaagggggagctgcagggccagaatgtgctgaccgtccggtactcgctggagctgactgctgcccgctttggcttggatgtggaggccgtgcggaccttgctcaattcagggctggagaagctcttccaggcccggaagcatcggcccaagccgcacctggacagcaagatgctggctgcctggaatggcttgatggtgtcaggctatgctgtgactggggctgtcctgggccaagacaggctgatcaactatgccaccaatggtgccaagttcctgaagcggcacatgtttgatgtggccagtggccgcctgatgcggacctgctacaccggccctggggggactgtggagcacagcaacccaccctgctggggcttcctggaggactacgccttcgtggtgcggggcctgctggacctgtatgaggcctcacaggagagtgcgtggctcgagtgggctctgcggctgcaggacacacaggacaagctcttttgggactcccagggtggcggctacttctgcagtgaggctgagctgggggctggcctgcccctgcgtctgaaggacgaccaggatggagcagagcccagcgccaattccgtgtcagcccacaacctgctccggctgcatggcttcacgggccacaaggactggatggacaagtgtgtgtgcctattgaccgccttttccgagcgcatgcgtcgtgtcccggtggcgttgcccgagatggtccgcgccctctcagcccagcagcagaccctcaagcagatcgtgatctgtggagaccgtcaggccaaggacaccaaggccctggtgcagtgcgtccactctgtctacattcctaacaaggtgctgattctggctgatggggacccctcgagcttcctgtcccgccagctgcctttcctgagtaccctccgacggttggaagaccaggccactgcatatgtgtgtgagaatcaagcctgctcagtgcccatcactgatccctgcgaattacgaaaactactacatccatgactgccccaacccccttggggtggggcagaaggtgaagcatcccaactgactagagactcaggccctgcagggccctatagaacctgtggccatccctgagcaccctgccaccaggtgacctcggccatactcactgccccccttgggcacccactcaccctagaataaacttaacagtgtcccgtggt

SEQ ID NO: 29755 - DNA, 1957 bp, Homo sapiens
  source 1..1957: mol_type = unassigned DNA
ttgctgagaatacgagaacagtggaaacagaacaagaacaccctgctagaaaatagccagcgtgtcaccactgccctgctggcccgatcagagatcagcgtgggtgaccgccagctgccgccctctgccgccaccgtgaacaatcgctgcttccagcagctggatgagggctatgatgaggaatacggtggcttcgctgaggcccccaagtttcccacgccggtgatcctgagcttcctgttctcctactggctcagccatcgactgactcaggatggctctcgggcccagcagatggccttgcataccctgaaaatgatggctaacgggggcatccgggaccatgtggggcagggctttcaccgctactccacagaccgccagtggcacgtccctcactttgagaagatgctctatgaccaggcacagctcgctgtggcctattcgcaggccttccagctctctggtgatgaattctactctgacgtggccaaaggcatcctgcagtacgtggctcggagcctgagccaccggtccggaggcttctatagcgcagaagatgcagactcgcccccagagcggggccagcggcccaaagagggcgcctactatgtgtggacggtcaaagaggttcagcagctcctcccggagcctgtgttgggtgccaccgagccgctgacctcaggccagctcctcatgaagcactacggcctcacagaggctggtaacatcagccccagtcaggaccccaagggggagctgcagggccagaatgtgctgaccgtccggtactcgctggagctgactgctgcccgctttggcttggatgtggaggccgtgcggaccttgctcaattcagggctggagaagctcttccaggcccggaagcatcggcccaagccgcacctggacagcaagatgctggctgcctggaatggcttgatggtgtcaggctatgctgtgactggggctgtcctgggccaagacaggctgatcaactatgccaccaatggtgccaagttcctgaagcggcacatgtttgatgtggccagtggccgcctgatgcggacctgctacaccggccctggggggactgtggagcacagcaacccaccctgctggggcttcctggaggactacgccttcgtggtgcggggcctgctggacctgtatgaggcctcacaggagagtgcgtggctcgagtgggctctgcggctgcaggacacacaggacaagctcttttgggactcccagggtggcggctacttctgcagtgaggctgagctgggggctggcctgcccctgcgtctgaaggacgaccaggatggagcagagcccagcgccaattccgtgtcagcccacaacctgctccggctgcatggcttcacgggccacaaggactggatggacaagtgtgtgtgcctattgaccgccttttccgagcgcatgcgtcgtgtcccggtggcgttgcccgagatggtccgcgccctctcagcccagcagcagaccctcaagcagatcgtgatctgtggagaccgtcaggccaaggacaccaaggccctggtcagtgcgtccactctgtctacattcctaacaaggtgctgattctggctgatggggacccctcgagcttcctgtcccgccagctgcctttcctgagtaccctccgacggttggaagaccaggccactgcatatgtgtgtgagaatcaagcctgctcagtgcccatcactgatccctgcgaattacgaaaactactacatccatgactgccccaacccccttggggtggggcagaaggtgaagcatcccaactgactagagactcaggccctgcagggccctatagaacctgtggccatccctgagcaccctgccaccaggtgacctcggccatactcactgccccccttgggcacccactcaccctagaataaacttaacagtgtcccgtggt

SEQ ID NO: 29756 - DNA, 2734 bp, Homo sapiens
  source 1..2734: mol_type = unassigned DNA
ccgtaggtgcccggcccgcccctcgcagcctcctgacttcccttcctgtcctcagcggccgggcccacggccccgagcagccatgctgggcgcgcgggcctggttgggccgcgtccttctgctgccccgcgccggtgcaggcctcgccgcgagccgcaggtctgcctgcagtcccacttccaggctgaactccctgaggtctctgattccctaggtgtcctggagtctggcccaggacctggccccacaggagtcccagcaggggtagctcctcccgggacaaggaccgaagtgcgacggtcagtagttcagtgcccatgcctgctggagggaaaggaagccatccttcatctacaccccagagggtccccaaccgcctgatccacgagaagtcaccatacctcctacaacatgcctacaatcctgtggactggtacccctggggacaggaagccttcgacaaggccaggaaggaaaacaagccgattttcctctcagtcgggtactccacctgccactggtgccacatgatggaagaggagtccttccagaatgaggagattggccgcctgctcagtgaggactttgtgagtgtgaaggtagaccgtgaggagcggcctgacgtggacaaggtgtacatgacgttcgtgcaggccaccagcagcggcgggggctggcccatgaatgtgtggctgactcccaacctccagccctttgtcgggggcacctatttccctcctgaggatggcttgacccgagtcggcttccgcacagtgttgctgagaatacgagaacagtggaaacagaacaagaacaccctgctagaaaatagccagcgtgtcaccactgccctgctggcccgatcagagatcagcgtgggtgaccgccagctgccgccctctgccgccaccgtgaacaatcgctgcttccagcagctggatgagggctatgatgaggaatacggtggcttcgctgaggcccccaagtttcccacgccggtgatcctgagcttcctgttctcctactggctcagccatcgactgactcaggatggctctcgggcccagcagatggccttgcataccctgaaaatgatggctaacgggggcatccgggaccatgtggggcagggctttcaccgctactccacagaccgccagtggcacgtccctcactttgagaagatgctctatgaccaggcacagctcgctgtggcctattcgcaggccttccagctctctggtgatgaattctactctgacgtggccaaaggcatcctgcagtacgtggctcggagcctgagccaccggtccggaggcttctatagcgcagaagatgcagactcgcccccagagcggggccagcggcccaaagagggcgcctactatgtgtggacggtcaaagaggttcagcagctcctcccggagcctgtgttgggtgccaccgagccgctgacctcaggccagctcctcatgaagcactacggcctcacagaggctggtaacatcagccccagtcaggaccccaagggggagctgcagggccagaatgtgctgaccgtccggtactcgctggagctgactgctgcccgctttggcttggatgtggaggccgtgcggaccttgctcaattcagggctggagaagctcttccaggcccggaagcatcggcccaagccgcacctggacagcaagatgctggctgcctggaatggcttgatggtgtcaggctatgctgtgactggggctgtcctgggccaagacaggctgatcaactatgccaccaatggtgccaagttcctgaagcggcacatgtttgatgtggccagtggccgcctgatgcggacctgctacaccggccctggggggactgtggagcacagcaacccaccctgctggggcttcctggaggactacgccttcgtggtgcggggcctgctggacctgtatgaggcctcacaggagagtgcgtggctcgagtgggctctgcggctgcaggacacacaggacaagctcttttgggactcccagggtggcggctacttctgcagtgaggctgagctgggggctggcctgcccctgcgtctgaaggacgaccaggatggagcagagcccagcgccaattccgtgtcagcccacaacctgctccggctgcatggcttcacgggccacaaggactggatggacaagtgtgtgtgcctattgaccgccttttccgagcgcatgcgtcgtgtcccggtggcgttgcccgagatggtccgcgccctctcagcccagcagcagaccctcaagcagatcgtgatctgtggagaccgtcaggccaaggacaccaaggccctggtgcagtgcgtccactctgtctacattcctaacaaggtgctgattctggctgatggggacccctcgagcttcctgtcccgccagctgcctttcctgagtaccctccgacggttggaagaccaggccactgcatatgtgtgtgagaatcaagcctgctcagtgcccatcactgatccctgcgaattacgaaaactactacatccatgactgccccaacccccttggggtggggcagaaggtgaagcatcccaactgactagagactcaggccctgcagggccctatagaacctgtggccatccctgagcaccctgccaccaggtgacctcggccatactcactgccccccttgggcacccactcaccctagaataaacttaacagtgtcccgtggt

SEQ ID NO: 29757 - DNA, 1169 bp, Homo sapiens
  source 1..1169: mol_type = unassigned DNA
gcgctgaggtctcgccccataagactccgccccgccccacgagaccgcgccgccagcaataaggcccagccccgccttctgctgttgccgcagcaacccagaaagcgtcatggctgccgccggccaggaaaaagggtatttgacacagactgcggcagccctagacaagtcaccgtcactttcgccacagctagcagctcccatccgagggaggcctaagaagtgtctggtctatccgcatgcgccgaagagctcccgcttgtctcgttccgttctgcgttggcttcagggtctggatctcagcttcttccccaggaacatcaacagagatttttcaaatggcttcctaattgcagaaatattctgtatatattacccctgggaacttgaattatcatcctttgaaaacgggacctctttaaaagtcaagttggataactgggcacagttggagaagttcctggcaagaaaaaaatttaaattacctaaagaactaatccatggaacaattcattgtaaagctggagtgcctgaaatattgatagaagaggtttacactttattaacacatcgagaaattaaaagtatccaggatgactttgtgaatttcacggactatagctaccagatgcgtttacccctggtttccaggtctacagtttcgaagtctattaaagataacattaggttatcagaattactaagcaatcccaacatgctgaccaatgaacttaaagcggagttcctcatccttttacatatgttgcaaagaaaattaggcagaaaattgaatccagaatggtttgatgtgaaaccaacagtgggagaagttactctcaatcaccttcctgcccaagcctctgggcgcagatataatttaaaagttaaaagaggaagagttgtccctgttttaccaaatataggtagtggtggcagttcacatagagaaatacatgtgaagcaagctggacaacattcttattactctgctatgaaacctatcagaaacatggacaagaaaccttgaaaagcacctgtcaaatggctttgaagaagtgatgccaccatctctagccataataaagaaacagaatcacctagtattggatgtatttcaataataaatagagtggtgtcttttccataattgtgttaaagaacatttcttt

SEQ ID NO: 29758 - DNA, 3341 bp, Homo sapiens
  source 1..3341: mol_type = unassigned DNA
ttttctctcagttgaagcgcgcacattgagtcggcttttctactgcttcggctagggtaccttgtgaccatgtcttccaagaagaatagaaagcggttgaaccaaagcgcggaaaatggttcgtccttgccctctgctgcttcctcttgtgcggaggcacgggctccttctgctggatcagacttcgcggcaacctccgggactctgacggtgaccaacttattagaaaaggtagatgacaaaattcctaaaacattccagaattcccttattcatcttggactcaacactatgaagtctgcaaatatatgtataggtcgaccagtgttgcttactagtttgaacggaaagcaagaggtgtatacagcctggcctatggcaggatttcctggaggcaaggtcggcctgagtgaaatggcacagaaaaatgtgggtgtgaggcctggtgatgccatccaggtccagcctcttgtgggtgctgtgctacaggctgaggaaatggatgtggcactgagtgacaaagatatggaaattaatgaagaagaactgactggttgtatcctgagaaaactagatggcaagattgttttaccaggcaactttctgtattgtacattctatggacgaccgtacaagctgcaagtattgcgagtgaaaggggcagatggcatgatattgggagggcctcagagtgactctgacactgatgcccaaagaatggcctttgaacagtccagcatggaaaccagtagcctggagttatccttacagctaagccagttagatctggaggatacccagatcccaacatcaagaagtactccttataaaccaattgatgacagaattacaaataaagccagtgatgttttgctggatgttacacagagccctggagatggcagtggacttatgctagaggaagtcacaggtcttaaatgtaattttgaatctgccagagaaggaaatgagcaacttactgaagaagagagactgctaaagttcagcataggagcaaagtgcaatactgatactttttattttatttcttcaacaacaagagtcaattttacagagattgataaaaattcaaaagagcaagacaaccaattcaaagtaacttatgacatgataggaggattaagtagccagctgaaagcaattagagaaataattgaattgcccctcaaacagcctgagcttttcaagagttatggaattcctgcccctagaggagtgttactttatggtcctccaggtactggaaaaacaatgatcgccagggctgttgctaatgaagttggagcctatgtttctgtaattaatggtcctgaaattataagcaaattctatggtgagactgaagcaaagttacgtcagatatttgctgaagccactctacgacacccatcaattatttttattgatgagctggatgcactttgtccgaaaagagagggggcccagaatgaagtggaaaaaagagttgtggcttcactcttaacactgatggatggcattggttcagaagtaagtgaaggacaagtgttggttcttggggccacaaatcgccctcatgccttggatgctgctctccgaagacctgggcgatttgataaagagattgagattggagttcccaatgctcaggaccggctagatattctccagaaactgcttcgaagggtaccccatttgctcactgaggctgagctgctgcagctggcaaatagtgctcatggatacgttggagcagacttgaaagtcttgtgtaatgaagcaggtctctgtgccttgcggagaatcctgaaaaaacagcctaacctccctgatgtcaaggtggctggactggtgaagattactctgaaggatttcttgcaggcaatgaatgatatcagacccagtgccatgagggaaatagcaattgatgtcccaaatgtatcctggtcagatataggaggactggaaagtatcaaactgaagttggaacaggctgtggaatggcccttaaaacatccagagtctttcattcgaatgggtattcagccacctaaaggagttcttctctatgggccacctgggtgctctaaaacaatgatagcaaaggctttggccaatgagagtggactgaattttctagctataaaggggcctgaattaatgaataaatatgttggtgaatctgaaagagcagttagagagaccttccgaaaagcaagagcagtggcgccttccattattttctttgatgaactggatgccttagcagttgaaaggggcagttctttaggtgctgggaatgtagccgatcgtgttttggctcagctcttaacagaaatggatgggattgaacagctaaaggatgtgaccattttggcagctactaaccgtccagataggatagacaaggctttgatgcggcctggaagaattgatagaatcatctatgtgcctttaccggatgcagcaacaagaagggaaatatttaagctgcagtttcactccatgcctgtcagtaatgaagttgacctggatgaactcatccttcaaaccgacgcatactcaggagcagagattgtagctgtctgcagagaggcagctcttctggctctggaagaagacattcaagccaatctcatcatgaaaagacatttcactcaggccttgagcactgtgacacctagaattcctgagtcattgagacgtttttatgaagattatcaagagaagagtgggctgcatacactctgagaaaatatatatattcaagatgctgaaaatcctttccagagaaaatttgtttctttttaaaattttttgagagtgttaaaaaaaattttactaggcaaaatgtttgaagtatgttcagtagaatttaggggctttggttcttacagattttcaagtcatgtaagtacagtgaaaatatctctgagcataagtttcaatcagttttacctggaaatttgtggtgtggtttaaaaaacaaatgtttagctttttcatttgcgacctagtctgttcatcccatgaagcgatttctttttccagaatctgtttgagtgtctttctaaaatgccaaacatgttggcatcaattttatacagggatataaaaaagtatatgtggataaattttttgtaatctttagggatataaaaaagtgtatgtggataaattttttgtaatctttatttttgaaggccagccagtaaaatggcccaatgtgccagccaggcttatgtggccttgttttcaaatatacatatatgtgttatcattaaaattcatatatgcatttttgttttagccttcttaatctctacctatggccaaaaaaa

SEQ ID NO: 29759 - DNA, 818 bp, Homo sapiens
  source 1..818: mol_type = unassigned DNA
attgaacaaggtggagaaggtccagaagcataccatgaactacagaagaaggaaagatggagtaatctgatgcaactggataaatttatttaccatttggctccagttgaaaaatcacatggcagactgcaaaacagaacatcaagatcacaaaagaaaaaatccaagtcacctgagagaagtaaatactgtataaatgcaaaaaactacgaacagcctacaatttcttcaaaatcacactctccatctccctacacaaaaagacgcatgtgtgagctatctgaagacaccaggcggcggctggcccatttaaatctgggaccctatgagttcaaaaaagaaacagataaacctccatttgtgattagacatgttgatcccccaagtcccagggctgatactttattgggatcttctggaagagactgtgaaagagatggatggtcaagggtgcacaatgatcattctcatcttggctgctgccgacccaaggattataaggttatcaggacaccccatgggagagacttcgatgactctttagaaaaatgtgaagagtatttgagcccaaggtcgtgtagtaagccccggcattcagcgaggaccttgctagtccattcagcaccctcaacaatgccaaagcattctccaagccctgtgttaaatagagcttctctcagggaaagatttcattctgattggtgttcaccttcaaactgcgatgagatccatgaccgggatgagagagacctagagaaagatgatgaactggaactgaaaagaagtcttttatgtagagactctgcctatgacagtga

SEQ ID NO: 29760 - DNA, 2297 bp, Homo sapiens
  source 1..2297: mol_type = unassigned DNA
ggatgccgaaggtgaaggcgctgcagtgcgccctggcgctggagatcagctcagtaacttgcccaggagtcgtgcttaaagacaaagaggacatctatcttagcatctgtgtgtttggccaatacaaaaagacacaatgtgtcccagccacttttcccctggtcttcaatgccagaatggtgtttgaaaaggtgttcccggacgcagtagatcctggagatgtggttacacagcttgaatatgatacagcagtgttcgagttgatacagctagttccaccagtgggtgaaacactgtctacgtatgacgaaaatacacgagatttcatgtttccgggtccaaaccaaatgtctggacaccatgattcaaaccgccaggttaccatgaggaggatttctggccttcgaggaaatgctccaaggctggaattttctacgacttcagtgattactgaatgtctgataagttcaaggaaatgccacactcaggataaatttatttaccatttggctccagttgaaaaatcacatggcagactgcaaaacagaacatcaagatcacaaaagaaaaaatccaagtcacctgagagaagtaaatactgtataaatgcaaaaaactacgaacagcctacaatttcttcaaaatcacactctccatctccctacacaaaaagacgcatgtgtgagctatctgaagacaccaggcggcggctggcccatttaaatctgggaccctatgagttcaaaaaagaaacagataaacctccatttgtgattagacatgttgatcccccaagtcccagggctgatactttattgggatcttctggaagagactgtgaaagagatggatggtcaagggtgcacaatgatcattctcatcttggctgctgccgacccaaggattataaggttatcaggacaccccatgggagagacttcgatgactctttagaaaaatgtgaagagtatttgagcccaaggtcgtgtagtaagccccggcattcagcgaggaccttgctagtccattcagcaccctcaacaatgccaaagcattctccaagccctgtgttaaatagagcttctctcagggaaagatttcattctgattggtgttcaccttcaaactgcgatgagatccatgaccgggatgagagagacctagagaaagatgatgaactggaactgaaaagaagtcttttatgtagagactctgcctatgacagtgaccccgagtatagctcatgtcagcagccacgtggcactttccatttggatgacggtgaatactggtccaacagggcagcctcttataagggaaaatcccaccgacccatctttgagaacagcatggacaagatgtacaggaacttatacaaaaaggcctgtagttctgcttcacatacacaggaaagcttctgagaccatccatgataaacctcattagtgtccgtgtcaatttctcaatgaaaatgtttgatgtgatcaatatctgtattcctttttttaaaaaaaatgggattataactaagtacaatagttatacttgaataagttcattacttcaaatggtaaattatcataggcaagccttttaaaataattattacagaagagtctgctgtgttacaaacattagagctctgtcacacaatcacaacttccaatatgtgacaaggatattctgttacatgtacacctcatattccatctgcaaatccaagaatagttcctttctagaaatgttttttttgccttactcaccttgcaattttcttctcatctacttaactggttatcttgcctgtgtaagatttaattaatattgactaccttttcttggtgatgaacaaaatgatatcctatacagaaatgaatttcctaagggtttaaaccctgttttcactaacattttctactttttcctttttcagaacaggctattctatttcttagctcataggctttctttttaaagactatatgatcattcactcctttttctctggaagaactgtgtaagttgcttaaaatgcatagcagttagctagaaatatcagtgccatggatgatcaaaaatttgaataactaatttttaaagataaaattctttgcatgattttttttctagggccataccttttggtgcaaccagaatcagaaaatggcctctgttagtaagcttatagaaacctaaaaataataatggaattatattgtaatttgactgcttggaatttgtgtaagtaccatatggcccaaggcactattatagtatcctcactttaaaaaaaaaaa

SEQ ID NO: 29761 - DNA, 4973 bp, Homo sapiens
  source 1..4973: mol_type = unassigned DNA
gcttctccggcggaacccaggctggaccgcgggccccggcctgggggccactgctgccaccgccgccgccacctcgtctcctccccgtccccgcccagccccaggtctccccgcctcactcgggcccgtggccggggtcactccccgccgcccctccccgcacggatgccgaaggtgaaggcgctgcagtgcgccctggcgctggagatcagctcagtaacttgcccaggagtcgtgcttaaagacaaagaggacatctatcttagcatctgtgtgtttggccaatacaaaaagacacaatgtgtcccagccacttttcccctggtcttcaatgccagaatggtgtttgaaaaggtgttcccggacgcagtagatcctggagatgtggttacacagcttgaatatgatacagcagtgttcgagttgatacagctagttccaccagtgggtgaaacactgtctacgtatgacgaaaatacacgagatttcatgtttccgggtccaaaccaaatgtctggacaccatgattcaaaccgccaggttaccatgaggaggatttctggccttcgaggaaatgctccaaggctggaattttctacgacttcagtgattactgaatgtctgataagttcaaggaaatgccacactcaggataaatttatttaccatttggctccagttgaaaaatcacatggcagactgcaaaacagaacatcaagatcacaaaagaaaaaatccaagtcacctgagagaagtaaatactgtataaatgcaaaaaactacgaacagcctacaatttcttcaaaatcacactctccatctccctacacaaaaagacgcatgtgtgagctatctgaagacaccaggcggcggctggcccatttaaatctgggaccctatgagttcaaaaaagaaacagataaacctccatttgtgattagacatgttgatcccccaagtcccagggctgatactttattgggatcttctggaagagactgtgaaagagatggatggtcaagggtgcacaatgatcattctcatcttggctgctgccgacccaaggattataaggttatcaggacaccccatgggagagacttcgatgactctttagaaaaatgtgaagagtatttgagcccaaggtcgtgtagtaagccccggcattcagcgaggaccttgctagtccattcagcaccctcaacaatgccaaagcattctccaagccctgtgttaaatagagcttctctcagggaaagatttcattctgattggtgttcaccttcaaactgcgatgagatccatgaccgggtaaaaaatgtcttgaaatcacatcaggctcatcaaagacatttatatgatgagagagacctagagaaagatgatgaactggaactgaaaagaagtcttttatgtagagactctgcctatgacagtgaccccgagtatagctcatgtcagcagccacgtggcactttccatttggatgacggtgaatactggtccaacagggcagcctcttataagggaaaatcccaccgacccatctttgagaacagcatggacaagatgtacaggaacttatacaaaaaggcctgtagttctgcttcacatacacaggaaagcttctgagaccatccatgataaacctcattagtgtccgtgtcaatttctcaatgaaaatgtttgatgtgatcaatatctgtattcctttttttaaaaaaaatgggattataactaagtacaatagttatacttgaataagttcattacttcaaatggtaaattatcataggcaagccttttaaaataattattacagaagagtctgctgtgttacaaacattagagctctgtcacacaatcacaacttccaatatgtgacaaggatattctgttacatgtacacctcatattccatctgcaaatccaagaatagttcctttctagaaatgttttttttgccttactcaccttgcaattttcttctcatctacttaactggttatcttgcctgtgtaagatttaattaatattgactaccttttcttggtgatgaacaaaatgatatcctatacagaaatgaatttcctaagggtttaaaccctgttttcactaacattttctactttttcctttttcagaacaggctattctatttcttagctcataggctttctttttaaagactatatgatcattcactcctttttctctggaagaactgtgtaagttgcttaaaatgcatagcagttagctagaaatatcagtgccatggatgatcaaaaatttgaataactaatttttaaagataaaattctttgcatgattttttttctagggccataccttttggtgcaaccagaatcagaaaatggcctctgttagtaagcttatagaaacctaaaaataataatggaattatattgtaatttgactgcttggaatttgtgtaagtaccatatggcccaaggcactattatagtatcctcactttaaaaaaaaaaacacttggaaccacaatgtgagtaaaatattatagcagaacgctttgtggtagacactgaaaatgttgttgattgatggatagaattaacttctcctcccccaccccagcacacacctgtgaagccaatgatactataaagacataaagaaatcagctactttatatttaatagagagtgaggggagggaaaggagagtgtaggaataagtgaactgggcttatagtcttgaagagttgcctaaaagataatattttctcattgactctgtttttgattaattttacagttatgattgaaaaagaacaaaatgaacttcctttaaaatgaaattaaaatgtgaaacttgctgacttatttttgtagtagaacttgttaacatcatgttaagggtgctttagtatcacagtctgtgatatatcagaaagggcattagagctatctctatgagccaggagtcctaggctttagtatcccatgtctgccgttttctagctgagtctatttaattctcagatcctttgtttcctcagctatcaaatgataagaatgtagtagaccccaaactatgttctgtggaccaagatcactgttttaggagataatcgtaggaatgtaggtataagtatgtaattggccatctaagtttaggaaaatctgtttgctacacacatacacacacacacacacacacacacacacacacacacacctcttagagagtcatatgtaggattatagaggtaaaaagagatgatattaatgctggaatagcgcctgtaaactggggctgtctacagcaaattaggatatatggtcactgtgctcattgtgaacagtagcttgttcgaggctttaagaaaattctggtataaatctgtcttactctgcatctagtagacagcctggcatgtaattgatgttccttaaatatttatcgaattaacccagaattttctaaactaaatttagcatgtaccactatttgttattcttgccaccaccccccattcccctagctcctcacactacctgccaatgtcatcctaaggtacatgtggatacctaggttgtagaaatgctggactacacaattgctgagttactctctggctgtagattatatgatgaggtattttacaatcagcttttgaaggtcaacattgaataatgctcttttaaaaaaattatatcctcagtgtttttccatggaaaaataagtgaaaattcttttaagagttgctgtttggtgaaaagaacaaacatgactttcaaagaaaatgttttactatcaccaaaatctcccaagtgaataagtaccacagaaattacttattgcacctgtatctgccattggctgtgaaaaaggctgcaaaaagtagggctgaaagggaaactttagaaactaatactctgaaagatgttttcctatggattaaatttagtgtctttctgaaagttgggggcaaattcccagatactaatagcatctttgctaagtgtctgattatcttctatcccctaggaggaaagagtggtccatgttgctgtaactactactatgagtgcttatgctgtattgtttttaaagagtaaaacctttaagtactaatagttgtcttttctcattcacaggagcagaaaggtgcagttgtttattctcttagccttttttttttcctgtatttcccacaaatctagaaataattattggagttaatatgaaagataaataggcttttctttttactttttaatttttttctttaaatcataaaaaaccttgggatttagaaaaatgtcaaaatcgacaaataaagatgaatcattggaatgagactcttccttggttctactagctagttatataaccttatttaagtcatttatgcttcttggagctcagttttctcaccaacaaggtgataaaagggttaatttagaatgatcctttgacatttcataattgtacaattaatatgtacgatcaggaagtcctaggcaggcagagttgttttctgatttccaaagattaagcccctgatgaaaaatctggaacaaatagagaattttcattattgtgttcatttgctaataatagctttattgagatataattcactctgaaaaagtatacaattaagtggtttttactatattcacagagttgtgcaacaataaccactcactaattacagaatattttataactcccaaaagaaatcctgtaaccattagtgatcacttcccactacctcctccccacaactcctggaaaccactatatgctttttgtctccatgcctattctggacatttcatataaatggaaccatacaacatgtgacctattgtatgtggcttctttcacttagcaaaatattttgagagttcatgcatgttgtaacacgtatgaatacttcattcctttttattactaaataataatccatcatatgaatatac

SEQ ID NO: 29762 - DNA, 1635 bp, Homo sapiens
  source 1..1635: mol_type = unassigned DNA
gctggaccgcgggccccggcctgggggccactgctgccaccgccgccgccacctcgtctcctccccgtccccgcccagccccaggtctccccgcctcactcgggcccgtggccggggtcactccccgccgcccctccccgcacggatgccgaaggtgaaggcgctgcagtgcgccctggcgctggagatcagctcagtaacttgcccaggagtcgtgcttaaagacaaagaggacatctatcttagcatctgtgtgtttggccaatacaaaaagacacaatgtgtcccagccacttttcccctggtcttcaatgccagaatggtgtttgaaaaggtgttcccggacgcagtagatcctggagatgtggttacacagcttgaattgggtgaaacactgtctacgtatgacgaaaatacacgagatttcatgtttccgggtccaaaccaaatgtctggacaccatgattcaaaccgccaggttaccatgaggaggatttctggccttcgaggaaatgctccaaggctggaattttctacgacttcagtgattactgaatgtctgataagttcaaggaaatgccacactcaggataaatttatttaccatttggctccagttgaaaaatcacatggcagactgcaaaacagaacatcaagatcacaaaagaaaaaatccaagtcacctgagagaagtaaatactgtataaatgcaaaaaactacgaacagcctacaatttcttcaaaatcacactctccatctccctacacaaaaagacgcatgtgtgagctatctgaagacaccaggcggcggctggcccatttaaatctgggaccctatgagttcaaaaaagaaacagataaacctccatttgtgattagacatgttgatcccccaagtcccagggctgatactttattgggatcttctggaagagactgtgaaagagatggatggtcaagggtgcacaatgatcattctcatcttggctgctgccgacccaaggattataaggttatcaggacaccccatgggagagacttcgatgactctttagaaaaatgtgaagagtatttgagcccaaggtcgtgtagtaagccccggcattcagcgaggaccttgctagtccattcagcaccctcaacaatgccaaagcattctccaagccctgtgttaaatagagcttctctcagggaaagatttcattctgattggtgttcaccttcaaactgcgatgagatccatgaccgggtaaaaaatgtcttgaaatcacatcaggctcatcaaagacatttatatgatgagagagacctagagaaagatgatgaactggaactgaaaagaagtcttttatgtagagactctgcctatgacagtgaccccgagtatagctcatgtcagcagccacgtggcactttccatttggatgacggtgaatactggtccaacagggcagcctcttataagggaaaatcccaccgacccatctttgagaacagcatggacaagatgtacaggaacttatacaaaaaggcctgtagttctgcttcacatacacaggaaagcttctgagaccatccatgataaacctcattagtgtccgtgtcaatttctcaatgaaaatgtttgatgtgatc

SEQ ID NO: 29763 - DNA, 1410 bp, Homo sapiens
  source 1..1410: mol_type = unassigned DNA
atggatggcagccggagagtcagagcaacctctgtccttcccagatatggtccaccgtgcctatttaaaggacacttgagcaccaaaagtaatgctttttgcactgactcctcttctctcagactaagcactctccagctggtcaagaatcacatggctgttcactataataaaatcctttcagccaaagctgcagtagactgctcggttccagtaagcgtgagtaccagcataaagtatgcagaccaacaacgaagagagaaactcaaaaaggaattagcacaatgtgaaaaagagttcaaattaactaaaactgcaatgcgagccaattataaaaataattccaagtcactttttaataccttacaaaagccctcaggcgaaccgcaaattgaggatgacatgttaaaagaagaaatgaatggattttcatcctttgcaaggtcactagtaccctcttcagagagactacacctaagtctacataaatccagtaaagtcatcacaaatggtcctgagaagaactccagttcctccccgtccagtgtggattatgcagcctccgggccccggaaactgagctctggagccctgtatggcagaaggcccagaagcacattcccaaattcccaccggtttcagttagtcatttcgaaagcacccagtggggatcttttggataaacattctgaactcttttctaacaaacaattgccattcactcctcgcactttaaaaacagaagcaaaatctttcctgtcacagtatcgctattatacacctgccaaaagaaaaaaggattttacagatcaacggatagaagctgaaacccagactgaattaagctttaaatctgagttggggacagctgagactaaaaacatgacagattcagaaatgaacataaagcaggcatctaattgtgtgacatatgatgccaaagaaaaaatagctcctttacctttagaagggcatgactcaacatgggatgagattaaggatgatgctcttcagcattcctcaccaagggcaatgtgtcagtattccctgaagcccccttcaactcgtaaaatctactctgatgaagaagaactgttgtatctgagtttcattgaagatgtaacagatgaaattttgaaacttggtttattttcaaacaggtttttagaacgactgttcgagcgacatataaaacaaaataaacatttggaggaggaaaaaatgcgccacctgctgcatgtcctgaaagtagacttaggctgcacatcggaggaaaactcgttctccagtgtcaaaggcgacaataatcatgacatggagttatcaactcttaaaatcatggaaatgagcattgaggactgccctttggatgtttaatcttcattaataaatacctcaaatggccagtaa

SEQ ID NO: 29764 - DNA, 1915 bp, Homo sapiens
  source 1..1915: mol_type = unassigned DNA
acaatagcgactcactggacccagcccttagcaacggcctggcaacggtttccctgctgctgcagcccccgtcggctcctcttttccagtcctccactgccggggctgggcccggccgcgggaaggaccgaaggggatacagcgtgtccctgcggcggctgcaagaggactaagcatggatggcagccggagagtcagagcaacctctgtccttcccagatatggtccaccgtgcctatttaaaggacacttgagcaccaaaagtaatgctgcagtagactgctcggttccagtaagcgtgagtaccagcataaagtatgcagaccaacaacgaagagagaaactcaaaaaggaattagcacaatgtgaaaaagagttcaaattaactaaaactgcaatgcgagccaattataaaaataattccaagtcactttttaataccttacaaaagccctcaggcgaaccgcaaattgaggatgacatgttaaaagaagaaatgaatggattttcatcctttgcaaggtcactagtaccctcttcagagagactacacctaagtctacataaatccagtaaagtcatcacaaatggtcctgagaagaactccagttcctccccgtccagtgtggattatgcagcctccgggccccggaaactgagctctggagccctgtatggcagaaggcccagaagcacattcccaaattcccaccggtttcagttagtcatttcgaaagcacccagtggggatcttttggataaacattctgaactcttttctaacaaacaattgccattcactcctcgcactttaaaaacagaagcaaaatctttcctgtcacagtatcgctattatacacctgccaaaagaaaaaaggattttacagatcaacggatagaagctgaaacccagactgaattaagctttaaatctgagttggggacagctgagactaaaaacatgacagattcagaaatgaacataaagcaggcatctaattgtgtgacatatgatgccaaagaaaaaatagctcctttacctttagaagggcatgactcaacatgggatgagattaaggatgatgctcttcagcattcctcaccaagggcaatgtgtcagtattccctgaagcccccttcaactcgtaaaatctactctgatgaagaagaactgttgtatctgagtttcattgaagatgtaacagatgaaattttgaaacttggtttattttcaaacaggtttttagaacgactgttcgagcgacatataaaacaaaataaacatttggaggaggaaaaaatgcgccacctgctgcatgtcctgaaagtagacttaggctgcacatcggaggaaaactcggtaaagcaaaatgatgttgatatgttgaatgtatttgattttgaaaaggctgggaattcagaaccaaatgaattaaaaaatgaaagtgaagtaacaattcagcaggaacgtcaacaataccaaaaggctttggatatgttattgtcggcaccaaaggatgagaacgagatattcccttcaccaactgaatttttcatgcctatttataaatcaaagcattcagaaggggttataattcaacaggtgaatgatgaaacaaatcttgaaacttcaactttggatgaaaatcatccaagtatttcagacagtttaacagatcgggaaacttctgtgaatgtcattgaaggtgatagtgaccctgaaaaggttgagatttcaaatggattatgtggtcttaacacatcaccctcccaatctgttcagttctccagtgtcaaaggcgacaataatcatgacatggagttatcaactcttaaaatcatggaaatgagcattgaggactgccctttggatgtttaatcttcattaataaatacctcaaatggccagtaactc

SEQ ID NO: 29765 - DNA, 2123 bp, Homo sapiens
  source 1..2123: mol_type = unassigned DNA
gactggggctcgatgccccttccccgccaggtctctccgtccgcaactgtcctcctagtaccgggtatcccgcaggcggggctgcggaacgcacgtcccctgcgccgtgacgtcacaatagcgactcactggacccagcccttagcaacggcctggcaacggtttccctgctgctgcagcccccgtcggctcctcttttccagtcctccactgccggggctgggcccggccgcgggaaggaccgaaggggatacagcgtgtccctgcggcggctgcaagaggactaagcatggatggcagccggagagtcagagcaacctctgtccttcccagatatggtccaccgtgcctatttaaaggacacttgagcaccaaaagtaatgctttttgcactgactcctcttctctcagactaagcactctccagctggtcaagaatcacatggctgttcactataataaaatcctttcagccaaagctgcagtagactgctcggttccagtaagcgtgagtaccagcataaagtatgcagaccaacaacgaagagagaaactcaaaaaggaattagcacaatgtgaaaaagagttcaaattaactaaaactgcaatgcgagccaattataaaaataattccaagtcactttttaataccttacaaaagccctcaggcgaaccgcaaattgaggatgacatgttaaaagaagaaatgaatggattttcatcctttgcaaggtcactagtaccctcttcagagagactacacctaagtctacataaatccagtaaagtcatcacaaatggtcctgagaagaactccagttcctccccgtccagtgtggattatgcagcctccgggccccggaaactgagctctggagccctgtatggcagaaggcccagaagcacattcccaaattcccaccggtttcagttagtcatttcgaaagcacccagtggggatcttttggataaacattctgaactcttttctaacaaacaattgccattcactcctcgcactttaaaaacagaagcaaaatctttcctgtcacagtatcgctattatacacctgccaaaagaaaaaaggattttacagatcaacggatagaagctgaaacccagactgaattaagctttaaatctgagttggggacagctgagactaaaaacatgacagattcagaaatgaacataaagcaggcatctaattgtgtgacatatgatgccaaagaaaaaatagctcctttacctttagaagggcatgactcaacatgggatgagattaaggatgatgctcttcagcattcctcaccaagggcaatgtgtcagtattccctgaagcccccttcaactcgtaaaatctactctgatgaagaagaactgttgtatctgagtttcattgaagatgtaacagatgaaattttgaaacttggtttattttcaaacaggtttttagaacgactgttcgagcgacatataaaacaaaataaacatttggaggaggaaaaaatgcgccacctgctgcatgtcctgaaagtagacttaggctgcacatcggaggaaaactcggtaaagcaaaatgatgttgatatgttgaatgtatttgattttgaaaaggctgggaattcagaaccaaatgaattaaaaaatgaaagtgaagtaacaattcagcaggaacgtcaacaataccaaaaggctttggatatgttattgtcggcaccaaaggatgagaacgagatattcccttcaccaactgaatttttcatgcctatttataaatcaaagcattcagaaggggttataattcaacaggtgaatgatgaaacaaatcttgaaacttcaactttggatgaaaatcatccaagtatttcagacagtttaacagatcgggaaacttctgtgaatgtcattgaaggtgatagtgaccctgaaaaggttgagatttcaaatggattatgtggtcttaacacatcaccctcccaatctgttcagttctccagtgtcaaaggcgacaataatcatgacatggagttatcaactcttaaaatcatggaaatgagcattgaggactgccctttggatgtttaatcttcattaataaatacctcaaatggccagtaac

SEQ ID NO: 29766 - DNA, 2301 bp, Homo sapiens
  source 1..2301: mol_type = unassigned DNA
aacagttcatagggacagcacccccacaacagagaattatacaaccagcccaaaatgtcaatggacatttgggctgagaagtcttacatgacagaatgcttcctaccctgatctgacgttatttccaaggattcaaaggggacgtggatgccagatgagtccacctcctctccctgctcttcccgcagggacagagcctgccaggtgctggtgactcggatcctgacaggaggtcgctctgcggaagactggcaggatcccagagcaacagactggggctcgatgccccttccccgccaggtctctccgtccgcaactgtcctcctagtaccgggtatcccgcaggcggggctgcggaacgcacgtcccctgcgccgtgacgtcacaatagcgactcactggacccagcccttagcaacggcctggcaacggtttccctgctgctgcagcccccgtcggctcctcttttccagtcctccactgccggggctgggcccggccgcgggaaggaccgaaggggatacagcgtgtccctgcggcggctgcaagaggactaagcatggatggcagccggagagtcagagcaacctctgtccttcccagatatggtccaccgtgcctatttaaaggacacttgagcaccaaaagtaatgctgcagtagactgctcggttccagtaagcgtgagtaccagcataaagtatgcagaccaacaacgaagagagaaactcaaaaaggaattagcacaatgtgaaaaagagttcaaattaactaaaactgcaatgcgagccaattataaaaataattccaagtcactttttaataccttacaaaagccctcaggcgaaccgcaaattgaggatgacatgttaaaagaagaaatgaatggattttcatcctttgcaaggtcactagtaccctcttcagagagactacacctaagtctacataaatccagtaaagtcatcacaaatggtcctgagaagaactccagttcctccccgtccagtgtggattatgcagcctccgggccccggaaactgagctctggagccctgtatggcagaaggcccagaagcacattcccaaattcccaccggtttcagttagtcatttcgaaagcacccagtggggatcttttggataaacattctgaactcttttctaacaaacaattgccattcactcctcgcactttaaaaacagaagcaaaatctttcctgtcacagtatcgctattatacacctgccaaaagaaaaaaggattttacagatcaacggatagaagctgaaacccagactgaattaagctttaaatctgagttggggacagctgagactaaaaacatgacagattcagaaatgaacataaagcaggcatctaattgtgtgacatatgatgccaaagaaaaaatagctcctttacctttagaagggcatgactcaacatgggatgagattaaggatgatgctcttcagcattcctcaccaagggcaatgtgtcagtattccctgaagcccccttcaactcgtaaaatctactctgatgaagaagaactgttgtatctgagtttcattgaagatgtaacagatgaaattttgaaacttggtttattttcaaacaggtttttagaacgactgttcgagcgacatataaaacaaaataaacatttggaggaggaaaaaatgcgccacctgctgcatgtcctgaaagtagacttaggctgcacatcggaggaaaactcggtaaagcaaaatgatgttgatatgttgaatgtatttgattttgaaaaggctgggaattcagaaccaaatgaattaaaaaatgaaagtgaagtaacaattcagcaggaacgtcaacaataccaaaaggctttggatatgttattgtcggcaccaaaggatgagaacgagatattcccttcaccaactgaatttttcatgcctatttataaatcaaagcattcagaaggggttataattcaacaggtgaatgatgaaacaaatcttgaaacttcaactttggatgaaaatcatccaagtatttcagacagtttaacagatcgggaaacttctgtgaatgtcattgaaggtgatagtgaccctgaaaaggttgagatttcaaatggattatgtggtcttaacacatcaccctcccaatctgttcagttctccagtgtcaaaggcgacaataatcatgacatggagttatcaactcttaaaatcatggaaatgagcattgaggactgccctttggatgtttaatcttcattaataaatacctcaaatggccagtaactcaa

SEQ ID NO: 29767 - DNA, 1083 bp, Homo sapiens
  source 1..1083: mol_type = unassigned DNA
agttgcgtccgttggggcttctggggcagcccacagggttccgagcatgtgctggcagttgctctttggagcacccacttcacttctcccatgtagttcctgagtgcaggactctcctgaagaaggggcgtctaaaaggccagcccatgcatcttgttcagaccaggctgctccatctccgctaagcccagggatccacttgtgtgtctttctgggataattgtctttagtggcagcctgggcctcggggaaggaagggcatgaggaatggccccggctgggatgtcaggggcccaggacaactcctgtctctaccaggaaattgccccctcttttcagaggctgccttgtcctagaacctcgtcgcgacatttctcagaagccatgacatgtccctgcggctggaggcctttcaagggtggcccaggaggcctcaagggcccggtgtggcctgcaaaggaagagaacagctgttctcacggaaggatccaaagggttcaaaggcgaagggtgccatctgcttccccactgattcagaagataaacaggagaagtgtcctgtttcacccatattgctggtcctgatttttcaatagtgtccctaccctgaagctcttccattggtcatcatggagttagctaacagcccagggaactggtctcttttcccttttcccttaccacctggaactcacctggaaagggcaatcagctggctctatatcagacgccaccacctggtctttgaagtttctgtcctaccagtgccacagctccctctcccacttctgaactacctccaagagagaccatcctcagcagcctagtatgttatgctagtcctggaatggtgtattctggatgtctactcaaggccaaaccccagtattgcctttcgtttccctattcaaggccaaggctagattctcttcattgtctccatttctctttctccagagctcctatagggcaagacactgtttctcatatatttctggatccttggagcttagctcggagcttggcatacatgcccagcatgaacttttctgaataaaataatttcaaatgctgtatacagga

SEQ ID NO: 29768 - DNA, 3158 bp, Homo sapiens
  source 1..3158: mol_type = unassigned DNA
gtggctctagaaggggaggtggaggatctcctttcctcttctcagacccgggagcgtccgggacgcggagcccggagctggggcgacgaggcgattgcgggggcctgggctagaatctccctggaaaaggagacatgaatgtctgcaatgatacttcctgacaagaagttgatacaagaaaaggaaaggagattaacagctagtgagcagaatttcgaacagcaggatttcgtattttttgcttccaactgcacacttccgttgcccacttttaaatcagagatacctacactcaaaacccagacaaggcaaaaggatacttttcttgtatattttttgagatcgaagaaacgacaatgtccaggaaacagaaccagaaggattcatcaggattcatttttgatttgcagtccaataccgtactggcccagggaggagcttttgagaacatgaaagagaagataaatgcggtacgtgcaatagttcctaataagagcaacaatgaaattatcctggttttgcagcactttgataactgtgtggacaaaacagtacaagcattcatggaaggtagtgccagtgaagtactcaaagaatggacagtaacaggcaagaaaaagaacaaaaagaagaaaaacaaaccgaaacctgccgcagaaccaagtaacggcatcccagattccagtaaatcagtttccattcaagaggaacagtctgcgccttcctcagagaaaggtggtatgaatggctaccatgtcaatggtgccatcaatgacactgagtctgtggactcactcagtgaaggtttggagacactttcaatagatgccagagaattggaggatcccgagtctgccatgctagatacgctggatagaacaggatccatgctgcagaatggtgtctctgattttgagaccaagtctttgactatgcactctattcacaattctcaacaacccaggaatgctgccaaatctctctcaagacctaccacagaaactcagttttcaaatatggggatggaagatgttcccctcgccaccagtaaaaagctaagttccaatattgaaaaatctgtaaaagacctccagcgctgcacagtgtctcttgcacggtatcgagttgtagttaaagaagagatggatgcctccattaagaaaatgaaacaagcctttgctgaattggagagctgtttaatggatcgagaagtggcgttgcttgctgaaatggacaaagtgaaagctgaagcaatggaaattttgctcagccgacaaaagaaggctgaacttctaaagaagatgactcatgtggctgttcaaatgtcagagcagcaattggttgagctcagagctgatatcaagcactttgttagtgaacgtaaatatgatgaggatctgggacgagtagcccggttcacctgtgatgtagagaccctaaagaagagcattgattcatttggacaagtgtctcatccaaagaacagctattcgaccagatcccgatgtagctcagttacatctgtgtccttgagtagcccaagtgatgcctctgctgcttcctcttccacctgtgcctctcctcccagccttacaagtgctaacaagaaaaactttgcaccgggagagactcctgcagccatagcaaactccagtggccagccctaccagccacttcgggaggtattgccagggaacagacgaggaggacagggctataggccacaaggccaaaagtccaatgaccccatgaaccaagggcggcatgacagtatgggtcgttacagaaacagctcgtggtattcatctggttccaggtatcagagtgctccatctcaggcaccaggaaacaccattgaaagaggccagactcactctgcagggaccaatggaactggagtcagcatggagcccagccctcccacgccttcattcaaaaaggggctcccccagcgcaaacccaggacctctcagactgaagccgtgaactcttgagagaaaatccagttggcctctctcctctatccacacaattcaacttgataactggactttaggaaacttacagttagatgtaataacaaaaagaagtttatgcgtatcactttttgtgccattctaagtatttttggtttcttgtctccttatttcctctttaccatttttggaggggaagctattttttttccttgatctttcccagtgatatggattgaatctggttggtcatttccaccaggaatcagaggcagctgttaccaggtttcggccttccagttgatccctccactgtccaggctgtctcaggaggaggtgaatcagagctagtctgtcacctttccaatctaagccgaagccacaggtgcctgacaggttcccttctaacaactatttgaccaagagaggcaatcagggggttgtatactgcactggattcgccagagaagggaaaatttaattagtgaaaaggaaagaacactaggaaacatttgagaacctgcctctatcccagaatgtgctggagatttgacactcaaatcagtgtttagtcttctgcttggcaccatagcttaacctgcagtttcttcaaaatgcccaatgccttgtttcctattaccttagattgcaaaccagtctagggaagtctatgagaaagtagcatttaattaaagtttaaaaaaaaaaaggttgggcgttgtggctcatgcctgtaatcccagcactttgggaggctgaggcgggtggatcactaggtcaggagttcaagaccagcctggccaacatggtgaaaccctgtctgtactaaaaatacaaaaattagctgagcatggtggcgtgtgcctgtaatctcagctactcaggaggctgaggcaggagaatcgcttgaacccaggaggcggaggctgcagtgagctgagattgtgccactgcactccagcctgggagacagagcaagactcagtctcaaaaaaaaaaaaaaaagcatttttctgttttaatgtttggagacttttttttttgttctctccctttcctgaaccctattctgatcctgaaccaaatttatagcaatataattagtgttaatctaaggcattactcatcaaaaaaattgctgcagtctttacagttgaataaataaaaacaactgcataaata

SEQ ID NO: 29769 - DNA, 2807 bp, Homo sapiens
  source 1..2807: mol_type = unassigned DNA
gtctctaaaaaaaaaaaaaaaaaagattcatcaggattcatttttgatttgcagtccaataccgtactggcccagggaggagcttttgagaacatgaaagagaagataaatgcggtacgtgcaatagttcctaataagagcaacaatgaaattatcctggttttgcagcactttgataactgtgtggacaaaacagtacaagcattcatggaaggtagtgccagtgaagtactcaaagaatggacagtaacaggcaagaaaaagaacaaaaagaagaaaaacaaaccgaaacctgccgcagaaccaagtaacggcatcccagattccagtaaatcagtttccattcaagaggaacagtctgcgccttcctcagagaaaggtggtatgaatggctaccatgtcaatggtgccatcaatgacactgagtctgtggactcactcagtgaaggtttggagacactttcaatagatgccagagaattggaggatcccgagtctgccatgctagatacgctggatagaacaggatccatgctgcagaatggtgtctctgattttgagaccaagtctttgactatgcactctattcacaattctcaacaacccaggaatgctgccaaatctctctcaagacctaccacagaaactcagttttcaaatatggggatggaagatgttcccctcgccaccagtaaaaagctaagttccaatattgaaaaatctgtaaaagacctccagcgctgcacagtgtctcttgcacggtatcgagttgtagttaaagaagagatggatgcctccattaagaaaatgaaacaagcctttgctgaattggagagctgtttaatggatcgagaagtggcgttgcttgctgaaatggacaaagtgaaagctgaagcaatggaaattttgctcagccgacaaaagaaggctgaacttctaaagaagatgactcatgtggctgttcaaatgtcagagcagcaattggttgagctcagagctgatatcaagcactttgttagtgaacgtaaatatgatgaggatctgggacgagtagcccggttcacctgtgatgtagagaccctaaagaagagcattgattcatttggacaagtgtctcatccaaagaacagctattcgaccagatcccgatgtagctcagttacatctgtgtccttgagtagcccaagtgatgcctctgctgcttcctcttccacctgtgcctctcctcccagccttacaagtgctaacaagaaaaactttgcaccgggagagactcctgcagccatagcaaactccagtggccagccctaccagccacttcgggaggtattgccagggaacagacgaggaggacagggctataggccacaaggccaaaagtccaatgaccccatgaaccaagggcggcatgacagtatgggtcgttacagaaacagctcgtggtattcatctggttccaggtatcagagtgctccatctcaggcaccaggaaacaccattgaaagaggccagactcactctgcagggaccaatggaactggagtcagcatggagcccagccctcccacgccttcattcaaaaaggggctcccccagcgcaaacccaggacctctcagactgaagccgtgaactcttgagagaaaatccagttggcctctctcctctatccacacaattcaacttgataactggactttaggaaacttacagttagatgtaataacaaaaagaagtttatgcgtatcactttttgtgccattctaagtatttttggtttcttgtctccttatttcctctttaccatttttggaggggaagctattttttttccttgatctttcccagtgatatggattgaatctggttggtcatttccaccaggaatcagaggcagctgttaccaggtttcggccttccagttgatccctccactgtccaggctgtctcaggaggaggtgaatcagagctagtctgtcacctttccaatctaagccgaagccacaggtgcctgacaggttcccttctaacaactatttgaccaagagaggcaatcagggggttgtatactgcactggattcgccagagaagggaaaatttaattagtgaaaaggaaagaacactaggaaacatttgagaacctgcctctatcccagaatgtgctggagatttgacactcaaatcagtgtttagtcttctgcttggcaccatagcttaacctgcagtttcttcaaaatgcccaatgccttgtttcctattaccttagattgcaaaccagtctagggaagtctatgagaaagtagcatttaattaaagtttaaaaaaaaaaaggttgggcgttgtggctcatgcctgtaatcccagcactttgggaggctgaggcgggtggatcactaggtcaggagttcaagaccagcctggccaacatggtgaaaccctgtctgtactaaaaatacaaaaattagctgagcatggtggcgtgtgcctgtaatctcagctactcaggaggctgaggcaggagaatcgcttgaacccaggaggcggaggctgcagtgagctgagattgtgccactgcactccagcctgggagacagagcaagactcagtctcaaaaaaaaaaaaaaaagcatttttctgttttaatgtttggagacttttttttttgttctctccctttcctgaaccctattctgatcctgaaccaaatttatagcaatataattagtgttaatctaaggcattactcatcaaaaaaattgctgcagtctttacagttgaataaataaaaacaactgcataaatatgccc

SEQ ID NO: 29770 - DNA, 552 bp, Homo sapiens
  source 1..552: mol_type = unassigned DNA
cgttttccccttccatctactttgtccccaaccctctccccgagtctcttcctttccccgacccgggagcgtccgggacgcggagcccggagctggggcgacgaggcgattgcgggggcctgggctagctgctggctaccaatattctactttctgtctctatgaatgtgactaccctggttacctcatatagatggagtctcactatggtgcctactctgattttgaactcctggcttcaagcaatcctcccaccttggccttccaaagtgctgggattacagaatctccctggaaaaggagacatgaatgtctgcaatgatacttcctgacaagaagttgatacaagaaaaggaaaggagattaacagctagtgagcagaatttcgaacagcaggatttcgtattttttgcttccaactgcacacttccgttgcccacttttaaatcagagatacctacactcaaaacccagacaaggcaaaaggatacttttcttgtatattttttgagatcgaagaaacgacaatgtccaggaaacagaaccagaagg

SEQ ID NO: 29771 - DNA, 546 bp, Homo sapiens
  source 1..546: mol_type = unassigned DNA
aaccgatgccgccgggtacgagctgtgctgcacgcggacgcgagctcgcgtcccacccgttttccccttccatctactttgtccccaaccctctccccgagtctcttcctttccccgctgaggtcactagtgaactctgcttccaagtactcctgcaaagtacaccacaagcctgtctatattctcaagccatccgcttcagttcatatgaccacacttgcatgtcagcaacagaagagaacacacatcatacagcatttacagcagtggacaaagagaatctccctggaaaaggagacatgaatgtctgcaatgatacttcctgacaagaagttgatacaagaaaaggaaaggagattaacagctagtgagcagaatttcgaacagcaggatttcgtattttttgcttccaactgcacacttccgttgcccacttttaaatcagagatacctacactcaaaacccagacaaggcaaaaggatacttttcttgtatattttttgagatcgaagaaacgacaatgtccaggaaacagaaccagaagg

SEQ ID NO: 29772 - DNA, 558 bp, Homo sapiens
  source 1..558: mol_type = unassigned DNA
gatgccgccgggtacgagctgtgctgcacgcggacgcgagctcgcgtcccacccgttttccccttccatctactttgtccccaaccctctccccgagtctcttcctttccccgaatctccctggaaaaggagacatgaatgtctgcaatgatacttcctgacaagaagttgatacaagaaaaggaaaggagattaacagctagtgagcagaatttcgaacagcaggatttcgtattttttgcttccaactgcacacttccgttgcccacttttaaatcagagatacctacactcaaaacccagacaaggcaaaaggatacttttcttgtatattttttgagatcgaagaaacgacaatgtccaggaaacagaaccagaaggattcatcaggattcatttttgatttgcagtccaataccgtactggcccagggaggagcttttgagaacatgaaagagaagataaatgcggtacgtgcaatagttcctaataagagcaacaatgaaattatcctggttttgcagcactttgataactgtgtggacaaaacagtacaag

SEQ ID NO: 29773 - DNA, 505 bp, Homo sapiens
  source 1..505: mol_type = unassigned DNA
agacccgggagcgtccgggacgcggagcccggagctggggcgacgaggcgattgcgggggcctgggctagagatggagtctcactatggtgcctactctgattttgaactcctggcttcaagcaatcctcccaccttggccttccaaagtgctgggattacagaatctccctggaaaaggagacatgaatgtctgcaatgatacttcctgacaagaagttgatacaagaaaaggaaaggagattaacagctagtgagcagaatttcgaacagcaggatttcgtattttttgcttccaactgcacacttccgttgcccacttttaaatcagagatacctacactcaaaacccagacaaggcaaaaggatacttttcttgtatattttttgagatcgaagaaacgacaatgtccaggaaacagaaccagaaggattcatcaggattcatttttgatttgcagtccaataccgtactggcccagggaggagcttttgagaacatgaaa

SEQ ID NO: 29774 - DNA, 570 bp, Homo sapiens
  source 1..570: mol_type = unassigned DNA
gtgctgcacgcggacgcgagctcgcgtcccacccgttttccccttccatctactttgtccccaaccctctccccgagtctcttcctttccccgacccgggagcgtccgggacgcggagcccggagctggggcgacgaggcgattgcgggggcctgggctagctgctggctaccaatattctactttctgtctctatgaatgtgactaccctggttacctcatatttatttgcagtgacttaaaatttggaggcaaattttccttaagaggatatcaagttccagtatcttcagatgttgataagccgttagaatctccctggaaaaggagacatgaatgtctgcaatgatacttcctgacaagaagttgatacaagaaaaggaaaggagattaacagctagtgagcagaatttcgaacagcaggatttcgtattttttgcttccaactgcacacttccgttgcccacttttaaatcagagatacctacactcaaaacccagacaaggcaaaaggatacttttcttgtatattttttgagatcgaagaaacgacaatgtccaggaaacaga

SEQ ID NO: 29775 - DNA, 643 bp, Homo sapiens
  source 1..643: mol_type = unassigned DNA
gcccaggagagaagtggggaggcggcggtgggggcggggcggcgtccggctctgagagagctgggggaggagcgcggcggcgacggcggcggtggctctagaaggggaggtggaggatctcctttcctcttctcagacccgggagcgtccgggacgcggagcccggagctggggcgacgaggcgattgcgggggcctgggctagttatttgcagtgacttaaaatttggaggcaaattttccttaagaggatatcaagttccagtatcttcagatgttgataagccgttagaatctccctggaaaaggagacatgaatgtctgcaatgatacttcctgacaagaagttgatacaagaaaaggaaaggagattaacagctagtgagcagaatttcgaacagcaggatttcgtattttttgcttccaactgcacacttccgttgcccacttttaaatcagagatacctacactcaaaacccagacaaggcaaaaggatacttttcttgtatattttttgagatcgaagaaacgacaatgtccaggaaacagaaccagaaggattcatcaggattcatttttgatttgcagtccaataccgtactggcccagggaggagcttttgagaacatgaaagagaaggtaa

SEQ ID NO: 29776 - DNA, 570 bp, Homo sapiens
  source 1..570: mol_type = unassigned DNA
tccgtcagttcagctcgggccctccgttcccggcgcgcgccgggtccctaaccgatgccgccggctgctggctaccaatattctactttctgtctctatgaatgtgactaccctggttacctcatataatctccctggaaaaggagacatgaatgtctgcaatgatacttcctgacaagaagttgatacaagaaaaggaaaggagattaacagctagtgagcagaatttcgaacagcaggatttcgtattttttgcttccaactgcacacttccgttgcccacttttaaatcagagatacctacactcaaaacccagacaaggcaaaaggatacttttcttgtatattttttgagatcgaagaaacgacaatgtccaggaaacagaaccagaaggattcatcaggattcatttttgatttgcagtccaataccgtactggcccagggaggagcttttgagaacatgaaagagaagataaatgcggtacgtgcaatagttcctaataagagcaacaatgaaattatcctggttttgcagcactttgataactgtgtggacaaaacagtaca

SEQ ID NO: 29777 - DNA, 527 bp, Homo sapiens
  source 1..527: mol_type = unassigned DNA
aaccgatgccgccgggtacgagctgtgctgcacgcggacgcgagctcgcgtcccacccgttttccccttccatctactttgtccccaaccctctccccgagtctcttcctttccccgctgctggctaccaatattctactttctgtctctatgaatgtgactaccctggttacctcatataatctccctggaaaaggagacatgaatgtctgcaatgatacttcctgacaagaagttgatacaagaaaaggaaaggagattaacagctagtgagcagaatttcgaacagcaggatttcgtattttttgcttccaactgcacacttccgttgcccacttttaaatcagagatacctacactcaaaacccagacaaggcaaaaggatacttttcttgtatattttttgagatcgaagaaacgacaatgtccaggaaacagaaccagaaggattcatcaggattcatttttgatttgcagtccaataccgtactggcccagggaggagcttttgagaacatgaaagagaa

SEQ ID NO: 29778 - DNA, 675 bp, Homo sapiens
  source 1..675: mol_type = unassigned DNA
gcgctctctcaggaggcagagcgaccgcgcggtccggaggccccagcgtttcccgtcgttggcgactctgaaattgccttttggaacaaaacttgggtcgggaaggaggcgaaggggaaagcggtgtgaagtcctcgaatctccctggaaaaggagacatgaatgtctgcaatgatacttcctgacaagaagttgatacaagaaaaggaaaggagattaacagctagtgagcagaatttcgaacagcaggatttcgtattttttgcttccaactgcacacttccgttgcccacttttaaatcagagatacctacactcaaaacccagacaaggcaaaaggatacttttcttgtatattttttgagatcgaagaaacgacaatgtccaggaaacagaaccagaaggattcatcaggattcatttttgatttgcagtccaataccgtactggcccagggaggagcttttgagaacatgaaagagaagataaatgcggtacgtgcaatagttcctaataagagcaacaatgaaattatcctggttttgcagcactttgataactgtgtggacaaaacagtacaagcattcatggaaggtagtgccagtgaagtactcaaagaatggacagtaacaggcaagaaaaagaacaaaaagaagaaaaacaaaccgaaacctg

SEQ ID NO: 29779 - DNA, 720 bp, Homo sapiens
  source 1..720: mol_type = unassigned DNA
gaggatctcctttcctcttctcagacccgggagcgtccgggacgcggagcccggagctggggcgacgaggcgattgcgggggcctgggctagctgaggtcactagtgaactctgcttccaagtactcctgcaaagtacaccacaagcctgtctatattctcaagccatccgcttcagttcatatgaccacacttgcatgtcagcaacagaagagaacacacatcatacagcatttacagcagtggacaaagagaatctccctggaaaaggagacatgaatgtctgcaatgatacttcctgacaagaagttgatacaagaaaaggaaaggagattaacagctagtgagcagaatttcgaacagcaggatttcgtattttttgcttccaactgcacacttccgttgcccacttttaaatcagagatacctacactcaaaacccagacaaggcaaaaggatacttttcttgtatattttttgagatcgaagaaacgacaatgtccaggaaacagaaccagaaggattcatcaggattcatttttgatttgcagtccaataccgtactggcccagggaggagcttttgagaacatgaaagagaagataaatgcggtacgtgcaatagttcctaataagagcaacaatgaaattatcctggttttgcagcactttgataactgtgtggacaaaacagtacaagcattcatggaaggtagtgccag

SEQ ID NO: 29780 - DNA, 465 bp, Homo sapiens
  source 1..465: mol_type = unassigned DNA
cggagctggggcgacgaggcgattgcgggggcctgggctagctgctggctaccaatattctactttctgtctctatgaatgtgactaccctggttacctcatatttatttgcagtgacttaaaatttggaggcaaattttccttaagaggatatcaagttccagtatcttcagatgttgataagccgttagaatctccctggaaaaggagacatgaatgtctgcaatgatacttcctgacaagaagttgatacaagaaaaggaaaggagattaacagctagtgagcagaatttcgaacagcaggatttcgtattttttgcttccaactgcacacttccgttgcccacttttaaatcagagatacctacactcaaaacccagacaaggcaaaaggatacttttcttgtatattttttgagatcgaagaaacgacaatgtccaggaaacagaaccagaaggattcat

SEQ ID NO: 29781 - DNA, 2993 bp, Homo sapiens
  source 1..2993: mol_type = unassigned DNA
ctcttctcagacccgggagcgtccgggacgcggagcccggagctggggcgacgaggcgattgcgggggcctgggctagctgctggctaccaatattctactttctgtctctatgaatgtgactaccctggttacctcatataatctccctggaaaaggagacatgaatgtctgcaatgatacttcctgacaagaagttgatacaagaaaaggaaaggagattaacagctagtgagcagaatttcgaacagcaggatttcgtattttttgcttccaactgcacacttccgttgcccacttttaaatcagagatacctacactcaaaacccagacaaggcaaaaggatacttttcttgtatattttttgagatcgaagaaacgacaatgtccaggaaacagaaccagaaggattcatcaggattcatttttgatttgcagtccaataccgtactggcccagggaggagcttttgagaacatgaaagagaagataaatgcggtacgtgcaatagttcctaataagagcaacaatgaaattatcctggttttgcagcactttgataactgtgtggacaaaacagtacaagcattcatggaaggtagtgccagtgaagtactcaaagaatggacagtaacaggcaagaaaaagaacaaaaagaagaaaaacaaaccgaaacctgccgcagaaccaagtaacggcatcccagattccagtaaatcagtttccattcaagaggaacagtctgcgccttcctcagagaaaggtggtatgaatggctaccatgtcaatggtgccatcaatgacactgagtctgtggactcactcagtgaaggtttggagacactttcaatagatgccagagaattggaggatcccgagtctgccatgctagatacgctggatagaacaggatccatgctgcagaatggtgtctctgattttgagaccaagtctttgactatgcactctattcacaattctcaacaacccaggaatgctgccaaatctctctcaagacctaccacagaaactcagttttcaaatatggggatggaagatgttcccctcgccaccagtaaaaagctaagttccaatattgaaaaatctgtaaaagacctccagcgctgcacagtgtctcttgcacggtatcgagttgtagttaaagaagagatggatgcctccattaagaaaatgaaacaagcctttgctgaattggagagctgtttaatggatcgagaagtggcgttgcttgctgaaatggacaaagtgaaagctgaagcaatggaaattttgctcagccgacaaaagaaggctgaacttctaaagaagatgactcatgtggctgttcaaatgtcagagcagcaattggttgagctcagagctgatatcaagcactttgttagtgaacgtaaatatgatgaggatctgggacgagtagcccggttcacctgtgatgtagagaccctaaagaagagcattgattcatttggacaagtgtctcatccaaagaacagctattcgaccagatcccgatgtagctcagttacatctgtgtccttgagtagcccaagtgatgcctctgctgcttcctcttccacctgtgcctctcctcccagccttacaagtgctaacaagaaaaactttgcaccgggagagactcctgcagccatagcaaactccagtggccagccctaccagccacttcgggaggtattgccagggaacagacgaggaggacagggctataggccacaaggccaaaagtccaatgaccccatgaaccaagggcggcatgacagtatgggtcgttacagaaacagctcgtggtattcatctggttccaggtatcagagtgctccatctcaggcaccaggaaacaccattgaaagaggccagactcactctgcagggaccaatggaactggagtcagcatggagcccagccctcccacgccttcattcaaaaaggggctcccccagcgcaaacccaggacctctcagactgaagccgtgaactcttgagagaaaatccagttggcctctctcctctatccacacaattcaacttgataactggactttaggaaacttacagttagatgtaataacaaaaagaagtttatgcgtatcactttttgtgccattctaagtatttttggtttcttgtctccttatttcctctttaccatttttggaggggaagctattttttttccttgatctttcccagtgatatggattgaatctggttggtcatttccaccaggaatcagaggcagctgttaccaggtttcggccttccagttgatccctccactgtccaggctgtctcaggaggaggtgaatcagagctagtctgtcacctttccaatctaagccgaagccacaggtgcctgacaggttcccttctaacaactatttgaccaagagaggcaatcagggggttgtatactgcactggattcgccagagaagggaaaatttaattagtgaaaaggaaagaacactaggaaacatttgagaacctgcctctatcccagaatgtgctggagatttgacactcaaatcagtgtttagtcttctgcttggcaccatagcttaacctgcagtttcttcaaaatgcccaatgccttgtttcctattaccttagattgcaaaccagtctagggaagtctatgagaaagtagcatttaattaaagtttaaaaaaaaaaaggttgggcgttgtggctcatgcctgtaatcccagcactttgggaggctgaggcgggtggatcactaggtcaggagttcaagaccagcctggccaacatggtgaaaccctgtctgtactaaaaatacaaaaattagctgagcatggtggcgtgtgcctgtaatctcagctactcaggaggctgaggcaggagaatcgcttgaacccaggaggcggaggctgcagtgagctgagattgtgccactgcactccagcctgggagacagagcaagactcagtctc

SEQ ID NO: 29782 - DNA, 3318 bp, Homo sapiens
  source 1..3318: mol_type = unassigned DNA
gacggcggcggtggctctagaaggggaggtggaggatctcctttcctcttctcagacccgggagcgtccgggacgcggagcccggagctggggcgacgaggcgattgcgggggcctgggctagctgctggctaccaatattctactttctgtctctatgaatgtgactaccctggttacctcatatggaataaggagggagactgatttggaaacatctgtgaggagcaaagaggacacttactcacccccaggtccagtggtatgagagaatctccctggaaaaggagacatgaatgtctgcaatgatacttcctgacaagaagttgatacaagaaaaggaaaggagattaacagctagtgagcagaatttcgaacagcaggatttcgtattttttgcttccaactgcacacttccgttgcccacttttaaatcagagatacctacactcaaaacccagacaaggcaaaaggatacttttcttgtatattttttgagatcgaagaaacgacaatgtccaggaaacagaaccagaaggattcatcaggattcatttttgatttgcagtccaataccgtactggcccagggaggagcttttgagaacatgaaagagaagataaatgcggtacgtgcaatagttcctaataagagcaacaatgaaattatcctggttttgcagcactttgataactgtgtggacaaaacagtacaagcattcatggaaggtagtgccagtgaagtactcaaagaatggacagtaacaggcaagaaaaagaacaaaaagaagaaaaacaaaccgaaacctgccgcagaaccaagtaacggcatcccagattccagtaaatcagtttccattcaagaggaacagtctgcgccttcctcagagaaaggtggtatgaatggctaccatgtcaatggtgccatcaatgacactgagtctgtggactcactcagtgaaggtttggagacactttcaatagatgccagagaattggaggatcccgagtctgccatgctagatacgctggatagaacaggatccatgctgcagaatggtgtctctgattttgagaccaagtctttgactatgcactctattcacaattctcaacaacccaggaatgctgccaaatctctctcaagacctaccacagaaactcagttttcaaatatggggatggaagatgttcccctcgccaccagtaaaaagctaagttccaatattgaaaaatctgtaaaagacctccagcgctgcacagtgtctcttgcacggtatcgagttgtagttaaagaagagatggatgcctccattaagaaaatgaaacaagcctttgctgaattggagagctgtttaatggatcgagaagtggcgttgcttgctgaaatggacaaagtgaaagctgaagcaatggaaattttgctcagccgacaaaagaaggctgaacttctaaagaagatgactcatgtggctgttcaaatgtcagagcagcaattggttgagctcagagctgatatcaagcactttgttagtgaacgtaaatatgatgaggatctgggacgagtagcccggttcacctgtgatgtagagaccctaaagaagagcattgattcatttggacaagtgtctcatccaaagaacagctattcgaccagatcccgatgtagctcagttacatctgtgtccttgagtagcccaagtgatgcctctgctgcttcctcttccacctgtgcctctcctcccagccttacaagtgctaacaagaaaaactttgcaccgggagagactcctgcagccatagcaaactccagtggccagccctaccagccacttcgggaggtattgccagggaacagacgaggaggacagggctataggccacaaggccaaaagtccaatgaccccatgaaccaagggcggcatgacagtatgggtcgttacagaaacagctcgtggtattcatctggttccaggtatcagagtgctccatctcaggcaccaggaaacaccattgaaagaggccagactcactctgcagggaccaatggaactggagtcagcatggagcccagccctcccacgccttcattcaaaaaggggctcccccagcgcaaacccaggacctctcagactgaagccgtgaactcttgagagaaaatccagttggcctctctcctctatccacacaattcaacttgataactggactttaggaaacttacagttagatgtaataacaaaaagaagtttatgcgtatcactttttgtgccattctaagtatttttggtttcttgtctccttatttcctctttaccatttttggaggggaagctattttttttccttgatctttcccagtgatatggattgaatctggttggtcatttccaccaggaatcagaggcagctgttaccaggtttcggccttccagttgatccctccactgtccaggctgtctcaggaggaggtgaatcagagctagtctgtcacctttccaatctaagccgaagccacaggtgcctgacaggttcccttctaacaactatttgaccaagagaggcaatcagggggttgtatactgcactggattcgccagagaagggaaaatttaattagtgaaaaggaaagaacactaggaaacatttgagaacctgcctctatcccagaatgtgctggagatttgacactcaaatcagtgtttagtcttctgcttggcaccatagcttaacctgcagtttcttcaaaatgcccaatgccttgtttcctattaccttagattgcaaaccagtctagggaagtctatgagaaagtagcatttaattaaagtttaaaaaaaaaaaggttgggcgttgtggctcatgcctgtaatcccagcactttgggaggctgaggcgggtggatcactaggtcaggagttcaagaccagcctggccaacatggtgaaaccctgtctgtactaaaaatacaaaaattagctgagcatggtggcgtgtgcctgtaatctcagctactcaggaggctgaggcaggagaatcgcttgaacccaggaggcggaggctgcagtgagctgagattgtgccactgcactccagcctgggagacagagcaagactcagtctcaaaaaaaaaaaaaaaagcatttttctgttttaatgtttggagacttttttttttgttctctccctttcctgaaccctattctgatcctgaaccaaatttatagcaatataattagtgttaatctaaggcattactcatcaaaaaaattgctgcagtctttacagttgaataaataaaaacaactgcataaatatgc

SEQ ID NO: 29783 - DNA, 2423 bp, Homo sapiens
  source 1..2423: mol_type = unassigned DNA
gcagaaacccacggctgaagcccacgatgcccatgtgtaacttggttattacacacacgtttggagcccagtgtgcagacccgcagcgcagaggaggcggcggaacaccccgggttggtcgggtttccaagggctgacccgagctccagcactttttccgcgcctgatttttcagagctcttcagaaaccaggctgctttcaggaacattgctgtggattcccagggcctattccactagaagcaagatggctgaactcaatactcatgtgaatgtcaaggaaaagatctatgcagttagatcagttgttcccaacaaaagcaataatgaaatagtcctggtgctccaacagtttgattttaatgtggataaagccgtgcaagcctttgtggatggcagtgcaattcaagttctaaaagaatggaatatgacaggaaaaaagaagaacaataaaagaaaaagaagcaagtccaagcagcatcaaggcaacaaagatgctaaagacaaggtggagaggcctgaggcagggcccctgcagccgcagccaccacagattcaaaacggccccatgaatggctgcgagaaggacagctcgtccacagattctgctaacgaaaaaccagcccttatccctcgtgagaaaaagatctcgatacttgaggaaccttcaaaggcacttcgtggggtcacagaaggcaacagactactgcaacagaaactatccttagatgggaaccccaaacctatacatggaacaacagagaggtcagatggcctacagtggtcagctgagcagccttgtaacccaagcaagcctaaggcaaaaacatctcctgttaagtccaatacccctgcagctcatcttgaaataaagccagatgagttggcaaagaaaagaggcccaaatattgagaaatcagtgaaggatttgcaacgctgcaccgtttctctaactagatatcgcgtcatgattaaggaagaagtggatagttccgtgaagaagatcaaagctgcctttgctgaattacacaactgcatcattgacaaagaagtttcattaatggcagaaatggataaagttaaagaagaagccatggaaatcctgactgctcgtcagaagaaagcagaagaactaaagagactcactgaccttgccagtcagatggcagagatgcagctggccgaactcagggcagaaattaagcactttgtcagcgagcgtaaatatgacgaggagctcgggaaagctgcccggttttcctgtgacatcgaacagctgaaggcccaaatcatgctctgcggagaaattacacatccaaagaacaactattcctcaagaactccctgcagctccctgctgcctctgctgaatgcgcacgcagcaacctctgggaaacagagtaacttttcccgaaaatcatccactcacaataagccctctgaaggcaaagcggcaaaccccaaaatggtgagcagtctccccagcaccgccgacccctctcaccagaccatgccggccaacaagcagaatggatcttctaaccaaagacggagatttaatccacagtatcataacaacaggctaaatgggcctgccaagtcgcagggcagtgggaatgaagccgagccactgggaaagggcaacagccgccacgaacacagaagacagccgcacaacggcttccggcccaaaaacaaaggcggtgccaaaaatcaagaggcttccttggggatgaagacccccgaggccccggcccattctgaaaagccccggcgaaggcagcacgctgcagacacctcggaggccaggcccttccggggtagtgtcggtagggtttcacagtgcaatctctgccccacgagaatagaagtttccacagatgcagcagttctctcagtcccggctgtgacgttggtggcctgagctaggaggaaaaagagcagttttcactcagttttggttccctgcccgaggtgctgacccaattcgctgccaaaagagtgtcaatcagaatatacaaatcccgtatggttgtgtcatcctctcttaatcatttttactaattctaataatcagctctagcttgcttcataattttcatggctttgcttgatctgttgatgctttctctcatcaagactttgcagcattttagccaggcagtatttactcattattaggaaaatcaagatgtggctgaagatcagaggctcagttagcaacctgtgttgtagcagtgatgtcagtccattgattgtctttagagagttaatgttacaaaaaagaattcttaataatcagacaaacatgatctgctgaggacacatgcgcttttgtagaatttaacatctggtgtttttctgaaaaaatatatatacatatattgctttatttgaaacaaattaaaatatgctgcatttga

SEQ ID NO: 29784 - DNA, 2119 bp, Homo sapiens
  source 1..2119: mol_type = unassigned DNA
acaaaacccgagagaggcgtgagcagcgctgtgtttgcgagcgggagcgaggggcgccggctggggtgtgtgctcctgagctcttcagaaaccaggctgctttcaggaacattgctgtggattcccagggcctattccactagaagcaagatggctgaactcaatactcatgtgaatgtcaaggaaaagatctatgcagttagatcagttgttcccaacaaaagcaataatgaaatagtcctggtgctccaacagtttgattttaatgtggataaagccgtgcaagcctttgtggatggcagtgcaattcaagttctaaaagaatggaatatgacaggaaaaaagaagaacaataaaagaaaaagaagcaagtccaagcagcatcaaggcaacaaagatgctaaagacaaggtggagaggcctgaggcagggcccctgcagccgcagccaccacagattcaaaacggccccatgaatggctgcgagaaggacagctcgtccacagattctgctaacgaaaaaccagcccttatccctcgtgagaaaaagatctcgatacttgaggaaccttcaaaggcacttcgtggggtcacaggcccaaatattgagaaatcagtgaaggatttgcaacgctgcaccgtttctctaactagatatcgcgtcatgattaaggaagaagtggatagttccgtgaagaagatcaaagctgcctttgctgaattacacaactgcatcattgacaaagaagtttcattaatggcagaaatggataaagttaaagaagaagccatggaaatcctgactgctcgtcagaagaaagcagaagaactaaagagactcactgaccttgccagtcagatggcagagatgcagctggccgaactcagggcagaaattaagcactttgtcagcgagcgtaaatatgacgaggagctcgggaaagctgcccggttttcctgtgacatcgaacagctgaaggcccaaatcatgctctgcggagaaattacacatccaaagaacaactattcctcaagaactccctgcagctccctgctgcctctgctgaatgcgcacgcagcaacctctgggaaacagagtaacttttcccgaaaatcatccactcacaataagccctctgaaggcaaagcggcaaaccccaaaatggtgagcagtctccccagcaccgccgacccctctcaccagaccatgccggccaacaagcagaatggatcttctaaccaaagacggagatttaatccacagtatcataacaacaggctaaatgggcctgccaagtcgcagggcagtgggaatgaagccgagccactgggaaagggcaacagccgccacgaacacagaagacagccgcacaacggcttccggcccaaaaacaaaggcggtgccaaaaatcaagaggcttccttggggatgaagacccccgaggccccggcccattctgaaaagccccggcgaaggcagcacgctgcagacacctcggaggccaggcccttccggggtagtgtcggtagggtttcacagtgcaatctctgccccacgagaatagaagtttccacagatgcagcagttctctcagtcccggctgtgacgttggtggcctgagctaggaggaaaaagagcagttttcactcagttttggttccctgcccgaggtgctgacccaattcgctgccaaaagagtgtcaatcagaatatacaaatcccgtatggttgtgtcatcctctcttaatcatttttactaattctaataatcagctctagcttgcttcataattttcatggctttgcttgatctgttgatgctttctctcatcaagactttgcagcattttagccaggcagtatttactcattattaggaaaatcaagatgtggctgaagatcagaggctcagttagcaacctgtgttgtagcagtgatgtcagtccattgattgtctttagagagttaatgttacaaaaaagaattcttaataatcagacaaacatgatctgctgaggacacatgcgcttttgtagaatttaacatctggtgtttttctgaaaaaatatatatacatatattgctttatttgaaacaaattaaaatatgctgcatttga

SEQ ID NO: 29785 - DNA, 2463 bp, Homo sapiens
  source 1..2463: mol_type = unassigned DNA
ggaatccagtccgggggccgagctggctgcgccctccgctgcaagcgccggcagcgcggggcgagctccggacggcgcgcggcccaggcagcggctcccgctcggcccgccctccgagccgcaggggccgccaccgccgcggcgcctcccctggcgaccgcgcccccgggccccggctccggcccgggacggaggagccggcgctcgacacagagagctcttcagaaaccaggctgctttcaggaacattgctgtggattcccagggcctattccactagaagcaagatggctgaactcaatactcatgtgaatgtcaaggaaaagatctatgcagttagatcagttgttcccaacaaaagcaataatgaaatagtcctggtgctccaacagtttgattttaatgtggataaagccgtgcaagcctttgtggatggcagtgcaattcaagttctaaaagaatggaatatgacaggaaaaaagaagaacaataaaagaaaaagaagcaagtccaagcagcatcaaggcaacaaagatgctaaagacaaggtggagaggcctgaggcagggcccctgcagccgcagccaccacagattcaaaacggccccatgaatggctgcgagaaggacagctcgtccacagattctgctaacgaaaaaccagcccttatccctcgtgagaaaaagatctcgatacttgaggaaccttcaaaggcacttcgtggggtcacagaaggcaacagactactgcaacagaaactatccttagatgggaaccccaaacctatacatggaacaacagagaggtcagatggcctacagtggtcagctgagcagccttgtaacccaagcaagcctaaggcaaaaacatctcctgttaagtccaatacccctgcagctcatcttgaaataaagccagatgagttggcaaagaaaagaggcccaaatattgagaaatcagtgaaggatttgcaacgctgcaccgtttctctaactagatatcgcgtcatgattaaggaagaagtggatagttccgtgaagaagatcaaagctgcctttgctgaattacacaactgcatcattgacaaagaagtttcattaatggcagaaatggataaagttaaagaagaagccatggaaatcctgactgctcgtcagaagaaagcagaagaactaaagagactcactgaccttgccagtcagatggcagagatgcagctggccgaactcagggcagaaattaagcactttgtcagcgagcgtaaatatgacgaggagctcgggaaagctgcccggttttcctgtgacatcgaacagctgaaggcccaaatcatgctctgcggagaaattacacatccaaagaacaactattcctcaagaactccctgcagctccctgctgcctctgctgaatgcgcacgcagcaacctctgggaaacagagtaacttttcccgaaaatcatccactcacaataagccctctgaaggcaaagcggcaaaccccaaaatggtgagcagtctccccagcaccgccgacccctctcaccagaccatgccggccaacaagcagaatggatcttctaaccaaagacggagatttaatccacagtatcataacaacaggctaaatgggcctgccaagtcgcagggcagtgggaatgaagccgagccactgggaaagggcaacagccgccacgaacacagaagacagccgcacaacggcttccggcccaaaaacaaaggcggtgccaaaaatcaagaggcttccttggggatgaagacccccgaggccccggcccattctgaaaagccccggcgaaggcagcacgctgcagacacctcggaggccaggcccttccggggtagtgtcggtagggtttcacagtgcaatctctgccccacgagaatagaagtttccacagatgcagcagttctctcagtcccggctgtgacgttggtggcctgagctaggaggaaaaagagcagttttcactcagttttggttccctgcccgaggtgctgacccaattcgctgccaaaagagtgtcaatcagaatatacaaatcccgtatggttgtgtcatcctctcttaatcatttttactaattctaataatcagctctagcttgcttcataattttcatggctttgcttgatctgttgatgctttctctcatcaagactttgcagcattttagccaggcagtatttactcattattaggaaaatcaagatgtggctgaagatcagaggctcagttagcaacctgtgttgtagcagtgatgtcagtccattgattgtctttagagagttaatgttacaaaaaagaattcttaataatcagacaaacatgatctgctgaggacacatgcgcttttgtagaatttaacatctggtgtttttctgaaaaaatatatatacatatattgctttatttgaaacaaattaaaatatgctgcatttga

SEQ ID NO: 29786 - DNA, 1979 bp, Homo sapiens
  source 1..1979: mol_type = unassigned DNA
tttcttctgtagctgagcacttgctgggagggagtgccaaacatctcagtgtttgtgtttttagatgcactaaccaacaatagcaagcttttctccaagcatggcctattccactagaagcaagatggctgaactcaatactcatgtgaatgtcaaggaaaagatctatgcagttagatcagttgttcccaacaaaagcaataatgaaatagtcctggtgctccaacagtttgattttaatgtggataaagccgtgcaagcctttgtggatggcagtgcaattcaagttctaaaagaatggaatatgacaggaaaaaagaagaacaataaaagaaaaagaagcaagtccaagcagcatcaaggcaacaaagatgctaaagacaaggtggagaggcctgaggcagggcccctgcagccgcagccaccacagattcaaaacggccccatgaatggctgcgagaaggacagctcgtccacagattctgctaacgaaaaaccagcccttatccctcgtgagaaaaagatctcgatacttgaggaaccttcaaaggcacttcgtggggtcacagaaggcaacagactactgcaacagaaactatccttagatgggaaccccaaacctatacatggaacaacagagaggtcagatggcctacagtggtcagctgagcagccttgtaacccaagcaagcctaaggcaaaaacatctcctgttaagtccaatacccctgcagctcatcttgaaataaagccagatgagttggcaaagaaaagaggcccaaatattgagaaatcagtgaaggatttgcaacgctgcaccgtttctctaactagatatcgcgtcatgattaaggaagaagtggatagttccgtgaagaagatcaaagctgcctttgctgaattacacaactgcatcattgacaaagaagtttcattaatggcagaaatggataaagttaaagaagaagccatggaaatcctgactgctcgtcagaagaaagcagaagaactaaagagactcactgaccttgccagtcagatggcagagatgcagctggccgaactcagggcagaaattaagcactttgtcagcgagcgtaaatatgacgaggagctcgggaaagctgcccggttttcctgtgacatcgaacagctgaaggcccaaatcatgctctgcggagaaattacacatccaaagaacaactattcctcaagaactccctgcagctccctgctgcctctgctgaatgcgcacgcagcaacctctgggaaacagagtaacttttcccgaaaatcatccactcacaataagccctctgaaggcaaagcggcaaaccccaaaatggtgagcagtctccccagcaccgccgacccctctcaccagaccatgccggccaacaagcagaatggatcttctaaccaaagacggagatttaatccacagtatcataacaacaggctaaatgggcctgccaagtcgcagggcagtgggaatgaagccgagccactgggaaagggcaacagccgccacgaacacagaagacagccgcacaacggcttccggcccaaaaacaaaggcggtgccaaaaatcaagaggcttccttggggatgaagacccccgaggccccggcccattctgaaaagccccggcgaaggcagcacgctgcagacacctcggaggccaggcccttccggggtagtgtcggtagggtttcacagtgcaatctctgccccacgagaatagaagtttccacagatgcagcagttctctcagtcccggctgtgacgttggtggcctgagctaggaggaaaaagagcagttttcactcagttttggttccctgcccgaggtgctgacccaattcgctgccaaaagagtgtcaatcagaatatacaaatcccgtatggttgtgtcatcctctcttaatcatttttactaattctaataatcagctctagcttgcttcataattttcat

SEQ ID NO: 29787 - DNA, 920 bp, Homo sapiens
  source 1..920: mol_type = unassigned DNA
cccgggccccggctccggcccgggacggaggagccggcgctcgacacagagagctcttcagaaaccaggctgctttcaggaacattgctgtggattcccagggcctattccactagaagcaagatggctgaactcaatactcatgtgaatgtcaaggaaaagatctatgcagttagatcagttgttcccaacaaaagcaataatgaaatagtcctggtgctccaacagtttgattttaatgtggataaagccgtgcaagcctttgtggatggcagtgcaattcaagttctaaaagaatggaatatgacaggaaaaaagaagaacaataaaagaaaaagaagcaagtccaagcagcatcaaggcaacaaagatgctaaagacaaggtggagaggcctgaggcagggcccctgcagccgcagccaccacagattcaaaacggccccatgaatggctgcgagaaggacagctcgtccacagattctgctaacgaaaaaccagcccttatccctcgtgagaaaaagatctcgatacttgaggaaccttcaaaggcacttcgtggggtcacaggcccaaatattgagaaatcagtgaaggatttgcaacgctgcaccgtttctctaactagatatcgcgtcatgattaaggaagaagtggatagttccgtgaagaagatcaaagctgcctttgctgaattacacaactgcatcattgacaaagaagtttcattaatggcagaaatggataaagttaaagaagaagccatggaaatcctgactgctcgtcagaagaaagcagaagaactaaagagactcactgaccttgccagtcagatggcagagatgcagctggccgaactcagggcagaaattaagcactttgtcagcgagcgtaaatatgacgaggagctcgggaaagctgc

SEQ ID NO: 29788 - DNA, 2648 bp, Homo sapiens
  source 1..2648: mol_type = unassigned DNA
actgcctctggaagaagagtgttatctaaagtgcttccatcatgaataatgattgagaaactgcttttactctcccgactactgtactcccaggcagaaacccacggctgaagcccacgatgcccatgtgtaacttggttattacacacacgtttggagcccagtgtgcagacccgcagcgcagaggaggcggcggaacaccccgggttggtcgggtttccaagggctgacccgagctccagcactttttccgcgcctgatttttcaggtcattttcgaatgggctatctttgcttacattttgagcttggatcctctccagaaagcattactaccttctaaaaggaaaaacatctcgtatttgcagacagtgctgagggagcaaagttcattttctcggagctcttcagaaaccaggctgctttcaggaacattgctgtggattcccagggcctattccactagaagcaagatggctgaactcaatactcatgtgaatgtcaaggaaaagatctatgcagttagatcagttgttcccaacaaaagcaataatgaaatagtcctggtgctccaacagtttgattttaatgtggataaagccgtgcaagcctttgtggatggcagtgcaattcaagttctaaaagaatggaatatgacaggaaaaaagaagaacaataaaagaaaaagaagcaagtccaagcagcatcaaggcaacaaagatgctaaagacaaggtggagaggcctgaggcagggcccctgcagccgcagccaccacagattcaaaacggccccatgaatggctgcgagaaggacagctcgtccacagattctgctaacgaaaaaccagcccttatccctcgtgagaaaaagatctcgatacttgaggaaccttcaaaggcacttcgtggggtcacagaaggcaacagactactgcaacagaaactatccttagatgggaaccccaaacctatacatggaacaacagagaggtcagatggcctacagtggtcagctgagcagccttgtaacccaagcaagcctaaggcaaaaacatctcctgttaagtccaatacccctgcagctcatcttgaaataaagccagatgagttggcaaagaaaagaggcccaaatattgagaaatcagtgaaggatttgcaacgctgcaccgtttctctaactagatatcgcgtcatgattaaggaagaagtggatagttccgtgaagaagatcaaagctgcctttgctgaattacacaactgcatcattgacaaagaagtttcattaatggcagaaatggataaagttaaagaagaagccatggaaatcctgactgctcgtcagaagaaagcagaagaactaaagagactcactgaccttgccagtcagatggcagagatgcagctggccgaactcagggcagaaattaagcactttgtcagcgagcgtaaatatgacgaggagctcgggaaagctgcccggttttcctgtgacatcgaacagctgaaggcccaaatcatgctctgcggagaaattacacatccaaagaacaactattcctcaagaactccctgcagctccctgctgcctctgctgaatgcgcacgcagcaacctctgggaaacagagtaacttttcccgaaaatcatccactcacaataagccctctgaaggcaaagcggcaaaccccaaaatggtgagcagtctccccagcaccgccgacccctctcaccagaccatgccggccaacaagcagaatggatcttctaaccaaagacggagatttaatccacagtatcataacaacaggctaaatgggcctgccaagtcgcagggcagtgggaatgaagccgagccactgggaaagggcaacagccgccacgaacacagaagacagccgcacaacggcttccggcccaaaaacaaaggcggtgccaaaaatcaagaggcttccttggggatgaagacccccgaggccccggcccattctgaaaagccccggcgaaggcagcacgctgcagacacctcggaggccaggcccttccggggtagtgtcggtagggtttcacagtgcaatctctgccccacgagaatagaagtttccacagatgcagcagttctctcagtcccggctgtgacgttggtggcctgagctaggaggaaaaagagcagttttcactcagttttggttccctgcccgaggtgctgacccaattcgctgccaaaagagtgtcaatcagaatatacaaatcccgtatggttgtgtcatcctctcttaatcatttttactaattctaataatcagctctagcttgcttcataattttcatggctttgcttgatctgttgatgctttctctcatcaagactttgcagcattttagccaggcagtatttactcattattaggaaaatcaagatgtggctgaagatcagaggctcagttagcaacctgtgttgtagcagtgatgtcagtccattgattgtctttagagagttaatgttacaaaaaagaattcttaataatcagacaaacatgatctgctgaggacacatgcgcttttgtagaatttaacatctggtgtttttctgaaaaaatatatatacatatattgctttatttgaaacaaattaaaatatgctgcatttga

SEQ ID NO: 29789 - DNA, 1961 bp, Homo sapiens
  source 1..1961: mol_type = unassigned DNA
attgtggagagagttatctgtgggcttgagaagctgctctgccacaccagtaaggatcagggaaagaaaatacttaggccacaccgttgcagtctttgattgcatgccagtctgaagcattttatggacccgttttgccatagctcttcagaaaccaggctgctttcaggaacattgctgtggattcccagggcctattccactagaagcaagatggctgaactcaatactcatgtgaatgtcaaggaaaagatctatgcagttagatcagttgttcccaacaaaagcaataatgaaatagtcctggtgctccaacagtttgattttaatgtggataaagccgtgcaagcctttgtggatggcagtgcaattcaagttctaaaagaatggaatatgacaggaaaaaagaagaacaataaaagaaaaagaagcaagtccaagcagcatcaaggcaacaaagatgctaaagacaaggtggagaggcctgaggcagggcccctgcagccgcagccaccacagattcaaaacggccccatgaatggctgcgagaaggacagctcgtccacagattctgctaacgaaaaaccagcccttatccctcgtgagaaaaagatctcgatacttgaggaaccttcaaaggcacttcgtggggtcacagaaggcaacagactactgcaacagaaactatccttagatgggaaccccaaacctatacatggaacaacagagaggtcagatggcctacagtggtcagctgagcagccttgtaacccaagcaagcctaaggcaaaaacatctcctgttaagtccaatacccctgcagctcatcttgaaataaagccagatgagttggcaaagaaaagaggcccaaatattgagaaatcagtgaaggatttgcaacgctgcaccgtttctctaactagatatcgcgtcatgattaaggaagaagtggatagttccgtgaagaagatcaaagctgcctttgctgaattacacaactgcatcattgacaaagaagtttcattaatggcagaaatggataaagttaaagaagaagccatggaaatcctgactgctcgtcagaagaaagcagaagaactaaagagactcactgaccttgccagtcagatggcagagatgcagctggccgaactcagggcagaaattaagcactttgtcagcgagcgtaaatatgacgaggagctcgggaaagctgcccggttttcctgtgacatcgaacagctgaaggcccaaatcatgctctgcggagaaattacacatccaaagaacaactattcctcaagaactccctgcagctccctgctgcctctgctgaatgcgcacgcagcaacctctgggaaacagagtaacttttcccgaaaatcatccactcacaataagccctctgaaggcaaagcggcaaaccccaaaatggtgagcagtctccccagcaccgccgacccctctcaccagaccatgccggccaacaagcagaatggatcttctaaccaaagacggagatttaatccacagtatcataacaacaggctaaatgggcctgccaagtcgcagggcagtgggaatgaagccgagccactgggaaagggcaacagccgccacgaacacagaagacagccgcacaacggcttccggcccaaaaacaaaggcggtgccaaaaatcaagaggcttccttggggatgaagacccccgaggccccggcccattctgaaaagccccggcgaaggcagcacgctgcagacacctcggaggccaggcccttccggggtagtgtcggtagggtttcacagtgcaatctctgccccacgagaatagaagtttccacagatgcagcagttctctcagtcccggctgtgacgttggtggcctgagctaggaggaaaaagagcagttttcactcagttttggttccctgcccgaggtgctgacccaattcgctgcc

SEQ ID NO: 29790 - DNA, 2698 bp, Homo sapiens
  source 1..2698: mol_type = unassigned DNA
gatttttcaggtcattttcgaatgggctatctttgcttacattttgagcttggatcctctccagaaagcattactaccttctaaaaggaaaaacatctcgtatttgcagacagtgctgagggagcaaagttcattttctcgggtaggagaagatgattctcttgcaacacgtgcggattgtgacaaaatctttcattaacaaggggagtttcggtgaagtggaggtttggggaaaggcgaggaagtcggtctggagcaagcaagcaaagtgcggaagctgtactgggattcttctagaaagtggggtgggaaaggagctagggagggcgtgtggagggacgagatctgtgtcagaacgtgcgtgtgagcggatacaaaacccgagagaggcgtgagcagcgctgtgtttgcgagcgggagcgaggggcgccggctggggtgtgtgctcctgagctcttcagaaaccaggctgctttcaggaacattgctgtggattcccagggcctattccactagaagcaagatggctgaactcaatactcatgtgaatgtcaaggaaaagatctatgcagttagatcagttgttcccaacaaaagcaataatgaaatagtcctggtgctccaacagtttgattttaatgtggataaagccgtgcaagcctttgtggatggcagtgcaattcaagttctaaaagaatggaatatgacaggaaaaaagaagaacaataaaagaaaaagaagcaagtccaagcagcatcaaggcaacaaagatgctaaagacaaggtggagaggcctgaggcagggcccctgcagccgcagccaccacagattcaaaacggccccatgaatggctgcgagaaggacagctcgtccacagattctgctaacgaaaaaccagcccttatccctcgtgagaaaaagatctcgatacttgaggaaccttcaaaggcacttcgtggggtcacagaaggcaacagactactgcaacagaaactatccttagatgggaaccccaaacctatacatggaacaacagagaggtcagatggcctacagtggtcagctgagcagccttgtaacccaagcaagcctaaggcaaaaacatctcctgttaagtccaatacccctgcagctcatcttgaaataaagccagatgagttggcaaagaaaagaggcccaaatattgagaaatcagtgaaggatttgcaacgctgcaccgtttctctaactagatatcgcgtcatgattaaggaagaagtggatagttccgtgaagaagatcaaagctgcctttgctgaattacacaactgcatcattgacaaagaagtttcattaatggcagaaatggataaagttaaagaagaagccatggaaatcctgactgctcgtcagaagaaagcagaagaactaaagagactcactgaccttgccagtcagatggcagagatgcagctggccgaactcagggcagaaattaagcactttgtcagcgagcgtaaatatgacgaggagctcgggaaagctgcccggttttcctgtgacatcgaacagctgaaggcccaaatcatgctctgcggagaaattacacatccaaagaacaactattcctcaagaactccctgcagctccctgctgcctctgctgaatgcgcacgcagcaacctctgggaaacagagtaacttttcccgaaaatcatccactcacaataagccctctgaaggcaaagcggcaaaccccaaaatggtgagcagtctccccagcaccgccgacccctctcaccagaccatgccggccaacaagcagaatggatcttctaaccaaagacggagatttaatccacagtatcataacaacaggctaaatgggcctgccaagtcgcagggcagtgggaatgaagccgagccactgggaaagggcaacagccgccacgaacacagaagacagccgcacaacggcttccggcccaaaaacaaaggcggtgccaaaaatcaagaggcttccttggggatgaagacccccgaggccccggcccattctgaaaagccccggcgaaggcagcacgctgcagacacctcggaggccaggcccttccggggtagtgtcggtagggtttcacagtgcaatctctgccccacgagaatagaagtttccacagatgcagcagttctctcagtcccggctgtgacgttggtggcctgagctaggaggaaaaagagcagttttcactcagttttggttccctgcccgaggtgctgacccaattcgctgccaaaagagtgtcaatcagaatatacaaatcccgtatggttgtgtcatcctctcttaatcatttttactaattctaataatcagctctagcttgcttcataattttcatggctttgcttgatctgttgatgctttctctcatcaagactttgcagcattttagccaggcagtatttactcattattaggaaaatcaagatgtggctgaagatcagaggctcagttagcaacctgtgttgtagcagtgatgtcagtccattgattgtctttagagagttaatgttacaaaaaagaattcttaataatcagacaaacatgatctgctgaggacacatgcgcttttgtagaatttaacatctggtgtttttctgaaaaaatatatatacatatattgctttatttgaaacaaattaaaatatgctgcatttg

SEQ ID NO: 29791 - DNA, 600 bp, Homo sapiens
  source 1..600: mol_type = unassigned DNA
agagctataccttccctaagataagaaggatgaagagctggcattcactaacaggaccctgaaggcaaaaacactgggcagtttcacaaaaagggaacaagtagtctctctgaagggcctattccactagaagcaagatggctgaactcaatactcatgtgaatgtcaaggaaaagatctatgcagttagatcagttgttcccaacaaaagcaataatgaaatagtcctggtgctccaacagtttgattttaatgtggataaagccgtgcaagcctttgtggatggcagtgcaattcaagttctaaaagaatggaatatgacaggaaaaaagaagaacaataaaagaaaaagaagcaagtccaagcagcatcaaggcaacaaagatgctaaagacaaggtggagaggcctgaggcagggcccctgcagccgcagccaccacagattcaaaacggccccatgaatggctgcgagaaggacagctcgtccacagattctgctaacgaaaaaccagcccttatccctcgtgagaaaaagatctcgatacttgaggaaccttcaaaggcacttcgtggggtcacagaaggcaacagactactgc

SEQ ID NO: 29792 - DNA, 771 bp, Homo sapiens
  source 1..771: mol_type = unassigned DNA
tgtgtttgcgagcgggagcgaggggcgccggctggggtgtgtgctcctgagctcttcagaaaccaggctgctttcaggaacattgctgtggattcccaggtgaccaaggccaccaaccccctgctgattactcagccacgcccaagatcctgctactaccctggtttctggctccacattcgtcactattgagatgacttactggtcacagtaaaagcaagttgataaaggtggccagtgggggaacagagcttatgtgcctcctgagaaagccagtcgctggaaactggactgagagccctgatttggagcacgaggaaaccttaaaaaggcctattccactagaagcaagatggctgaactcaatactcatgtgaatgtcaaggaaaagatctatgcagttagatcagttgttcccaacaaaagcaataatgaaatagtcctggtgctccaacagtttgattttaatgtggataaagccgtgcaagcctttgtggatggcagtgcaattcaagttctaaaagaatggaatatgacaggaaaaaagaagaacaataaaagaaaaagaagcaagtccaagcagcatcaaggcaacaaagatgctaaagacaaggtggagaggcctgaggcagggcccctgcagccgcagccaccacagattcaaaacggccccatgaatggctgcgagaaggacagctcgtccacagattctgctaacgaaaaaccagcccttatccctcgtgagaaaaagatctcgatacttgaggaacc

SEQ ID NO: 29793 - DNA, 541 bp, Homo sapiens
  source 1..541: mol_type = unassigned DNA
gtgtttgcgagcgggagcgaggggcgccggctggggtgtgtgctcctgagctcttcagaaaccaggctgctttcaggaacattgctgtggattcccaggtgaccaaggccaccaaccccctgctgattactcagccacgcccaagatcctgctactaccctggtttctggctccacattcgtcactattgagatgacttactggtcacagtaaaagcaagttgataaaggtggccagtgggggaacagagcttatgtgcctcctgagaaagccagtcgctggaaactggactgagagccctgatttggagcacgaggaaaccttaaaaattcaagcaaagtgatgtaatacccaagaacaggaaagtaaacctaagagcattaatgggtttcagagaaacgaaagtgaaactttattactgcctacacaatcaaacaggagggagaaaggagacaagcaagtcagaaagcgatttgatagggcctattccactagaagcaagatggctgaactcaatactcatgtgaatgtcaaggaaaag

SEQ ID NO: 29794 - DNA, 584 bp, Homo sapiens
  source 1..584: mol_type = unassigned DNA
gcatttcactctactgcctctggaagaagagtgttatctaaagtgcttccatcatgaataatgattgagaaactgcttttactctcccgactactgtactcccaggcagaaacccacggctgaagcccacgatgcccatgtgtaacttggttattacacacacgtttggagcccagtgtgcagacccgcagcgcagaggaggcggcggaacaccccgggttggtcgggtttccaagggctgacccgagctccagcactttttccgcgcctgatttttcagggcctattccactagaagcaagatggctgaactcaatactcatgtgaatgtcaaggaaaagatctatgcagttagatcagttgttcccaacaaaagcaataatgaaatagtcctggtgctccaacagtttgattttaatgtggataaagccgtgcaagcctttgtggatggcagtgcaattcaagttctaaaagaatggaatatgacaggaaaaaagaagaacaataaaagaaaaagaagcaagtccaagcagcatcaaggcaacaaagatgctaaagacaaggtggagaggcctgaggcaggg

SEQ ID NO: 29795 - DNA, 561 bp, Homo sapiens
  source 1..561: mol_type = unassigned DNA
aaagttcattttctcgggtaggagaagatgattctcttgcaacacgtgcggattgtgacaaaatctttcattaacaaggggagtttcggtgaagtggaggtttggggaaaggcgaggaagtcggtctggagcaagcaagcaaaagctcttcagaaaccaggctgctttcaggaacattgctgtggattcccagggcctattccactagaagcaagatggctgaactcaatactcatgtgaatgtcaaggaaaagatctatgcagttagatcagttgttcccaacaaaagcaataatgaaatagtcctggtgctccaacagtttgattttaatgtggataaagccgtgcaagcctttgtggatggcagtgcaattcaagttctaaaagaatggaatatgacaggaaaaaagaagaacaataaaagaaaaagaagcaagtccaagcagcatcaaggcaacaaagatgctaaagacaaggtggagaggcctgaggcagggcccctgcagccgcagccaccacagattcaaaacggccccatgaatggctgcgagaaggacagct

SEQ ID NO: 29796 - DNA, 605 bp, Homo sapiens
  source 1..605: mol_type = unassigned DNA
attttctcgggtaggagaagatgattctcttgcaacacgtgcggattgtgacaaaatctttcattaacaaggggagtttcggtgaagtggaggtttggggaaaggcgaggaagtcggtctggagcaagcaagcaaagtgcggaagctgtactgggattcttctagaaagtggggtgggaaaggagctagggagggcgtgtggagggacgagatctgtgtcagaacgtgcgtgtgagcggatacaaaacccgagagaggcgtgagcagcgctgtgtttgcgagcgggagcgaggggcgccggctggggtgtgtgctcctgagctcttcagaaaccaggctgctttcaggaacattgctgtggattcccagctttcagacaacacatgactaagacagaatgagaccactctagttgcctcatgggaaactcgggaaaagactgcaaaaacaacattgtttctccctttggaattctggagttataaggcagaggtcccccatcttcccgaactggcctattccactagaagcaagatggctgaactcaatactcatgtgaatgtcaaggaaaagatctatgcagttagatcagttgttcccaacaa

SEQ ID NO: 29797 - DNA, 678 bp, Homo sapiens
  source 1..678: mol_type = unassigned DNA
gacttactggtcacagtaaaagcaagttgataaaggtggccagtgggggaacagagcttatgtgcctcctgagaaagccagtcgctggaaactggactgagagccctgatttggagcacgaggaaaccttaaaaaggcctattccactagaagcaagatggctgaactcaatactcatgtgaatgtcaaggaaaagatctatgcagttagatcagttgttcccaacaaaagcaataatgaaatagtcctggtgctccaacagtttgattttaatgtggataaagccgtgcaagcctttgtggatggcagtgcaattcaagttctaaaagaatggaatatgacaggaaaaaagaagaacaataaaagaaaaagaagcaagtccaagcagcatcaaggcaacaaagatgctaaagacaaggtggagaggcctgaggcagggcccctgcagccgcagccaccacagattcaaaacggccccatgaatggctgcgagaaggacagctcgtccacagattctgctaacgaaaaaccagcccttatccctcgtgagaaaaagatctcgatacttgaggaaccttcaaaggcacttcgtggggtcacaggcccaaatattgagaaatcagtgaaggatttgcaacgctgcaccgtttctctaactagatatcgcgtcatgattaa

SEQ ID NO: 29798 - DNA, 2250 bp, Homo sapiens
  source 1..2250: mol_type = unassigned DNA
tttggggaaaggcgaggaagtcggtctggagcaagcaagcaaagtgcggaagctgtactgggattcttctagaaagtggggtgggaaaggagctagggagggcgtgtggagggacgagatctgtgtcagaacgtgcgtgtgagcggatacaaaacccgagagaggcgtgagcagcgctgtgtttgcgagcgggagcgaggggcgccggctggggtgtgtgctcctgggagccccctaatgaaagtcttcagtaaatagtttttctgcatgcactgattttcctgaggccattgtggagagagttatctgtgggcttgagaagctgctctgccacaccagtaaggatcagggaaagaaaatacttaggccacaccgttgcagtctttgattgcatgccagtctgaagcattttatggacccgttttgccatagctcttcagaaaccaggctgctttcaggaacattgctgtggattcccagggcctattccactagaagcaagatggctgaactcaatactcatgtgaatgtcaaggaaaagatctatgcagttagatcagttgttcccaacaaaagcaataatgaaatagtcctggtgctccaacagtttgattttaatgtggataaagccgtgcaagcctttgtggatggcagtgcaattcaagttctaaaagaatggaatatgacaggaaaaaagaagaacaataaaagaaaaagaagcaagtccaagcagcatcaaggcaacaaagatgctaaagacaaggtggagaggcctgaggcagggcccctgcagccgcagccaccacagattcaaaacggccccatgaatggctgcgagaaggacagctcgtccacagattctgctaacgaaaaaccagcccttatccctcgtgagaaaaagatctcgatacttgaggaaccttcaaaggcacttcgtggggtcacagaaggcaacagactactgcaacagaaactatccttagatgggaaccccaaacctatacatggaacaacagagaggtcagatggcctacagtggtcagctgagcagccttgtaacccaagcaagcctaaggcaaaaacatctcctgttaagtccaatacccctgcagctcatcttgaaataaagccagatgagttggcaaagaaaagaggcccaaatattgagaaatcagtgaaggatttgcaacgctgcaccgtttctctaactagatatcgcgtcatgattaaggaagaagtggatagttccgtgaagaagatcaaagctgcctttgctgaattacacaactgcatcattgacaaagaagtttcattaatggcagaaatggataaagttaaagaagaagccatggaaatcctgactgctcgtcagaagaaagcagaagaactaaagagactcactgaccttgccagtcagatggcagagatgcagctggccgaactcagggcagaaattaagcactttgtcagcgagcgtaaatatgacgaggagctcgggaaagctgcccggttttcctgtgacatcgaacagctgaaggcccaaatcatgctctgcggagaaattacacatccaaagaacaactattcctcaagaactccctgcagctccctgctgcctctgctgaatgcgcacgcagcaacctctgggaaacagagtaacttttcccgaaaatcatccactcacaataagccctctgaaggcaaagcggcaaaccccaaaatggtgagcagtctccccagcaccgccgacccctctcaccagaccatgccggccaacaagcagaatggatcttctaaccaaagacggagatttaatccacagtatcataacaacaggctaaatgggcctgccaagtcgcagggcagtgggaatgaagccgagccactgggaaagggcaacagccgccacgaacacagaagacagccgcacaacggcttccggcccaaaaacaaaggcggtgccaaaaatcaagaggcttccttggggatgaagacccccgaggccccggcccattctgaaaagccccggcgaaggcagcacgctgcagacacctcggaggccaggcccttccggggtagtgtcggtagggtttcacagtgcaatctctgccccacgagaatagaagtttccacagatgcagcagttctctcagtcccggctgtgacgttggtggcctgagctaggaggaaaaagagcagttttcactcagttttggttccctgcccgaggtgctgacccaattcgctgcc

SEQ ID NO: 29799 - DNA, 835 bp, Homo sapiens
  source 1..835: mol_type = unassigned DNA
gtgtttgcgagcgggagcgaggggcgccggctggggtgtgtgctcctgagctcttcagaaaccaggctgctttcaggaacattgctgtggattcccagttcaagcaaagtgatgtaatacccaagaacaggaaagtaaacctaagagcattaatgggtttcagagaaacgaaagtgaaactttattactgcctacacaatcaaacaggagggagaaaggagacaagcaagtcagaaagcgatttgatagggcctattccactagaagcaagatggctgaactcaatactcatgtgaatgtcaaggaaaagatctatgcagttagatcagttgttcccaacaaaagcaataatgaaatagtcctggtgctccaacagtttgattttaatgtggataaagccgtgcaagcctttgtggatggcagtgcaattcaagttctaaaagaatggaatatgacaggaaaaaagaagaacaataaaagaaaaagaagcaagtccaagcagcatcaaggcaacaaagatgctaaagacaaggtggagaggcctgaggcagggcccctgcagccgcagccaccacagattcaaaacggccccatgaatggctgcgagaaggacagctcgtccacagattctgctaacgaaaaaccagcccttatccctcgtgagaaaaagatctcgatacttgaggaaccttcaaaggcacttcgtggggtcacagaaggcaacagactactgcaacagaaactatccttagatgggaaccccaaacctatacatggaacaacagagaggtcagatggcctacagtggtcagctgagcagccttgtaacccaagc

SEQ ID NO: 29800 - DNA, 1266 bp, Homo sapiens
  source 1..1266: mol_type = unassigned DNA
ggcggagctggtcccgttgtgctgcggcgccgcgcggcctgcagtcccgggcccgcgccccgcgccgcccgcccgcccgccatggagcccggccccgacggccccgccgcctccggccccgccgccatccgcgagggctggttccgcgagacctgcagcctgtggcccggccaggccctgtcactgcaggtggagcagctgctccaccaccggcgctcgcgctaccaggacatcctcgtcttccgcagtaagacctatggcaacgtgctggtgttggacggtgtcatccagtgcacggagagagacgagttctcctaccaggagatgatcgccaacctgcctctctgcagccaccccaacccgcgaaaggtgctgatcatcgggggcggagatggaggtgtcctgcgggaggtggtgaagcacccctccgtggagtccgtggtccagtgtgagatcgacgaggatgtcatccaagtctccaagaagttcctgccaggcatggccattggctactctagctcgaagctgaccctacatgtgggtgacggttttgagttcatgaaacagaatcaggatgccttcgacgtgatcatcactgactcctcagaccccatgggccccgccgaaagtctcttcaaggagtcctattaccagctcatgaagacagccctcaaggaagatggtgtcctctgctgccagggcgagtgccagtggctgcacctggacctcatcaaggagatgcggcagttctgccagtccctgttccccgtggtggcctatgcctactgcaccatccccacctaccccagcggccagatcggcttcatgctgtgcagcaagaacccgagcacgaacttccaggagccggtgcagccgctgacacagcagcaggtggcgcagatgcagctgaagtactacaactccgacgtgcaccgcgccgcctttgtgctgcccgagtttgcccgcaaggccctgaatgatgtgagctgagcccaggcgccaccactgatgccacccaggacctcggaccttggagcctgcggggtgcctcggcccctccagccccgggccggacctcctgctggctctcgcccaccaaccaagtgttacaagccccagaatgctgcccggcctgccctgctgggcggactgtctgtgtgtctgtctctctggcgttccacctccaagcctataccagctgtgtacagcgccatctctctgccttctgttgcccctcactcaccaaacacgtgtatttatagcaaa

SEQ ID NO: 29801 - DNA, 1057 bp, Homo sapiens
  source 1..1057: mol_type = unassigned DNA
gcgcagctcttagtcgcgggccgactggtgtttatccgtcactcgccgaggttccttgggtcatggtgccagcctgactgagaagaggacgctcccgggagacgaatgaggaaccacctcctcctactgttcaagtacaggggcctggtccgcaaagggaagaaaagcaaaagacgaaaatggctaaattcgtgatccgcccagccactgccgccgactgcagtgacatactgcggctgatcaaggagctggctaaatatgaatacatggaagaacaagtaatcttaactgaaaaagatctgctagaagatggttttggagagcaccccttttaccactgcctggttgcagaagtgccgaaagagcactggactccggaaggtaacccctcgccctttccagaagccagagagaccaagtgttattattttacctatgacccgtggattggcaagttattgtatcttgaggacttcttcgtgatgagtgattatagagggctttggcataggatcagaaattctgaagaatctaagccaggttgcaatgaggtgtcgctggcagcatgcacttcttgggcagaatggaatgaaccatccatcaacttctataaaagaagaggtgcttctgatctgtccagtgaagagggttggagactgttcaagatcgacaaggagtacttgctaaaaatggcaacagaggagtgaggagtgctgctgtagatgacaacctccattctattttagaataaattcccaacttctcttgctttctatgctgtttgtagtgaaataatagaatgagcacccattccaaagctttattaccagtggcgttgttgcatgtttgaaatgaggtctgtttaaagtggcaatctcagatgcagtttggagagtcagatctttctccttgaatatctttcgataaacaacaaggtggtgtgatcttaatatatttgaaaaaaacttcattctcgtgagtcatttaaatgtgtacaatgtacacactggtacttagagtttctgtttgattcttttttaataaactactctttgat

SEQ ID NO: 29802 - DNA, 801 bp, Homo sapiens
  source 1..801: mol_type = unassigned DNA
gcgcagctcttagtcgcgggccgactggtgtttatccgtcactcgccgaggttccttgggtcatggtgccagcctgactgagaagaggacgctcccgggagacgaatgaggaaccacctcctcctactgttcaagtacaggggcctggtccgcaaagggaagaaaagcaaaagacgaaaatggctaaattcgtgatccgcccagccactgccgccgactgcagtgacatactgcggctgatcaaggagctggctaaatatgaatacatggaagaacaagtaatcttaactgaaaaaggtaattcaacagtggcgggacgggggacaagcgttcggtgcctgtcaccttcgccaaggccattaccgcccctgctcccccttcttgcagatctgctagaagatggttttggagagcaccccttttaccactgcctggttgcagaagtgccgaaagagcactggactccggaaggtaacccctcgccctttccagaagccagagagaccaagtgttatgtaagaagtagtgtcggctgtgtagaaccactgactacacaggccgaagttactgagaacttggacagaaaaaatagccagcaagtgttcaaactactgaggaaaaaaaaaaattagatatgctgcacttaagaatactagggcaggttaaaagagctgtttaagtaagtatcagagtgctgtggagactcggaagtgtttaagctgcttaagtaagtataagtgctgtggagacccggaagagttagatataatgtcatttgttgtaattcagtttcataaaatg

SEQ ID NO: 29803 - DNA, 909 bp, Homo sapiens
  source 1..909: mol_type = unassigned DNA
gcgcagctcttagtcgcgggccgactggtgtttatccgtcactcgccgaggttccttgggtcatggtgccagcctgactgagaagaggacgctcccgggagacgaatgaggaaccacctcctcctactgttcaagtacaggggcctggtccgcaaagggaagaaaagcaaaagacgaaaatggctaaattcgtgatccgcccagccactgccgccgactgcagtgacatactgcggctgatcaaggagctggctaaatatgaatacatggaagaacaagtaatcttaactgaaaaagatctgctagaagatggttttggagagcaccccttttaccactgcctggttgcagaagtgccgaaagagcactggactccggaaggtaacccctcgccctttccagaagccagagagaccaagtgttatgtaagaagtagtgtcggctgtgtagaaccactgactacacaggccgaagttactgagaacttggacagaaaaaatagccagcaagtgttcaaactactgaggaaaaaaaaaaattagatatgctgcacttaagaatactagggcaggttaaaagagctgtttaagtaagtatcagagtgctgtggagactcggaagtgtttaagctgcttaagtaagtataagtgctgtggagacccggaagagttagatataatgtcatttgttgtaattcagtttcataaaatggttcttgtttgaccctaacgtaacagtttttgtaattgtgttaaatcacatttttttctttaatttgtcccaatcttcaggttacagtctctagcttcgccatgtacatggcccttccgtgtacatggatgggcggggaggtaactaaaagatcctttacacaataaagtagatgatcatgataaatgaggtaaggtc

SEQ ID NO: 29804 - DNA, 868 bp, Homo sapiens
  source 1..868: mol_type = unassigned DNA
gcgcagctcttagtcgcgggccgactggtgtttatccgtcactcgccgaggttccttgggtcatggtgccagcctgactgagaagaggacgctcccgggagacgaatgaggaaccacctcctcctactgttcaagtacaggggcctggtccgcaaagggaagaaaagcaaaagacgaaaatggctaaattcgtgatccgcccagccactgccgccgactgcagtgacatactgcggctgatcaaggagctggctaaatatgaatacatggaagaacaagtaatcttaactgaaaaaggacacagcattgttggttttgccatgtactattttacctatgacccgtggattggcaagttattgtatcttgaggacttcttcgtgatgagtgattatagaggctttggcataggatcagaaattctgaagaatctaagccaggttgcaatgaggtgtcgctgcagcagcatgcacttcttggtagcagaatggaatgaaccatccatcaacttctataaaagaagaggtgcttctgatctgtccagtgaagagggttggagactgttcaagatcgacaaggagtacttgctaaaaatggcaacagaggagtgaggagtgctgctgtagatgacaacctccattctattttagaataaattcccaacttctcttgctttctatgctgtttgtagtgaaataatagaatgagcacccattccaaagctttattaccagtggcgttgttgcatgtttgaaatgaggtctgtttaaagtggcaatctcagatgcagtttggagagtcagatctttctccttgaatatctttcgataaacaacaaggtggtgtgatcttaatatatttgaaaaaa

SEQ ID NO: 29805 - DNA, 1065 bp, Homo sapiens
  source 1..1065: mol_type = unassigned DNA
gcgcagctcttagtcgcgggccgactggtgtttatccgtcactcgccgaggttccttgggtcatggtgccagcctgactgagaagaggacgctcccgggagacgaatgaggaaccacctcctcctactgttcaagtacaggggcctggtccgcaaagggaagaaaagcaaaagacgaaaatggctaaattcgtgatccgcccagccactgccgccgactgcagtgacatactgcggctgatcaaggagctggctaaatatgaatacatggaagaacaagtaatcttaactgaaaaagatctgctagaagatggttttggagagcaccccttttaccactgcctggttgcagaagtgccgaaagagcactggactccggaaggacacagcattgttggttttgccatgtactattttacctatgacccgtggattggcaagttattgtatcttgaggacttcttcgtgatgagtgattatagaggctttggcataggatcagaaattctgaagaatctaagccaggttgcaatgaggtgtcgctgcagcagcatgcacttcttggtagcagaatggaatgaaccatccatcaacttctataaaagaagaggtgcttctgatctgtccagtgaagagggttggagactgttcaagatcgacaaggagtacttgctaaaaatggcaacagaggagtgaggagtgctgctgtagatgacaacctccattctattttagaataaattcccaacttctcttgctttctatgctgtttgtagtgaaataatagaatgagcacccattccaaagctttattaccagtggcgttgttgcatgtttgaaatgaggtctgtttaaagtggcaatctcagatgcagtttggagagtcagatctttctccttgaatatctttcgataaacaacaaggtggtgtgatcttaatatatttgaaaaaaacttcattctcgtgagtcatttaaatgtgtacaatgtacacactggtacttagagtttctgtttgattcttttttaataaactactctttgatttaattgtttggtgtaagca

SEQ ID NO: 29806 - DNA, 963 bp, Homo sapiens
  source 1..963: mol_type = unassigned DNA
agaattcgagggggtggggctatgcccggacagaggatcgcctcgctggcctactctctcctcccgtacggcgccggaatcccagctccacttaccaggccgcggctaccccgccgtcccccccgactcccgccaccccgctctctcaggctcttcaggatccaagtccgtaggccctttaaggggtctagttgccgtttgcgaggccctgggactttggtcccagacagcggggatccggatggcttccgtgcggatccgagaggccaaggagggagactgtggagatatcctgaggctgattcgggagctagccgaattcgaaaaactctcggatcaggtgaagatcagtgaagaagccctgagagcagatggctttggagacaatcctttctatcactgtttggtagcagagattcttccagcgcccgggaagctactggggccctgcgtggtgggctatgggatatactatttcatctacagtacatggaagggacgcaccatttatctggaggatatctatgtgatgccggaatatcggggtcaagggattggttccaaaataatcaaaaaggtggctgaggtggccttggataagggctgctcccaattccgcctggccgtcctggactggaaccagagggccatggacttgtacaaggccctaggagcccaagatctgacggaagctgagggctggcacttcttctgctttcaaggagaggcaacgagaaagttggcaggaaagtgacgccatccctaggaggatctctgtcttgagtttctccttccccatcagctgaagcactcttcagagactacgtccacagacactgatgctgaggcctccctggaggaaggagggttaggggtgcctatcctcaagtattggaagagcagaattgagggagagacctttcttccttgttgagggtgaaaaataaataagaattacatgtc

SEQ ID NO: 29807 - DNA, 977 bp, Homo sapiens
  source 1..977: mol_type = unassigned DNA
gagggggtggggctatgcccggacagaggatcgcctcgctggcctactctctcctcccgtacggcgccggaatcccagctccacttaccaggccgcggctaccccgccgtcccccccgactcccgccaccccgctctctcaggctcttcaggatccaagtccgtaggccctttaaggggtctagttgccgtttgcgaggccctgggactttggtcccagacagcggggatccggatggcttccgtgcggatccgagaggccaaggagggagactgtggagatatcctgaggctgattcgggtgaagactgcaggccggagctagccgaattcgaaaaactctcggatcaggtgaagatcagtgaagaagccctgagagcagatggctttggagacaatcctttctatcactgtttggtagcagagattcttccagcgcccgggaagctactggggccctgcgtggtgggctatgggatatactatttcatctacagtacatggaagggacgcaccatttatctggaggatatctatgtgatgccggaatatcggggtcaagggattggttccaaaataatcaaaaaggtggctgaggtggccttggataagggctgctcccaattccgcctggccgtcctggactggaaccagagggccatggacttgtacaaggccctaggagcccaagatctgacggaagctgagggctggcacttcttctgctttcaaggagaggcaacgagaaagttggcaggaaagtgacgccatccctaggaggatctctgtcttgagtttctccttccccatcagctgaagcactcttcagagactacgtccacagacactgatgctgaggcctccctggaggaaggagggttaggggtgcctatcctcaagtattggaagagcagaattgagggagagacctttcttccttgttgagggtgaaaaataaataagaattacatgtcctga

SEQ ID NO: 29808 - DNA, 1174 bp, Homo sapiens
  source 1..1174: mol_type = unassigned DNA
ggcctccccgggcgcagcacactcccagccggccgcagcctgacacgccgcgcggccccccagtctcccgcggctgctcccccaggcatggcacagggcctcgcctcactatggcagcagcacggcacagcacgctcgacttcatgctcggcgccaaagctgatggtgagaccattctaaaaggcctccagtccattttccaggagcaggggatggcggagtcggtgcacacctggcaggaccatggctatttagcaacctacacaaacaagaacggcagattaccacccatagtgcgaggaggagccatcgacagatactggcccaccgccgacgggcgcctggttgaatatgacatagatgaagtggtatatgacgaagattcaccttatcaaaatataaaaattctacactcgaagcagtttggaaatattctcatccttagtggggatgttaatttggcagagagtgatttggcatatacccgggccatcatgggcagtggcaaagaagattacactggcaaagatgtactcattctgggaggtggagacggaggcatattgtgtgaaatagtcaaactaaaaccaaagatggtcactatggtagagattgaccaaatggtgattgatgggtgtaagaaatacatgcgaaaaacgtgtggcgatgtcttagacaatcttaaaggagactgctatcaggttctaatagaagactgtatcccggtactgaagaggtacgccaaagaagggagagaatttgattatgtgattaatgatttgacagctgttccaatctccacgtctccagaagaagattccacatgggagtttctcagactgattcttgacctctcaatgaaagtgttgaaacaggatgggaaatattttacacaggggaactgtgtcaatctgacagaagcactgtcgctctatgaagaacagctggggcgcctgtattgtcctgtggaattttcaaaggagatcgtctgtgtcccttcatacttggaattgtgggtattttacactgtttggaagaaagctaaaccctgaagatcagtagcccctaatcacatgtgctgcaaatagccttcctgacctccatatgctgtacatgacatcaaaatgagtcaggcaattgattgtgaattccttaaagttttcctttttttaat

SEQ ID NO: 29809 - DNA, 1837 bp, Homo sapiens
  source 1..1837: mol_type = unassigned DNA
gtttccaccattagcgaggcctcacacccggcgctccaagttcggggctggaggcgtcccggcttcctccctcccggagcgggaccggccccgcccccgcgccccgggtcgctcccggcggcccctcccacctcctagtcctggcctccccgggcgcagcacactcccagccggccgcagcctgacacgccgcgcggccccccagtctcccgcggctgctcccccaggcatggcacagggcctcgcctcactatggcagcagcacggcacagcacgctcgacttcatgctcggcgccaaagctgatggtgagaccattctaaaaggcctccagtccattttccaggagcaggggatggcggagtcggtgcacacctggcaggaccatggctatttagcaacctacacaaacaagaacggcagctttgccaatttgagaatttacccacatggattggtgttgctggaccttcagagttatgatggtgatgcgcaaggcaaagaagagatcgacagtattttgaacaaagtagaggaaagaatgaaagaattgagtcaggacagtactgggcgggtgaaacgattaccacccatagtgcgaggaggagccatcgacagatactggcccaccgccgacgggcgcctggttgaatatgacatagatgaagtggtatatgacgaagattcaccttatcaaaatataaaaattctacactcgaagcagtttggaaatattctcatccttagtggggatgttaatttggcagagagtgatttggcatatacccgggccatcatgggcagtggcaaagaagattacactggcaaagatgtactcattctgggaggtggagacggaggcatattgtgtgaaatagtcaaactaaaaccaaagatggtcactatggtagagattgaccaaatggtgattgatgggtgtaagaaatacatgcgaaaaacgtgtggcgatgtcttagacaatcttaaaggagactgctatcaggttctaatagaagactgtatcccggtactgaagaggtacgccaaagaagggagagaatttgattatgtgattaatgatttgacagctgttccaatctccacgtctccagaagaagattccacatgggagtttctcagactgattcttgacctctcaatgaaagtgttgaaacaggatgggaaatattttacacaggggaactgtgtcaatctgacagaagcactgtcgctctatgaagaacagctggggcgcctgtattgtcctgtggaattttcaaaggagatcgtctgtgtcccttcatacttggaattgtgggtattttacactgtttggaagaaagctaaaccctgaagatcagtagcccctaatcacatgtgctgcaaatagccttcctgacctccatatgctgtacatgacatcaaaatgagtcaggcaattgattgtgaattccttaaagttttcctttttttaataattatttttaatttaaaaaagcaaatggaaaatgtatattttgatgagcttagggtgttttttttttgaaagtcagctgaaggatggttagacagcacagcgaagactgctaaatgcactgaccccccccattagaatgtgatttttgttcctttttatttctctgtgggcttttgtttttgtttttgttttggtagatcttcaatttggatatttggaggagtgaacatcgttgttttgctggagggaagatcttgatggtgtttctttccccaaaaattgacttagatattaaaatttggtgcttataagagagagttaaaaaaaaataggattgcttcaattaaaattacaaaagaga

SEQ ID NO: 29810 - DNA, 1592 bp, Homo sapiens
  source 1..1592: mol_type = unassigned DNA
actcccagccggccgcagcctgacacgccgcgcggccccccagtctcccgcggctgctcccccaggcatggcacagggcctcgcctcactatggcagcagcacggcacagcacgctcgacttcatgctcggcgccaaagctgatggtgagaccattctaaaaggcctccagtccattttccaggagcaggggatggcggagtcggtgcacacctggcaggaccatggctatttagcaacctacacaaacaagaacggcagattttgaacaaagtagaggaaagaatgaaagaattgagtcaggacagtactgggcgggtgaaacgattaccacccatagtgcgaggaggagccatcgacagatactggcccaccgccgacgggcgcctggttgaatatgacatagatgaagtggtatatgacgaagattcaccttatcaaaatataaaaattctacactcgaagcagtttggaaatattctcatccttagtggggatgttaatttggcagagagtgatttggcatatacccgggccatcatgggcagtggcaaagaagattacactggcaaagatgtactcattctgggaggtggagacggaggcatattgtgtgaaatagtcaaactaaaaccaaagatggtcactatggtagagattgaccaaatggtgattgatgggtgtaagaaatacatgcgaaaaacgtgtggcgatgtcttagacaatcttaaaggagactgctatcaggttctaatagaagactgtatcccggtactgaagaggtacgccaaagaagggagagaatttgattatgtgattaatgatttgacagctgttccaatctccacgtctccagaagaagattccacatgggagtttctcagactgattcttgacctctcaatgaaagtgttgaaacaggatgggaaatattttacacaggggaactgtgtcaatctgacagaagcactgtcgctctatgaagaacagctggggcgcctgtattgtcctgtggaattttcaaaggagatcgtctgtgtcccttcatacttggaattatttctcttacagttctggagagtcagaagttcaaaatgcgccttagagggctaaaatgaaggtgttggcagggttggttccttctggaggctcctgggaaaatctgtgttctttctttaatttcagtctcaaagccagcagtggaacagtttcaagtctctctgctcctgttgtcacattgccttccatctctgtctcctgtgtccctcttgtaaggccacttgtgattacaagtcctacctagatgatccaggattctcttcctgcttcgaaatccttaaccagttcttcaaaatccttttgccatataaagtaacattcttataaggctctggagattacatggggtggggcggggtggcagggtgggggcatttatttcacctactgcatgttgcaagataaaagtaactttacagtgcagaaattggacaacatcttgaccaggtaatgaaaatcaacatccacaagggcaggtggacgtcctgtgcctccagaggtgacactctgagaagggtctgtcaccacctatgc

SEQ ID NO: 29811 - DNA, 931 bp, Homo sapiens
  source 1..931: mol_type = unassigned DNA
cggcggtcgggcggaggccgcgctcctgctggctccgcgctccgtcccggccgcagctcggggcctgcaggggcagtcccgggtgcccgccggccgcgccgcccttccgggccctggccgtccacccgcgctcccacgcgggctcgccgccttcgcgctcccgctcggggagtccccgggctgccgggcgcgggcggaccccccatgggacgagggttgcagggactgcggcggagcgaggcgtgacccgcgcggcgagcccgggctgggggcgtgcgccgagcggggctgcccgcgcgaccttttcctgttcttgcaggcggctgatggtgagaccattctaaaaggcctccagtccattttccaggagcaggggatggcggagtcggtgcacacctggcaggaccatggctatttagcaacctacacaaacaagaacggcagctttgccaatttgagaatttacccacatggattggtgttgctggaccttcagagttatgatggtgatgcgcaaggcaaagaagagatcgacagtattttgaacaaagtagaggaaagaatgaaagaattgagtcaggacagtactgggcgggtgaaacgattaccacccatagtgcgaggaggagccatcgacagatactggcccaccgccgacgggcgcctggttgaatatgacatagatgaagtggtatatgacgaagattcaccttatcaaaatataaaaattctacactcgaagcagtttggaaatattctcatccttagtggggatgttaatttggcagagagtgatttggcatatacccgggccatcatgggcagtggcaaagaagattacactggcaaagatgtactcattctgggaggtggagacggaggcatattgtgtgaaatagtcaaactaaaaccaaagatggtcactatggta

SEQ ID NO: 29812 - DNA, 5427 bp, Homo sapiens
  source 1..5427: mol_type = unassigned DNA
ccgggaagccaccccgcctctccgaggcctccctgccccgccccgtcacgcccctttcccggcgggacgctttgagccgccccgaactaagcagggcggtcgggggagtcatactccatgggtttatgtgataaatgatcttggcatagaagagaatttaaagaatgatggaaaacctaaatgtcaaactggtggaaaatctaagaggaccattcaaggcactcataaaactactaaacagcagagtactgcagtggactgtaaaataacatcgtctacgactggagataaacactttgataaaagtcccactaaaacaaggcaccctcggaaaattgatctaagagctcgatactgggcatttctttttgataatcttcgccgagcagtagatgaaatctatgtaacttgcgaatcagatcagagtgtggtcgaatgtaaggaggtgctaatgatgctggataactatgtaagagatttcaaagcattgattgactggattcagcttcaggaaaagctagagaagacagatgctcaaagcagaccaacatcattggcatgggaagtaaagaagatgtctccgggacgccatgtgattccaagtccatcaacagatagaataaatgtaacatcaaatgctcgacgaagcttaaattttggaggttcaactggcacagtgccagctcctcgtctggctcccacaggtgtcagttgggctgacaaggtaaaggctcatcatacaggctctactgcttcttcagaaataacacccgcccagtcttgcccaccaatgacagtgcagaaggcctcacgcaaaaatgaacggaaagatgctgaaggatgggagaccgttcagagaggaaggcctattcgttctcgatcaacagcagtgatgccaaaagtttcattggcaacagaagccacaagatcaaaggatgacagtgataaagaaaatgtatgtcttttacctgatgaaagcatacagaaaggtcaatttgttggagatggaacttctaatactatagaatctcatcccaaagactcattacactcttgtgaccatcctcttgccgaaaaaacccagttcacagtgagtacattggatgatgtgaagaattctggcagtattcgagacaattatgttcgaacttctgaaatatctgctgtccacattgatacagagtgtgtttcagttatgctgcaagctggtacacctcctttacaagtaaatgaagaaaaatttccagcagagaaagcaaggatagaaaatgaaatggacccttcagatatttcaaatgtgagtgctgctaacttgtccatggcagaagtccttgctaaaaaagaagagctagcagatcgtctagaaaaggccaatgaagaagccattgctagtgctattgctgaagaagaacagttaactagagaaattgaagctgaagaaaacaatgatattaacattgaaactgacaacgacagtgatttttctgccagcatgggcagtgggagtgtttctttctgtggtatgtccatggactggaacgatgtccttgcagattatgaagctcgtgagtcttggcgccaaaatacatcctggggggacattgtagaagaagaacctgctagacctccagggcatggaattcacatgcatgaaaaactttcttcaccctctcgtaaaagaacaattgcagaatctaagaagaaacatgaagaaaaacaaatgaaagcacagcagctaagggaaaagttacgcgaagagaaaacattgaagcttcagaaattgttagaaagggagaaggatgtccggaagtggaaggaagaattgctagatcaacgacgcaggatgatggaagaaaaattacttcatgctgagtttaagcgagaagtgcagttacaagcaattgtgaaaaaagcacaagaagaagaagctaaggtaaatgaaattgcctttataaatacccttgaagcccagaataaacgtcatgatgttttatcaaaattgaaggaatatgaacagaggcttaatgagctacaggaagagcgtcagagaagacaggaagaaaagcaagcacgtgatgaagctgtgcaggaacgcaagagagctctagaggcagagcggcaggcccgtgtagaagaattgttaatgaagaggaaagaacaagaagcccgaattgaacaacagaggcaagaaaaggaaaaagcccgtgaggatgcagcccgggaaagagctagagacagggaagaacgattggcagcactcacagctgctcaacaagaagctatggaagagttacagaaaaaaattcagctcaagcatgatgaaagtattcgaaggcacatggaacagattgaacaaagaaaagaaaaagctgctgagctaagcagtgggcgacatgcaaatactgattatgcccccaaactgaccccttatgaaagaaagaagcagtgttctctctgcaatgtcctgatctcttcagaggtatatctttttagccatgttaaagggagaaaacaccagcaagccgtgagagagaataccagcatccaggggcgtgaactgtcagatgaagaagtggagcatctttccttgaagaagtacattattgacattgtggttgaaagtacagctccagcagaagctttgaaagatggagaagagcggcaaaaaaataaaaaaaaagccaaaaagataaaagcccggatgaacttcagggctaaggaatatgagagtttaatggaaaccaaaaattctggctctgattcaccttataaagcaaagcttcagcgattagccaaagatcttctaaaacaagtacaagttcaagacagtggctcatgggcaaacaataaagtgtctgctttggatcggaccctaggagagatcactagaatactggaaaaagagaatgtggcagatcagattgcatttcaagctgctggtggattaacagcccttgaacacatccttcaagcagtagtcccagccacaaatgtgaacacagttttaagaattcctcctaagtctctctgcaatgcaatcaatgtttacaacctcacctgcaataactgttcagaaaactgcagtgatgttctgtttagtaacaagattaccttcttaatggacctcctgatacaccagttgacggtttatgttccagatgaaaataatactattttggggagaaatacaaataaacaagtttttgaaggcttgacaactggacttctcaaagtcagtgctgtggttttgggctgcctgattgccaatcgaccagatggaaactgccagccagctaccccaaaaataccaacacaggaaatgaaaaacaaaccctcacaaggtgatccttttaacaatcgagttcaggaccttatcagctacgtggtgaacatgggtctgattgacaaactgtgtgcctgcttcctctcggtgcaaggcccagtggatgagaatcccaagatggccatatttctgcagcatgccgcaggactcttacatgcaatgtgtacactgtgctttgctgtcactggaaggtcatacagcatatttgacaataatcgccaggatcccacagggctgacagctgctcttcaggcaaccgacctggctggagttcttcatatgctctactgtgtcctcttccatggcaccatcttggaccccagcactgccagtcccaaggagaattacactcaaaataccatccaagtggccattcagagtttacgtttcttcaacagctttgcagctcttcatctgcctgcttttcaggtaccaagtattggtttatatcgatgttaaccaatcaagagttagtattttagtgtagataggatgtcagattcttctcctgaattggggcataaggaataaactacaataaatggaattataatatatattataatttattaaactactattttctgggaactgtattagatgctctataacatctagcattctcatttattctcatagctaccatgcaaagtattattatacccattttacagatagagaagctgacagttaagtaatgtgcccaaggttacatgtttgtgaaccaggactagtaaccatgactctcccaccccaaagcctatgttcatcctttgccatgctgctatttataaatcttttgtctggaattctttatatcaggacattatcatctcatcaacttttaaatattaaggaaagtaatggtttcttacgtaaatagaaccaaaattagataaattgattgatatgactttctacggatggtttagctgattttgtgtccaatgtaaagtgtataactagctttacagggatttgcatctttagctatgaagtttttatagctaaagaaagaagaattgctttatgctataacaccagactgtcagcctggaaacagattttttttttcatgtaggaaatttaattttcaaaaacactgaacctttggaacagagcaagccccaaggaatagactttctctttcagtttattaactgtcaagtgatttcattaaaaaaggaacaaatttggcagatgatgaacccataatttagatgaattgctttgctctgagggaaaaaggttatagagaaacaaatgtatgaaaatagtggactttgccattctgagatgagaagaatacttctatattgtagctgatgacaaatgtgccattctttaattgatgtcttcctgtcattttgttcaaaaaaggaaacttgtgactaagttgtatcattggatctagtatctttcaactttgtagaattagtttatctgtcacaagaacagaaatcccttcctttgggttaatgcttttctgtctccagagcagttgaactagccttaggaggtaactgactgcacaatacgtagagttctgggaggttacagccacatataaatgagagatatctgctccaaaaaatgtcagtagttcttgcctcagggttgaacataacatctgtgttttatgaagacgtaagcccaccgtattctgtctggaaacagtttggaaatcagggaaccttaactttacatgctcaggatatggagtccaccagtctacccatcagctgcgtcgaaagggagtgatttcttttgttaacagattatggaatagcaaatatctaaaaactgtctcttagcttcctgtttcacgggtcttcttggccaacatttatactgctacaggggactccatatcataaacaagcatctaggataagtcagctgttcggtcagtcactccatcagggagccctaggtccctgctccctgcccctctcctcctgtgaacttgtggcctgtgcaggctcactcacaaaggcgcaccactgaacttcaccagacctgctccctagtgcctttaagcctaaagggcttaataatgggcgataatgtcaagtgatttcatt

SEQ ID NO: 29813 - DNA, 4707 bp, Homo sapiens
  source 1..4707: mol_type = unassigned DNA
gagtcatactccatgggtttatgtgataaatgatcttggcatagaagagaatttaaagaatgatggcttcattccagcgctccaatagtcatgacaaagtaaggagaatagttgcagaggagggtcgtacagcaagaaacctaatagcttggagtgttccactagaaagcaaagatgatgatggaaaacctaaatgtcaaactggtggaaaatctaagaggaccattcaaggcactcataaaactactaaacagagtactgcagtggactgtaaaataacatcgtctacgactggagataaacactttgataaaagtcccactaaaacaaggcaccctcggaaaattgatctaagagctcgatactgggcatttctttttgataatcttcgccgagcagtagatgaaatctatgtaacttgcgaatcagatcagagtgtggtcgaatgtaaggaggtgctaatgatgctggataactatgtaagagatttcaaagcattgattgactggattcagcttcaggaaaagctagagaagacagatgctcaaagcagaccaacatcattggcatgggaagtaaagaagatgtctccgggacgccatgtgattccaagtccatcaacagatagaataaatgtaacatcaaatgctcgacgaagcttaaattttggaggttcaactggcacagtgccagctcctcgtctggctcccacaggtgtcagttgggctgacaaggtaaaggctcatcatacaggctctactgcttcttcagaaataacacccgcccagtcttgcccaccaatgacagtgcagaaggcctcacgcaaaaatgaacggaaagatgctgaaggatgggagaccgttcagagaggaaggcctattcgttctcgatcaacagcagtgatgccaaaagtttcattggcaacagaagccacaagatcaaaggatgacagtgataaagaaaatgtatgtcttttacctgatgaaagcatacagaaaggtcaatttgttggagatggaacttctaatactatagaatctcatcccaaagactcattacactcttgtgaccatcctcttgccgaaaaaacccagttcacagtgagtacattggatgatgtgaagaattctggcagtattcgagacaattatgttcgaacttctgaaatatctgctgtccacattgatacagagtgtgtttcagttatgctgcaagctggtacacctcctttacaagtaaatgaagaaaaatttccagcagagaaagcaaggatagaaaatgaaatggacccttcagatatttcaaattccatggcagaagtccttgctaaaaaagaagagctagcagatcgtctagaaaaggccaatgaagaagccattgctagtgctattgctgaagaagaacagttaactagagaaattgaagctgaagaaaacaatgatattaacattgaaactgacaacgacagtgatttttctgccagcatgggcagtgggagtgtttctttctgtggtatgtccatggactggaacgatgtccttgcagattatgaagctcgtgagtcttggcgccaaaatacatcctggggggacattgtagaagaagaacctgctagacctccagggcatggaattcacatgcatgaaaaactttcttcaccctctcgtaaaagaacaattgcagaatctaagaagaaacatgaagaaaaacaaatgaaagcacagcagctaagggaaaagttacgcgaagagaaaacattgaagcttcagaaattgttagaaagggagaaggatgtccggaagtggaaggaagaattgctagatcaacgacgcaggatgatggaagaaaaattacttcatgctgagtttaagcgagaagtgcagttacaagcaattgtgaaaaaagcacaagaagaagaagctaaggtaaatgaaattgcctttataaatacccttgaagcccagaataaacgtcatgatgttttatcaaaattgaaggaatatgaacagaggcttaatgagctacaggaagagcgtcagagaagacaggaagaaaagcaagcacgtgatgaagctgtgcaggaacgcaagagagctctagaggcagagcggcaggcccgtgtagaagaattgttaatgaagaggaaagaacaagaagcccgaattgaacaacagaggcaagaaaaggaaaaagcccgtgaggatgcagcccgggaaagagctagagacagggaagaacgattggcagcactcacagctgctcaacaagaagctatggaagagttacagaaaaaaattcagctcaagcatgatgaaagtattcgaaggcacatggaacagattgaacaaagaaaagaaaaagctgctgagctaagcagtgggcgacatgcaaatactgattatgcccccaaactgaccccttatgaaagaaagaagcagtgttctctctgcaatgtcctgatctcttcagaggtatatctttttagccatgttaaagggagaaaacaccagcaagccgtgagagagaataccagcatccaggggcgtgaactgtcagatgaagaagtggagcatctttccttgaagaagtacattattgacattgtggttgaaagtacagctccagcagaagctttgaaagatggagaagagcggcaaaaaaataaaaaaaaagccaaaaagataaaagcccggatgaacttcagggctaaggaatatgagagtttaatggaaaccaaaaattctggctctgattcaccttataaagcaaagcttcagcgattagccaaagatcttctaaaacaagtacaagttcaagacagtggctcatgggcaaacaataaagtgtctgctttggatcggaccctaggagagatcactagaatactggaaaaagagaatgtggcagatcagattgcatttcaagctgctggtggattaacagcccttgaacacatccttcaagcagtagtcccagccacaaatgtgaacacagttttaagaattcctcctaagtctctctgcaatgcaatcaatgtttacaacctcacctgcaataactgttcagaaaactgcagtgatgttctgtttagtaacaagattaccttcttaatggacctcctgatacaccagttgacggtttatgttccagatgaaaataatactattttggggagaaatacaaataaacaagtttttgaaggcttgacaactggacttctcaaagtcagtgctgtggttttgggctgcctgattgccaatcgaccagatggaaactgccagccagctaccccaaaaataccaacacaggaaatgaaaaacaaaccctcacaaggtgatccttttaacaatcgagttcaggaccttatcagctacgtggtgaacatgggtctgattgacaaactgtgtgcctgcttcctctcggtgcaaggcccagtggatgagaatcccaagatggccatatttctgcagcatgccgcaggactcttacatgcaatgtgtacactgtgctttgctgtcactggaaggtcatacagcatatttgacaataatcgccaggatcccacagggctgacagctgctcttcaggcaaccgacctggctggagttcttcatatgctctactgtgtcctcttccatggcaccatcttggaccccagcactgccagtcccaaggagaattacactcaaaataccatccaagtggccattcagagtttacgtttcttcaacagctttgcagctcttcatctgcctgcttttcagtctattgtaggggcagagggcttgtcccttgcattccggcacatggccagctccctgctgggccactgcagccaagtctcctgtgaaagcctccttcatgaggtcatcgtctgtgtgggctacttcactgtcaaccacccagataaccaggtgatcgtgcagtccggccgccaccccacagtgctgcagaagctctgccagttgcccttccagtatttcagtgacccacggctgatcaaagtactgttcccttcacttatcgctgcttgttacaacaaccatcagaacaagatcattctggagcaagagatgagctgtgttttactggccactttcattcaggatttggcacagactccaggtcaagcggaaaaccagccttaccaacccaaagggaaatgccttggttcccaagactatcttgagctggctaacagatttcctcagcaggcctgggaagaagctcgacagtttttcttgaaaaaagagaaaaaataaatgttttggttgattctgtatttgagtacccttgttaatattttaaattgtccaaacaaacattctaattgttccttaagaactcattttcccatgtttatactcttcccacactgtagatatggcatgtactttacactatttataatgactgtagatacttgaatgttctacttgctaattttgcaagttgagtttatttcatttatgcagagtatcttggagtttggtaatttccatcttatgataatatatactttgcatttgtgatatgggtgaaaggagacataaaattagcaagtctgttttgttcttgtaataaagtaacttattctgttttcattgttgacttttcatgttaaggaaatacgaatctgaaagaaaaatgttaactccagctcttgaagtatcttaaataaagacttaattaaagtttacctgctct

SEQ ID NO: 29814 - DNA, 4850 bp, Homo sapiens
  source 1..4850: mol_type = unassigned DNA
acttctccttcctgctgccttgtaaagaaggcgccttgcttgcccttctccttccaccatgattgcaagtttcctgaggcctccccagccatgctgaactgaaaacctaaatgtcaaactggtggaaaatctaagaggaccattcaaggcactcataaaactactaaacagctctttgaggaatcgccatacttctttccataatggccgaactaatttacactcccagcaatagcgtagtactgcagtggactgtaaaataacatcgtctacgactggagataaacactttgataaaagtcccactaaaacaaggcaccctcggaaaattgatctaagagctcgatactgggcatttctttttgataatcttcgccgagcagtagatgaaatctatgtaacttgcgaatcagatcagagtgtggtcgaatgtaaggaggtgctaatgatgctggataactatgtaagagatttcaaagcattgattgactggattcagcttcaggaaaagctagagaagacagatgctcaaagcagaccaacatcattggcatgggaagtaaagaagatgtctccgggacgccatgtgattccaagtccatcaacagatagaataaatgtaacatcaaatgctcgacgaagcttaaattttggaggttcaactggcacagtgccagctcctcgtctggctcccacaggtgtcagttgggctgacaaggtaaaggctcatcatacaggctctactgcttcttcagaaataacacccgcccagtcttgcccaccaatgacagtgcagaaggcctcacgcaaaaatgtgaccagcttccatcctgaagccacctaggggctgccagccacttgtcaactcattagcatacaaaaagacacatcattttgggaattccaaagattttaggagttgcatgccaggagacttgagatgaagaccaaatatatattttgcaatatcacagaacggaaagatgctgaaggatgggagaccgttcagagaggaaggcctattcgttctcgatcaacagcagtgatgccaaaagtttcattggcaacagaagccacaagatcaaaggatgacagtgataaagaaaatgtatgtcttttacctgatgaaagcatacagaaaggtcaatttgttggagatggaacttctaatactatagaatctcatcccaaagactcattacactcttgtgaccatcctcttgccgaaaaaacccagttcacagtgagtacattggatgatgtgaagaattctggcagtattcgagacaattatgttcgaacttctgaaatatctgctgtccacattgatacagagtgtgtttcagttatgctgcaagctggtacacctcctttacaagtaaatgaagaaaaatttccagcagagaaagcaaggatagaaaatgaaatggacccttcagatatttcaaattccatggcagaagtccttgctaaaaaagaagagctagcagatcgtctagaaaaggccaatgaagaagccattgctagtgctattgctgaagaagaacagttaactagagaaattgaagctgaagaaaacaatgatattaacattgaaactgacaacgacagtgatttttctgccagcatgggcagtgggagtgtttctttctgtggtatgtccatggactggaacgatgtccttgcagattatgaagctcgtgagtcttggcgccaaaatacatcctggggggacattgtagaagaagaacctgctagacctccagggcatggaattcacatgcatgaaaaactttcttcaccctctcgtaaaagaacaattgcagaatctaagaagaaacatgaagaaaaacaaatgaaagcacagcagctaagggaaaagttacgcgaagagaaaacattgaagcttcagaaattgttagaaagggagaaggatgtccggaagtggaaggaagaattgctagatcaacgacgcaggatgatggaagaaaaattacttcatgctgagtttaagcgagaagtgcagttacaagcaattgtgaaaaaagcacaagaagaagaagctaaggtaaatgaaattgcctttataaatacccttgaagcccagaataaacgtcatgatgttttatcaaaattgaaggaatatgaacagaggcttaatgagctacaggaagagcgtcagagaagacaggaagaaaagcaagcacgtgatgaagctgtgcaggaacgcaagagagctctagaggcagagcggcaggcccgtgtagaagaattgttaatgaagaggaaagaacaagaagcccgaattgaacaacagaggcaagaaaaggaaaaagcccgtgaggatgcagcccgggaaagagctagagacagggaagaacgattggcagcactcacagctgctcaacaagaagctatggaagagttacagaaaaaaattcagctcaagcatgatgaaagtattcgaaggcacatggaacagattgaacaaagaaaagaaaaagctgctgagctaagcagtgggcgacatgcaaatactgattatgcccccaaactgaccccttatgaaagaaagaagcagtgttctctctgcaatgtcctgatctcttcagaggtatatctttttagccatgttaaagggagaaaacaccagcaagccgtgagagagaataccagcatccaggggcgtgaactgtcagatgaagaagtggagcatctttccttgaagaagtacattattgacattgtggttgaaagtacagctccagcagaagctttgaaagatggagaagagcggcaaaaaaataaaaaaaaagccaaaaagataaaagcccggatgaacttcagggctaaggaatatgagagtttaatggaaaccaaaaattctggctctgattcaccttataaagcaaagcttcagcgattagccaaagatcttctaaaacaagtacaagttcaagacagtggctcatgggcaaacaataaagtgtctgctttggatcggaccctaggagagatcactagaatactggaaaaagagaatgtggcagatcagattgcatttcaagctgctggtggattaacagcccttgaacacatccttcaagcagtagtcccagccacaaatgtgaacacagttttaagaattcctcctaagtctctctgcaatgcaatcaatgtttacaacctcacctgcaataactgttcagaaaactgcagtgatgttctgtttagtaacaagattaccttcttaatggacctcctgatacaccagttgacggtttatgttccagatgaaaataatactattttggggagaaatacaaataaacaagtttttgaaggcttgacaactggacttctcaaagtcagtgctgtggttttgggctgcctgattgccaatcgaccagatggaaactgccagccagctaccccaaaaataccaacacaggaaatgaaaaacaaaccctcacaaggtgatccttttaacaatcgagttcaggaccttatcagctacgtggtgaacatgggtctgattgacaaactgtgtgcctgcttcctctcggtgcaaggcccagtggatgagaatcccaagatggccatatttctgcagcatgccgcaggactcttacatgcaatgtgtacactgtgctttgctgtcactggaaggtcatacagcatatttgacaataatcgccaggatcccacagggctgacagctgctcttcaggcaaccgacctggctggagttcttcatatgctctactgtgtcctcttccatggcaccatcttggaccccagcactgccagtcccaaggagaattacactcaaaataccatccaagtggccattcagagtttacgtttcttcaacagctttgcagctcttcatctgcctgcttttcagtctattgtaggggcagagggcttgtcccttgcattccggcacatggccagctccctgctgggccactgcagccaagtctcctgtgaaagcctccttcatgaggtcatcgtctgtgtgggctacttcactgtcaaccacccagataaccaggtgatcgtgcagtccggccgccaccccacagtgctgcagaagctctgccagttgcccttccagtatttcagtgacccacggctgatcaaagtactgttcccttcacttatcgctgcttgttacaacaaccatcagaacaagatcattctggagcaagagatgagctgtgttttactggccactttcattcaggatttggcacagactccaggtcaagcggaaaaccagccttaccaacccaaagggaaatgccttggttcccaagactatcttgagctggctaacagatttcctcagcaggcctgggaagaagctcgacagtttttcttgaaaaaagagaaaaaataaatgttttggttgattctgtatttgagtacccttgttaatattttaaattgtccaaacaaacattctaattgttccttaagaactcattttcccatgtttatactcttcccacactgtagatatggcatgtactttacactatttataatgactgtagatacttgaatgttctacttgctaattttgcaagttgagtttatttcatttatgcagagtatcttggagtttggtaatttccatcttatgataatatatactttgcatttgtgatatgggtgaaaggagacataaaattagcaagtctgttttgttcttgtaataaagtaacttattctgttttcattgttgacttttcatgttaaggaaatacgaatctgaaagaaaaatgttaactccagctcttgaagtatcttaaataaagacttaattaaagtttacctgctct

SEQ ID NO: 29815 - DNA, 4747 bp, Homo sapiens
  source 1..4747: mol_type = unassigned DNA
gctttgagccgccccgaactaagcagggcggtcgggggagtcatactccatgggtttatgtgataaatgatcttggcatagaagagaatttaaagaatgatggcttcattccagcgctccaatagtcatgacaaagtaaggagaatagttgcagaggagggtcgtacagcaagaaacctaatagcttggagtgttccactagaaagcaaagatgatgatggaaaacctaaatgtcaaactggtggaaaatctaagaggaccattcaaggcactcataaaactactaaacagagtactgcagtggactgtaaaataacatcgtctacgactggagataaacactttgataaaagtcccactaaaacaaggcaccctcggaaaattgatctaagagctcgatactgggcatttctttttgataatcttcgccgagcagtagatgaaatctatgtaacttgcgaatcagatcagagtgtggtcgaatgtaaggaggtgctaatgatgctggataactatgtaagagatttcaaagcattgattgactggattcagcttcaggaaaagctagagaagacagatgctcaaagcagaccaacatcattggcatgggaagtaaagaagatgtctccgggacgccatgtgattccaagtccatcaacagatagaataaatgtaacatcaaatgctcgacgaagcttaaattttggaggttcaactggcacagtgccagctcctcgtctggctcccacaggtgtcagttgggctgacaaggtaaaggctcatcatacaggctctactgcttcttcagaaataacacccgcccagtcttgcccaccaatgacagtgcagaaggcctcacgcaaaaatgaacggaaagatgctgaaggatgggagaccgttcagagaggaaggcctattcgttctcgatcaacagcagtgatgccaaaagtttcattggcaacagaagccacaagatcaaaggatgacagtgataaagaaaatgtatgtcttttacctgatgaaagcatacagaaaggtcaatttgttggagatggaacttctaatactatagaatctcatcccaaagactcattacactcttgtgaccatcctcttgccgaaaaaacccagttcacagtgagtacattggatgatgtgaagaattctggcagtattcgagacaattatgttcgaacttctgaaatatctgctgtccacattgatacagagtgtgtttcagttatgctgcaagctggtacacctcctttacaagtaaatgaagaaaaatttccagcagagaaagcaaggatagaaaatgaaatggacccttcagatatttcaaattccatggcagaagtccttgctaaaaaagaagagctagcagatcgtctagaaaaggccaatgaagaagccattgctagtgctattgctgaagaagaacagttaactagagaaattgaagctgaagaaaacaatgatattaacattgaaactgacaacgacagtgatttttctgccagcatgggcagtgggagtgtttctttctgtggtatgtccatggactggaacgatgtccttgcagattatgaagctcgtgagtcttggcgccaaaatacatcctggggggacattgtagaagaagaacctgctagacctccagggcatggaattcacatgcatgaaaaactttcttcaccctctcgtaaaagaacaattgcagaatctaagaagaaacatgaagaaaaacaaatgaaagcacagcagctaagggaaaagttacgcgaagagaaaacattgaagcttcagaaattgttagaaagggagaaggatgtccggaagtggaaggaagaattgctagatcaacgacgcaggatgatggaagaaaaattacttcatgctgagtttaagcgagaagtgcagttacaagcaattgtgaaaaaagcacaagaagaagaagctaaggtaaatgaaattgcctttataaatacccttgaagcccagaataaacgtcatgatgttttatcaaaattgaaggaatatgaacagaggcttaatgagctacaggaagagcgtcagagaagacaggaagaaaagcaagcacgtgatgaagctgtgcaggaacgcaagagagctctagaggcagagcggcaggcccgtgtagaagaattgttaatgaagaggaaagaacaagaagcccgaattgaacaacagaggcaagaaaaggaaaaagcccgtgaggatgcagcccgggaaagagctagagacagggaagaacgattggcagcactcacagctgctcaacaagaagctatggaagagttacagaaaaaaattcagctcaagcatgatgaaagtattcgaaggcacatggaacagattgaacaaagaaaagaaaaagctgctgagctaagcagtgggcgacatgcaaatactgattatgcccccaaactgaccccttatgaaagaaagaagcagtgttctctctgcaatgtcctgatctcttcagaggtatatctttttagccatgttaaagggagaaaacaccagcaagccgtgagagagaataccagcatccaggggcgtgaactgtcagatgaagaagtggagcatctttccttgaagaagtacattattgacattgtggttgaaagtacagctccagcagaagctttgaaagatggagaagagcggcaaaaaaataaaaaaaaagccaaaaagataaaagcccggatgaacttcagggctaaggaatatgagagtttaatggaaaccaaaaattctggctctgattcaccttataaagcaaagcttcagcgattagccaaagatcttctaaaacaagtacaagttcaagacagtggctcatgggcaaacaataaagtgtctgctttggatcggaccctaggagagatcactagaatactggaaaaagagaatgtggcagatcagattgcatttcaagctgctggtggattaacagcccttgaacacatccttcaagcagtagtcccagccacaaatgtgaacacagttttaagaattcctcctaagtctctctgcaatgcaatcaatgtttacaacctcacctgcaataactgttcagaaaactgcagtgatgttctgtttagtaacaagattaccttcttaatggacctcctgatacaccagttgacggtttatgttccagatgaaaataatactattttggggagaaatacaaataaacaagtttttgaaggcttgacaactggacttctcaaagtcagtgctgtggttttgggctgcctgattgccaatcgaccagatggaaactgccagccagctaccccaaaaataccaacacaggaaatgaaaaacaaaccctcacaaggtgatccttttaacaatcgagttcaggaccttatcagctacgtggtgaacatgggtctgattgacaaactgtgtgcctgcttcctctcggtgcaaggcccagtggatgagaatcccaagatggccatatttctgcagcatgccgcaggactcttacatgcaatgtgtacactgtgctttgctgtcactggaaggtcatacagcatatttgacaataatcgccaggatcccacagggctgacagctgctcttcaggcaaccgacctggctggagttcttcatatgctctactgtgtcctcttccatggcaccatcttggaccccagcactgccagtcccaaggagaattacactcaaaataccatccaagtggccattcagagtttacgtttcttcaacagctttgcagctcttcatctgcctgcttttcagtctattgtaggggcagagggcttgtcccttgcattccggcacatggccagctccctgctgggccactgcagccaagtctcctgtgaaagcctccttcatgaggtcatcgtctgtgtgggctacttcactgtcaaccacccagataaccaggtgatcgtgcagtccggccgccaccccacagtgctgcagaagctctgccagttgcccttccagtatttcagtgacccacggctgatcaaagtactgttcccttcacttatcgctgcttgttacaacaaccatcagaacaagatcattctggagcaagagatgagctgtgttttactggccactttcattcaggatttggcacagactccaggtcaagcggaaaaccagccttaccaacccaaagggaaatgccttggttcccaagactatcttgagctggctaacagatttcctcagcaggcctgggaagaagctcgacagtttttcttgaaaaaagagaaaaaataaatgttttggttgattctgtatttgagtacccttgttaatattttaaattgtccaaacaaacattctaattgttccttaagaactcattttcccatgtttatactcttcccacactgtagatatggcatgtactttacactatttataatgactgtagatacttgaatgttctacttgctaattttgcaagttgagtttatttcatttatgcagagtatcttggagtttggtaatttccatcttatgataatatatactttgcatttgtgatatgggtgaaaggagacataaaattagcaagtctgttttgttcttgtaataaagtaacttattctgttttcattgttgacttttcatgttaaggaaatacgaatctgaaagaaaaatgttaactccagctcttgaagtatcttaaataaagacttaattaaagtttacctgctctaaa

SEQ ID NO: 29816 - DNA, 1537 bp, Homo sapiens
  source 1..1537: mol_type = unassigned DNA
aagggaaggaagtaagggcgagcccgtcggactacgaagcgggacggaaactacaattcccagcaggccttgggcctcagtgcggccgcgaagcagagcgggctgtagagccttgcgcgcgcagtggggatggaacgttgctaggcttagcgggtctggctgctgggggcccgagcagcacgctcggagccgccgcgcgccaaagcgggaatctgggaggcgagcagctctgcagttaatgcacgtattttaaactcccgggcctgcggacgctatgcacaggaagcacctccaggagattccagacctgagtagcaacgttgccaccagcttcacgtggggatgggattccagcaagacttctgaactgctgtcaggcatgggggtctccgccctggagaaagaggagcccgacagtgagaacatcccccaggaactgctctcaaacctgggccacccggagagccccccacggaaacggctgaagagcaaagggagtgacaaagactttgtgattgtccgcaggcctaagctaaatcgagagaactttccaggtgtttcatgggactcccttccggatgagctgctcttgggaatcttttcctgtctgtgcctccctgagctgctaaaggtctctggtgtttgtaagaggtggtatcgcctagcgtctgatgagtctctatggcagaccttagacctcacaggtaaaaatctgcacccggatgtgactggtcggttgctgtctcaaggggtgattgccttccgctgcccacgatcatttatggaccaaccattggctgaacatttcagcccttttcgtgtacagcacatggacctatcgaactcagttatagaagtgtccaccctccacggcatactgtctcagtgttccaagttgcagaatctaagcctggaaggcctgcggctttcggatcccattgtcaatactctcgcaaaaaactcaaatttagtgcgacttaacctttctgggtgttctggattctctgaatttgccctgcagactttgctaagcagctgttccagactggatgagctgaacctctcctggtgttttgatttcactgaaaagcatgtacaggtggctgttgcgcatgtgtcagagaccatcacccagctgaatcttagcggctacagaaagaatctccagaaatcagatctctctactttagttagaagatgccccaatcttgtccatctagacttaagtgatagtgtcatgctaaagaatgactgctttcaggaatttttccagctcaactacctccaacacctatcactcagtcggtgctatgatataatacctgaaactttactattagtgacaagagctggggttaggatccggttggactctgacatcggatgccctcaaacatacagaacttccaaactcaagtccagccataagctattttgccaacatgtcagagtaatctgtatttttgtatgtgatttctacttttatagacttgttttaaaacaataaaacacatttttataaaaatgagtgcttaaa

SEQ ID NO: 29817 - DNA, 3759 bp, Homo sapiens
  source 1..3759: mol_type = unassigned DNA
agtgcggccgcgaagcagagcgggctgtagagccttgcgcgcgcagtggggatggaacgttgctaggcttagcgggtctggctgctgggggcccgagcagcacgctcggagccgccgcgcgccaaagcgggaatctgggaggcgagcagctctgcagttaatgcacgtattttaaactcccgggcctgcggacgctatgcacaggaagcacctccaggagattccagacctgagtagcaacgttgccaccagcttcacgtggggatgggattccagcaagacttctgaactgctgtcaggcatgggggtctccgccctggagaaagaggagcccgacagtgagaacatcccccaggaactgctctcaaacctgggccacccggagagccccccacggaaacggctgaagagcaaagggagtgacaaagactttgtgattgtccgcaggcctaagctaaatcgagagaactttccaggtgtttcatgggactcccttccggatgagctgctcttgggaatcttttcctgtctgtgcctccctgagctgctaaaggtctctggtgtttgtaagaggtggtatcgcctagcgtctgatgagtctctatggcagaccttagacctcacaggtaaaaatctgcacccggatgtgactggtcggttgctgtctcaaggggtgattgccttccgctgcccacgatcatttatggaccaaccattggctgaacatttcagcccttttcgtgtacagcacatggacctatcgaactcagttatagaagtgtccaccctccacggcatactgtctcagtgttccaagttgcagaatctaagcctggaaggcctgcggctttcggatcccattgtcaatactctcgcaaaaaactcaaatttagtgcgacttaacctttctgggtgttctggattctctgaatttgccctgcagactttgctaagcagctgttccagactggatgagctgaacctctcctggtgttttgatttcactgaaaagcatgtacaggtggctgttgcgcatgtgtcagagaccatcacccagctgaatcttagcggctacagaaagaatctccagaaatcagatctctctactttagttagaagatgccccaatcttgtccatctagacttaagtgatagtgtcatgctaaagaatgactgctttcaggaatttttccagctcaactacctccaacacctatcactcagtcggtgctatgatataatacctgaaactttacttgaacttggagaaattcccacactaaaaacactacaagtttttggaatcgtgccagatggtacccttcaactgttaaaggaagcccttcctcatctacagattaattgctcccatttcaccaccattgccaggccaactattggcaacaaaaagaaccaggagatatggggcatcaaatgccgactgacactgcaaaagcccagttgtctatgaagtatttattgcaggatggtgtctcttctttagaacagggaaaataggcaggaagcccaattgctggagtacttagctagttttattcttggttttccctttgccttcattctgcaagtatactagggagccatttgagagggaaaactatgaaatcttgctttttgaaatgattctaaaagcttctatcactgctttgctcttaagagccaaagttgtaggccttttgaaattttaggagagtgagcctataatttcaagataccttaaagagcaaaatttgagccacctcttccaagtgcccttcttactaagtctattcagaatcaagcttaaaaattaccaccagcaaacaatcttcatagcccatataacttttatctatttaattttatagtattgctttataagacagcttagaagaacaataagctatttgtattatgagctgaacaaaaagagaatcataggatagtagcgtctgaggccatcttttctaggaataggaaagagaaaaatgtatttgaattttgcctttagatttgaaattaggttaatagaaataagtaaccccatgtaattcaccttaaaacttaacaaaagaccaaacattacaaaacccagagatatagaatcaatataggatttgaaggcccagcagacagttttctatgacaggttaatctgaagtatcctgtaatgttcattaagttactgtgtttccagaatctaaattagatgagaaatataattgtggttttctaacttgataatcaaattatgttaacatgggtcctttagcttttaaaatgacttgctttgttttagaaaggtggtattaatccactctctattcttgaaaatttggatgggagaattctgaagttgcctgctgttttcctttagcgctgaggttcttaaggttacttttatattactctggaatcaagtattttaaattgtattttttttttaaatgatctctcagcaataattgtttgaaactatccatatataaggttatcagacctacagttccctaagaggaactgcatgttctcttcaatcagaaatatacagtagaagcaggtatatcttccatgcagtttcagtagtaagcactacttatacctacataagagttaaaatccagatgtgggaccttttgataccatcagtgatatatatttttttaaactggtacagagaagtgaaaagattaaattctacttctattttttttttttttttttgagacggagtctcgctctgtcaccaaggccggagtgcagtggtgcgatctcggctcactgcaagctccgcctcccaggttcacgtcattctcctgcctcagcctcccgactagctgggactacaggcgcccaccaccacgcccggctaatttttttgtatttttagtagagacggggtttcaccatgttagccaggatggtctcaatctcctgacctcatgatccgcccgtcttggcctcccaaagtgctgggattacaggcatgagcaactgcgcccagccaaattctacttcttaaaaatcacaaaaactagtttaaattgatgacttgttcgtatgttcaaaatgtaacaacaaaaaaagctaacaccagtcatttatattaactttttttttttaaatcaaaaattgttaatgttagaaacatactatgaagtgcctttatctgcttagacctaaggaagattttaaagttgggttgcacaggaaatgatgatgcttcaatttcttaatagttaaaaagtgctaaatactacttgaaattattgtttacagattagtgacaagagctggggttaggatccggttggactctgacatcggatgccctcaaacatacagaacttccaaactcaagtccagccataagctattttgccaacatgtcagagtaatctgtatttttgtatgtgatttctacttttatagacttgttttaaaacaataaaacacatttttataaaaatgagtgcttaaactaagttgtattccttttttctttctctttttttaagtgctgtggttaaaatttgaaagcatttagtgtggtatgccatttggcttagatacctctaaataagactcttcaaaacagagccctgagatggtcctttttgacccatctacttcatatgcttgtcacattaaaaaaaaaagtttataatgcctttataaaaggggctaatacagtcttgttatctttttttttaaattatactttaagttctagggtacatgtgcacaacgtgcaggttt

SEQ ID NO: 29818 - DNA, 1409 bp, Homo sapiens
  source 1..1409: mol_type = unassigned DNA
agtgcggccgcgaagcagagcgggctgtagagccttgcgcgcgcagtggggatggaacgttgctaggcttagcgggtctggctgctgggggcccgagcagcacgctcggagccgccgcgcgccaaagcgggaatctgggaggcgagcagctctgcagttaatgcacgtattttaaactcccgggcctgcggacgctatgcacaggaagcacctccaggagaaagaggagcccgacagtgagaacatcccccaggaactgctctcaaacctgggccacccggagagccccccacggaaacggctgaagagcaaagggagtgacaaagactttgtgattgtccgcaggcctaagctaaatcgagagaactttccaggtgtttcatgggactcccttccggatgagctgctcttgggaatcttttcctgtctgtgcctccctgagctgctaaaggtctctggtgtttgtaagaggtggtatcgcctagcgtctgatgagtctctatggcagaccttagacctcacaggtaaaaatctgcacccggatgtgactggtcggttgctgtctcaaggggtgattgccttccgctgcccacgatcatttatggaccaaccattggctgaacatttcagcccttttcgtgtacagcacatggacctatcgaactcagttatagaagtgtccaccctccacggcatactgtctcagtgttccaagttgcagaatctaagcctggaaggcctgcggctttcggatcccattgtcaatactctcgcaaaaaactcaaatttagtgcgacttaacctttctgggtgttctggattctctgaatttgccctgcagactttgctaagcagctgttccagactggatgagctgaacctctcctggtgttttgatttcactgaaaagcatgtacaggtggctgttgcgcatgtgtcagagaccatcacccagctgaatcttagcggctacagaaagaatctccagaaatcagatctctctactttagttagaagatgccccaatcttgtccatctagacttaagtgatagtgtcatgctaaagaatgactgctttcaggaatttttccagctcaactacctccaacacctatcactcagtcggtgctatgatataatacctgaaactttacttgaacttggagaaattcccacactaaaaacactacaagtttttggaatcgtgccagatggtacccttcaactgttaaaggaagcccttcctcatctacagattaattgctcccatttcaccaccattgccaggccaactattggcaacaaaaagaaccaggagatatggggcatcaaatgccgactgacactgcaaaagcccagttgtctatgaagtatttattgcaggatggtgtctcttctttagaacaggg

SEQ ID NO: 29819 - DNA, 1646 bp, Homo sapiens
  source 1..1646: mol_type = unassigned DNA
gctaggcttagcgggtctggctgctgggggcccgagcagcacgctcggagccgccgcgcgccaaagcgggaatctgggaggcgagcagctctgcagttaatgcacgtattttaaactcccgggcctgcggacgctatgcacaggaagcacctccaggagattccagacctgagtagcaacgttgccaccagcttcacgtggggatgggattccagcaagacttctgaactgctgtcaggcatgggggtctccgccctggagaaagaggagcccgacagtgagaacatcccccaggaactgctctcaaacctgggccacccggagagccccccacggaaacggctgaagagcaaagggagtgacaaagactttgtgattgtccgcaggcctaagctaaatcgagagaactttccaggtctgatgagtctctatggcagaccttagacctcacaggtaaaaatctgcacccggatgtgactggtcggttgctgtctcaaggggtgattgccttccgctgcccacgatcatttatggaccaaccattggctgaacatttcagtactctcgcaaaaaactcaaatttagtgcgacttaacctttctgggtgttctggattctctgaatttgccctgcagactttgctaagcagctgttccagactggatgagctgaacctctcctggtgttttgatttcactgaaaagcatgtacaggtggctgttgcgcatgtgtcagagaccatcacccagctgaatcttagcggctacagaaagaatctccagaaatcagatctctctactttagttagaagatgccccaatcttgtccatctagacttaagtgatagtgtcatgctaaagaatgactgctttcaggaatttttccagctcaactacctccaacacctatcactcagtcggtgctatgatataatacctgaaactttacttgaacttggagaaattcccacactaaaaacactacaagtttttggaatcgtgccagatggtacccttcaactgttaaaggaagcccttcctcatctacagattaattgctcccatttcaccaccattgccaggccaactattggcaacaaaaagaaccaggagatatggggcatcaaatgccgactgacactgcaaaagcccagttgtctatgaagtatttattgcaggatggtgtctcttctttagaacagggaaaataggcaggaagcccaattgctggagtacttagctagttttattcttggttttccctttgccttcattctgcaagtatactagggagccatttgagagggaaaactatgaaatcttgctttttgaaatgattctaaaagcttctatcactgctttgctcttaagagccaaagttgtaggccttttgaaattttaggagagtgagcctataatttcaagataccttaaagagcaaaatttgagccacctcttccaagtgcccttcttactaagtctattcagaatcaagcttaaaaattaccaccagcaaacaatcttcatagcccatataacttttatctatttaattttatagtattgctttataagacagcttagaagaacaataagctatttgtattatgagctgaacaaaaagagaatcataggatagtagcgtct

SEQ ID NO: 29820 - DNA, 1851 bp, Homo sapiens
  source 1..1851: mol_type = unassigned DNA
cgctaaacagcagctgaaggtcaggcgaactgactcgctgcggaatctgcctttgcacgtgatcagtcggacgtctacacccgcagccgtcttctgtctccgcctcaccctcaggcctgacggtccgagtggagctgcgggacagcccgaacctccaggtcagccccgcggccctccatggcgctggtgcgcgcactcgtctgctgcctgctgactgcctggcactgccgctccggcctcgggctgcccgtggcgcccgcaggcggcaggaatcctcctccggcgataggacagttttggcatgtgactgacttacacttagaccctacttaccacatcacagatgaccacacaaaagtgtgtgcttcatctaaaggtgcaaatgcctccaaccctggcccttttggagatgttctgtgtgattctccatatcaacttattttgtcagcatttgattttattaaaaattctggacaagaagcatctttcatgatatggacaggggatagcccacctcatgttcctgtacctgaactctcaacagacactgttataaatgtgatcactaatatgacaaccaccatccagagtctctttccaaatctccaggttttccctgcgctgggtaatcatgactattggccacaggatcaactgcctgtagtcaccagtaaagtgtacaatgcagtagcaaacctctggaaaccatggctagatgaagaagctattagtactttaaggaaaggtggtttttattcacagaaagttacaactaatccaaaccttaggatcatcagtctaaacacaaacttgtactacggcccaaatataatgacactgaacaagactgacccagccaaccagtttgaatggctagaaagtacattgaacaactctcagcagaataaggagaaggtgtatatcatagcacatgttccagtggggtatctgccatcttcacagaacatcacagcaatgagagaatactataatgagaaattgatagatatttttcaaaaatacagtgatgtcattgcaggacaattttatggacacactcacagagacagcattatggttctttcagataaaaaaggaagtccagtaaattctttgtttgtggctcctgctgttacaccagtgaagagtgttttagaaaaacagaccaacaatcctggtatcagactgtttcagtatgatcctcgtgattataaattattggatatgttgcagtattacttgaatctgacagaggcgaatctaaagggagagtccatctggaagctggagtatatcctgacccagacctacgacattgaagatttgcagccggaaagtttatatggattagctaaacaatttacaatcctagacagtaagcagtttataaaatactacaattacttctttgtgagttatgacagcagtgtaacatgtgataagacatgtaaggcctttcagatttgtgcaattatgaatcttgataatatttcctatgcagattgcctcaaacagctttatataaagcacaattactagtatttcacagtttttgctaatagaaaatgctgattctgattctgagatcaatttgtgggaattttacataaatctttgttaattactgagtgggcaagtagacttcctgtctttgctttctttttttttttctttttgatgccttaatgtagatatctttatcattctgaattgtattatatatttaaagtgctcattaatagaatgatggatgtaaattggatgtaaatattcagtttatataattatatctaatttgtacccttgttgaaattgtcatttatacaataaagcgaattctttatctctaaa

SEQ ID NO: 29821 - DNA, 1478 bp, Homo sapiens
  source 1..1478: mol_type = unassigned DNA
aggtcagccccgcggccctccatggcgctggtgcgcgcactcgtctgctgcctgctgactgcctggcactgccgctccggcctcgggctgcccgtggcgcccgcaggcggcaggaatcctcctccggcgatagggatagcccacctcatgttcctgtacctgaactctcaacagacactgttataaatgtgatcactaatatgacaaccaccatccagagtctctttccaaatctccaggttttccctgcgctgggtaatcatgactattggccacaggatcaactgcctgtagtcaccagtaaagtgtacaatgcagtagcaaacctctggaaaccatggctagatgaagaagctattagtactttaaggaaaggtggtttttattcacagaaagttacaactaatccaaaccttaggatcatcagtctaaacacaaacttgtactacggcccaaatataatgacactgaacaagactgacccagccaaccagtttgaatggctagaaagtacattgaacaactctcagcagaataaggagaaggtgtatatcatagcacatgttccagtggggtatctgccatcttcacagaacatcacagcaatgagagaatactataatgagaaattgatagatatttttcaaaaatacagtgatgtcattgcaggacaattttatggacacactcacagagacagcattatggttctttcagataaaaaaggaagtccagtaaattctttgtttgtggctcctgctgttacaccagtgaagagtgttttagaaaaacagaccaacaatcctggtatcagactgtttcagtatgatcctcgtgattataaattattggatatgttgcagtattacttgaatctgacagaggcgaatctaaagggagagtccatctggaagctggagtatatcctgacccagacctacgacattgaagatttgcagccggaaagtttatatggattagctaaacaatttacaatcctagacagtaagcagtttataaaatactacaattacttctttgtgagttatgacagcagtgtaacatgtgataagacatgtaaggcctttcagatttgtgcaattatgaatcttgataatatttcctatgcagattgcctcaaacagctttatataaagcacaattactagtatttcacagtttttgctaatagaaaatgctgattctgattctgagatcaatttgtgggaattttacataaatctttgttaattactgagtgggcaagtagacttcctgtctttgctttctttttttttttctttttgatgccttaatgtagatatctttatcattctgaattgtattatatatttaaagtgctcattaatagaatgatggatgtaaattggatgtaaatattcagtttatataattatatctaatttgtacccttgttgaaattgtcatttatacaataaagcgaattctttatctct

SEQ ID NO: 29822 - DNA, 1013 bp, Homo sapiens
  source 1..1013: mol_type = unassigned DNA
gccaaacaagtctctgctcatgaggccccacaggatgaacgagccgaggcaggacagtgtcctgccctgtcggaacagtgactgctgacctgccaagagagagctggggactgcctgctgtctgccagtacaatgaaggaagtggtttattggtcacccaagaaggtggcagactggctgctggagaatgctatgccagaatactgtgagcctctggagcatttcacaggccaggacttgatcaacctaacccaagaggatttcaaaaaaccccccttgtgccgagtctcctctgacaatgggcagcggctcctggacatgatagaaaccctgaaaatggagcaccatttggaagcacacaagaacggccatgccaatgggcacctcaacattggcgtagacatccccacccccgacggcagcttcagcatcaagattaaacccaacgggatgccaaatgggtataggaaagagatgataaagatccccatgccagaactggagcgctctcagtaccccatggagtggggcaagacttttctggcctttctttatgcactttcctgtttcgttctcaccacagtgatgatctcggtcgtccacgaacgagtacctcctaaggaggtgcagcctccactaccggacacattttttgaccattttaaccgggtgcagtgggccttttctatttgtgaaattaatggcatgatccttgtaggactctggttaattcagtggctgctcttaaaatacaaggatgtgggaaatgaaagcagagtcgtcatgatcttcctaagcatcgtccaccctgtccttctactggggtccatcgctggtttcctgtctctctccctgtgacctctcttcagtgtatctggcccaccagacagaattggactttcaagccactgactaggaaaaattcctgggaaatctctgcatttgtgtcagacttcactgcaaaacaggtctattattagcagaagatttttctgcatagttggcacgctgta

SEQ ID NO: 29823 - DNA, 3744 bp, Homo sapiens
  source 1..3744: mol_type = unassigned DNA
tcgggcagcggactgggcatgctcggcagcccgggaggctcgcggtggcaagtcgaaagcgttcgcaccagcggggcagcggctgcgggcggcaggcggcgggcaggtcgggagtgagaaggaccggcctgggctgactgctctcccctcgcgcctagggagccggtcggagagcgcgattggggtgcggagccccgacgctgccctgccccggatttcattccgcggcgggggctccgcgagcggaattccggcggctgccgtgactccagtgcaacgtgacgacagcatgtacgatccctgaatgggcccgtgggcatatttagtcattcatttttgatcaggagaaagaagacagccatcatttgaaaggtaaagcttcagcgactgaaggagtgtggactttttgaatttcaagaacagtaaagttggaacacagcagagggtgtgtaataaaatacagattggaaagaagactgatgaagaaaaataacagcatgattcaggcacaccattgagttctttgggatgcccgaaagtgtctggttgggaaacatgaaatagaagacgagaacctgcctcagcaagcgtacctgagaatacttttaaaggaacctgttgataaatgcaaaacagtggctgttgcaggtgatggaactgtactggaacaatgggagaagctggtagcttataggaagccaagatgaccagaatgtttttaaataatccaaggaagaatcctgctcaaaaatgaggtgaattaatacttgggcgctcaggaaccctggacagctacatgaggtgtttaaaaactgccctgaccatcttgccaaacaagtctctgctcatgaggccccacaggatgaacgagccgaggcaggacagtgtcctgccctgtcggaacagtgactgctgacctgccaagagagagctggggactgcctgctgtctgccagtacaatgaaggaagtggtttattggtcacccaagaaggtggcagactggctgctggagaatgctatgccagaatactgtgagcctctggagcatttcacaggccaggacttgatcaacctaacccaagaggatttcaaaaaaccccccttgtgccgagtctcctctgacaatgggcagcggctcctggacatgatagaaaccctgaaaatggagcaccatttggaagcacacaagaacggccatgccaatgggcacctcaacattggcgtagacatccccacccccgacggcagcttcagcatcaagattaaacccaacgggatgccaaatgggtataggaaagagatgataaagatccccatgccagaactggagcgctctcagtaccccatggagtggggcaagacttttctggcctttctttatgcactttcctgtttcgttctcaccacagtgatgatctcggtcgtccacgaacgagtacctcctaaggaggtgcagcctccactaccggacacattttttgaccattttaaccgggtgcagtgggccttttctatttgtgaaattaatggcatgatccttgtaggactctggttaattcagtggctgctcttaaaatacaagtctattattagcagaagatttttctgcatagttggcacgctgtacctgtatcggtgtattacaatgtatgtaactacactcccagtacctggtatgcatttcaactgttctccgaagcttttcggagactgggaagcccaactgcgaagaataatgaagctcattgctggaggtggcttgtctatcactggctctcacaacatgtgtggggactatctgtacagcggccacacggtcatgctaacacttacctacttatttatcaaagagtattcccctcggcgactctggtggtatcactggatttgctggcttctcagcgtagttggaatcttctgtattctcttagcgcatgaccactacactgtggacgtggtggtggcatattacatcaccacgagactcttctggtggtatcacactatggccaatcagcaagtgctaaaggaagcttcccagatgaacctcctggccagggtgtggtggtacaggccatttcagtactttgaaaagaatgtccaaggaattgtacctcgatcttaccattggcctttcccctggccagtagtccacctcagtaggcaagttaaatacagccggctggtgaatgacacataacagctgtacaaagtggggaaaagacaaattgtccgaagtgctaagaactccatgagagaagatgccataaaataaacacctccctaatcctattatctttcaatggttaccttgacttaacctattgagttacctggtcagcactgtgatctttttttctctccaaaggacctgcgttggacaacaataaagaaaaatttaacctatcatgcactgtacacatttcctgttcataagtttgggatttacataacccgcaaccaccatgttcctttgtatatgatgcagcagcataaatgtaagcttttatatcataagttctggtctttccagtcacatctggaaataaagcgtattattttcttgggaaaacatacttttcatatctcttgccccaaagattgggctgtaagccattttctagcaaatgtctctatgaaggtttctaagtacctgaatggggtttgattctgaaatctttctacctgttgcaccgatattcaaataaaaatgatagacacagaaaggtttggtaactttgggttttgtaaaatcagcaaaggcagtgtttcaaaaagtgcaaaaaaaaagattctgttataaagtgattttctaagtatttcctaactttatttttcaaaatgatgttatgaacaccaaatttaaagatttttaacatgtcagagagaagagagttaaaatttaaaaatgcatcttgggagagaaatttgtctatgtttctagtgcctttcttgtcttgattgtatggtcagtaggcaatcttaaatgtttttatttaaaataaagtattccttgaaaatataaatatatgtatacactactaaattttgcatttatagctaaattgaatcagaagactgcttatggttttaaaattgcaatgacttaaataatgaggttgttaattagagtcagagcctgttcacatattgtgatcaggtagcaatgacatgtaccacttaaattattttatcgtcgatttggtagttcaattttaactactcaatgaaaacagccatgaatatcttttcttaaagagagttttgaaaatgatcacttacctaaaacttgaaagctatgaattagttatccatactctcatgacaattttgttggtgaacaacaaaaaagagatctatttctttaaaagatatttgtgcagaaactgcatgtaactctaagttttactcctaacatacatatgtttggggaagtattctattctatacttgccaatgtggagaacaaaatagttttttaagaatgaagaagtatatatatccattctgtattttacgtgcagcagaattatcttccgtaggatttttttgtgtattcacaaggtgatatttgtattgtaaaacaataatggtgaaggaaataaaaaggcttttaaaattttgtttgttttaaatctttgtaaagttattattccagagagtatactggtatcttacagcttacctagatcataaattaatcaaaatgcactttttaataaaaactgatacttaaaataaa

SEQ ID NO: 29824 - DNA, 2198 bp, Homo sapiens
  source 1..2198: mol_type = unassigned DNA
acctacatgtatatatcaaataagtctattattagcagaagatttttctgcatagttggcacgctgtacctgtatcggtgtattacaatgtatgtaactacactcccagtacctggtatgcatttcaactgttctccgaagcttttcggagactgggaagcccaactgcgaagaataatgaagctcattgctggaggtggcttgtctatcactggctctcacaacatgtgtggggactatctgtacagcggccacacggtcatgctaacacttacctacttatttatcaaagagtattcccctcggcgactctggtggtatcactggatttgctggcttctcagcgtagttggaatcttctgtattctcttagcgcatgaccactacactgtggacgtggtggtggcatattacatcaccacgagactcttctggtggtatcacactatggccaatcagcaagtgctaaaggaagcttcccagatgaacctcctggccagggtgtggtggtacaggccatttcagtactttgaaaagaatgtccaaggaattgtacctcgatcttaccattggcctttcccctggccagtagtccacctcagtaggcaagttaaatacagccggctggtgaatgacacataacagctgtacaaagtggggaaaagacaaattgtccgaagtgctaagaactccatgagagaagatgccataaaataaacacctccctaatcctattatctttcaatggttaccttgacttaacctattgagttacctggtcagcactgtgatctttttttctctccaaaggacctgcgttggacaacaataaagaaaaatttaacctatcatgcactgtacacatttcctgttcataagtttgggatttacataacccgcaaccaccatgttcctttgtatatgatgcagcagcataaatgtaagcttttatatcataagttctggtctttccagtcacatctggaaataaagcgtattattttcttgggaaaacatacttttcatatctcttgccccaaagattgggctgtaagccattttctagcaaatgtctctatgaaggtttctaagtacctgaatggggtttgattctgaaatctttctacctgttgcaccgatattcaaataaaaatgatagacacagaaaggtttggtaactttgggttttgtaaaatcagcaaaggcagtgtttcaaaaagtgcaaaaaaaaagattctgttataaagtgattttctaagtatttcctaactttatttttcaaaatgatgttatgaacaccaaatttaaagatttttaacatgtcagagagaagagagttaaaatttaaaaatgcatcttgggagagaaatttgtctatgtttctagtgcctttcttgtcttgattgtatggtcagtaggcaatcttaaatgtttttatttaaaataaagtattccttgaaaatataaatatatgtatacactactaaattttgcatttatagctaaattgaatcagaagactgcttatggttttaaaattgcaatgacttaaataatgaggttgttaattagagtcagagcctgttcacatattgtgatcaggtagcaatgacatgtaccacttaaattattttatcgtcgatttggtagttcaattttaactactcaatgaaaacagccatgaatatcttttcttaaagagagttttgaaaatgatcacttacctaaaacttgaaagctatgaattagttatccatactctcatgacaattttgttggtgaacaacaaaaaagagatctatttctttaaaagatatttgtgcagaaactgcatgtaactctaagttttactcctaacatacatatgtttggggaagtattctattctatacttgccaatgtggagaacaaaatagttttttaagaatgaagaagtatatatatccattctgtattttacgtgcagcagaattatcttccgtaggatttttttgtgtattcacaaggtgatatttgtattgtaaaacaataatggtgaaggaaataaaaaggcttttaaaattttgtttgttttaaatctttgtaaagttattattccagagagtatactggtatcttacagcttacctagatcataaattaatcaaaatgcactttttaataaaaactgatacttaaaataaatggctgttatttct

SEQ ID NO: 29825 - DNA, 735 bp, Homo sapiens
  source 1..735: mol_type = unassigned DNA
atgggagggcgtggcgggggaggacggtcccgccagctcccaggtcggttccgagcgcccgcggcccgatggccgggcggaagatggctgcccggagcgccgcggacagtcacgtggtctattattagcagaagatttttctgcatagttggcacgctgtacctgtatcggtgtattacaatgtatgtaactacactcccagtacctggtatgcatttcaactgttctccgaagcttttcggagactgggaagcccaactgcgaagaataatgaagctcattgctggaggtggcttgtctatcactggctctcacaacatgtgtggggactatctgtacagcggccacacggtcatgctaacacttacctacttatttatcaaagagtattcccctcggcgactctggtggtatcactggatttgctggcttctcagcgtagttggaatcttctgtattctcttagcgcatgaccactacactgtggacgtggtggtggcatattacatcaccacgagactcttctggtggtatcacactatggccaatcagcaagtgctaaaggaagcttcccagatgaacctcctggccagggtgtggtggtacaggccatttcagtactttgaaaagaatgtccaaggaattgtacctcgatcttaccattggcctttcccctggccagtagtccacctcagtaggcaagttaaatacagccggctggtgaatgacacataa

SEQ ID NO: 29826 - DNA, 1887 bp, Homo sapiens
  source 1..1887: mol_type = unassigned DNA
agctaccttataaagaccatctgtacatccactgtgaaatggagtttcaaaatcacaagcttctttcccacatgaacataagactaggagcacatatggaagagtaaagttgaagggaatttggatgatgatttggcaagatgctgtgggatagtaacatctttttgagggaagaattggcttcctttcttgaaagtggtgaaggtacagcatatagctgcatggaagaaacagtaatcggatggctaccttctacattttgtattaggaaacaaagtccattgtaagagtccatgttgatcttggaaatagaaggattgaaaaaagctaaatttccacaaagaacaagaacttgaccatctcctttttgatctgaagactaggggacaatggatatcatagagacagcaaaacttgaagaacatttggaaaatcaacccagtgatcctacgaacacttatgcaagacccgctgaacctgttgaagaagaaaacaaaaatggcaatggtaaacccaagagcttatccagtgggctgcgaaaaggcaccaaaaagtacccggactatatccaaattgctatgcccactgaatcaaggaacaaatttccactagagtggtggaaaacgggcattgccttcatatatgcagttttcaacctcgtcttgacaaccgtcatgatcacagttgtacatgagagggtccctcccaaggagcttagccctccactcccagacaagttttttgattacattgatagggtgaaatgggcattttctgtatcagaaataaatgggattatattagttggattatggatcacccagtggctgtttctgagatacaagtcaatagtgggacgcagattctgttttattattggaactttatacctgtatcgctgcattacaatgtatgttactactctacctgtgcctggaatgcatttccagtgtgctccaaagctcaatggagactctcaggcaaaagttcaacggattctacgattgatttctggtggtggattgtccataactggatcacatatcttatgtggagacttcctcttcagcggtcacacggttacgctgacactgacttatttgttcatcaaagaatattcgcctcgtcacttctggtggtatcatttaatctgctggctgctgagtgctgccgggatcatctgcattcttgtagcacacgaacactacactatcgatgtgatcattgcttattatatcacaacacgactgttttggtggtaccattcaatggccaatgaaaagaacttgaaggtctcttcacagactaatttcttatctcgagcatggtggttccccatcttttatttttttgagaaaaatgtacaaggctcaattccttgctgcttctcctggccgctgtcttggcctcctggctgcttcaaatcatcatgcaaaaagtattcacgggttcagaagattggtgaagacaatgagaaatcgacctgaggagcaaaacaaaggcatcagctcttacaccaaaagagttaacgctgtaaccaaaggtatagttttgttttttattttaggagaactgactggtaaatgaagaaatggaccaaattttgtgtaaacgattagaaagatgaacaaagtattgccctttgactggttttcttcttcatcctgagaaagatacattctcttgcagctcttcattcattggtgacaagcccccaccccgggactttactaatgagcttgttaaagaggtgccaaagaacatattcctcctttctttattctttctccaccaaaaccctctacttcagaattttttcaggatatttttcagcccaaggtcagaagaatgtgttaatattttaaataaaatatctggacatctaca

SEQ ID NO: 29827 - DNA, 6149 bp, Homo sapiens
  source 1..6149: mol_type = unassigned DNA
agattgatctctgttgccgctcagggaggtcagctccaggccctcagcctttcggccgggagccaaactgccctgcctgccaagcccctccttctctgcaccttaaacagccgcgaggggagagtcggctgggattttcttcttaagaagtcgcgcaggtttttcgagctccactctgcgccaggagagccacggcagcaggaacgggcactgctgccaccgggccgacggagctgcatcctgtggccctataacactcttctccaaaaggacctgccagagactgggagtgttgactgctgcaaggaccaaggtgggatagtaacatctttttgagggaagaattggcttcctttcttgaaagtggtgaaggtacagcatatagctgcatggaagaaacagtaatcggatggctaccttctacattttgtattaggaaacaaagtccattgtaagagtccatgttgatcttggaaatagaaggattgaaaaaagctaaatttccacaaagaacaagaacttgaccatctcctttttgatctgaagactaggggacaatggatatcatagagacagcaaaacttgaagaacatttggaaaatcaacccagtgatcctacgaacacttatgcaagacccgctgaacctgttgaagaagaaaacaaaaatggcaatggtaaacccaagagcttatccagtgggctgcgaaaaggcaccaaaaagtacccggactatatccaaattgctatgcccactgaatcaaggaacaaatttccactagagtggtggaaaacgggcattgccttcatatatgcagttttcaacctcgtcttgacaaccgtcatgatcacagttgtacatgagagggtccctcccaaggagcttagccctccactcccagacaagttttttgattacattgatagggtgaaatgggcattttctgtatcagaaataaatgggattatattagttggattatggatcacccagtggctgtttctgagatacaagtcaatagtgggacgcagattctgttttattattggaactttatacctgtatcgctgcattacaatgtatgttactactctacctgtgcctggaatgcatttccagtgtgctccaaagctcaatggagactctcaggcaaaagttcaacggattctacgattgatttctggtggtggattgtccataactggatcacatatcttatgtggagacttcctcttcagcggtcacacggttacgctgacactgacttatttgttcatcaaagaatattcgcctcgtcacttctggtggtatcatttaatctgctggctgctgagtgctgccgggatcatctgcattcttgtagcacacgaacactacactatcgatgtgatcattgcttattatatcacaacacgactgttttggtggtaccattcaatggccaatgaaaagaacttgaaggtctcttcacagactaatttcttatctcgagcatggtggttccccatcttttatttttttgagaaaaatgtacaaggctcaattccttgctgcttctcctggccgctgtcttggcctcctggctgcttcaaatcatcatgcaaaaagtattcacgggttcagaagattggtgaagacaatgagaaatcgacctgaggagcaaaacaaaggcatcagctcttacaccaaaagagttaacgctgtaaccaaaggtatagttttgttttttattttaggagaactgactggtaaatgaagaaatggaccaaattttgtgtaaacgattagaaagatgaacaaagtattgccctttgactggttttcttcttcatcctgagaaagatacattctcttgcagctcttcattcattggtgacaagcccccaccccgggactttactaatgagcttgttaaagaggtgccaaagaacatattcctcctttctttattctttctccaccaaaaccctctacttcagaattttttcaggatatttttcagcccaaggtcagaagaatgtgttaatattttaaataaaatatctggacatctacagccactgtgtaaatagaactgcctaatgttgagagtggtttttagcattaggtttagcaagggggagatccgtgggttgtgcgtcagctttgggtgaattttgtttctaccctgtcacggggaaagttcgggttgagtccaggagtgcacactgctgctgccacccaatgcgctacatatcacttttttttgttttgttttgttttgtttttaaaagatcattttatcttaaaaaggaaagctgatccaagtaaacacgaaagtatttgacacaccccacagattttacatgtgtgtaaatgtttcactttaaaatctctatgacagatacacaggaaacatgagatggtttctgctaatgagtggcccttgagtacacacttagatgctgtctgccctgtaaatttggatctggtgccccagggcagtcaactcttctagcacaggctgaaaacacgtgtgtgtcaactgaggttcacaccacttggggaatgagcctgttttctttccaggtcaggccctggtgtgagatcaattttagggctcctaattggagcacagaaatgtatttggtcaaatttcattgaaggtgatttcttcctttttctgttgtactttatggaaaaaccaagatggaacctgaaagttaatgtatccttgcttttagcaagagactcagtttcttataactagtcctaaggacatatgccgcaattgagtaattttacttttaccctatgaaaataacatggtgctgcactataatatactctcggaatcagtgtgttagttacagctatacagtgaagggggataactgtttctaaatttctttaaggtgatgccaaaaaatggattaaaaaatctgatcagatttaatgttaccagatttagtgcattatttaatgctattggatcttttggataattcttggcttaatttcttagctacttgaaggttaatttgcaagacttttaaaaccttagaaaagttttaaggttgcaaagttatcaacactggggcagagggtggagaggccaatgcgggtagaaggaggcagttatgtttatattgaaggtgaaatttttctttcatttagaatggaaaacatccccaaatgtatcattataaactagtcagccttgactacacaaaattgacctttaagttgcttgagaaaaacacaatgcaaatcgttcagaagggtcaacatcctttggtgctaaaatcttgtgtatgttttcagaatggctttttctgtatgttatagaataatcactaaaggaaaggtagttgaatttaaagtcatgaagcaagactctttaattcagttattttaaacaagaattaaaaccccaaacatccttggcaggctttgaagcacacagaattttctagtatttcttattaaatacaccaataataaacatatacttagtttacctgatgagtttagacataattctatataatgttcgcttatattcatttattaactagcaacacttgtgcaagaacaaggtattctgcttgaaaacactgatttttaagttcctgttgcccgattgtaaagaaaatcatctgacacagaagcctggattttgctctcctaacactggtgttttccttgagcctctaattcaaataaaacaaactgatacaccttacagccttattcatctgtgtctggataactcacttttcatctattgaataagaaaaagtgtttaaacttaataaaataaaaaattgtgcaccaattactacagatccttgaaacagtaagccttggattttagtcaagtaatccagtttttttttaatttaaaaaaaaccatcaccttttaaagaactttaaaaacacctgtgatgccaatgtggacattgccgctgccatgtctttacacgcatgtgtcgtatagctctgtcatcgagttgaggaagtccatggtttgcaaataagggtgggggaatcaaaatttcaagatggaaaaataaaacaaatagtaaaacccatttacatgtaggaaagaaaagttgagcttcaacccaatgtgccactttgatataaaacaagtatgatatatatataaactgaagatataaaacaagtatgatcttgcctttgaaatcataaatgtttggggtacctgttctttgccagttaagatacatatcttattatctttgtttttttcaagtctatgctcctgtttgaagcttttcctgtaatttaggttgtctgtgaaatacctataacatataattcctatagagtatgccacattttttttctaactcatttcaaatgaaattctctcagattctagtttttgagcttgtccactagatctgaaaataaagcatcctttcctgagtccacttgaactaattgtgaatttgttacttaatttactggcatcttgggaaacaagttttgctgtggcaggaaggctgttttgagagtgagcgttgagtctactctggtttgtggatgacattgcattagggttatttcctgtattaccagtgcccccttgtggcaatatactttatgacttggaatgcaaacaccacttttaaaagcctgttttcaagtttttgaaaggcatttgttttctgttgtttgccaataatctgaaagtatcatgtgaaaggaattattttaaaagcattttaaacctttcccaaaggtaaaatgtgctcagattataggcacttgtaattctaaccttgtatccatttgatcaaagaaaatttgtagaacatttttacctctcatgatcacaatcattagtgtctccctttataacgacctatgttttgtttactttgaaacaccaaatttgttgtcttggttttttttacatgacagaactcatgcagtttcttttttagttgaaagttcacatcttgccccttgaatagtttgaacatttctttcttaattcttttttgtttttgttttgcactgtaaaactgatgaaaactttaagccaatcttaatgcactagcctctgtagtgtaaggaagtgtgagaaggagtttcttaatgagtttacacgtttaaatcaagcatattataagttatatgccatgtgttgaaggcttttctatttatatatataaagatttttagtatttgtttttagtgtccttgtgttgcaataatttaactcctttgactcagttgctgaaaatatttcttctattaagaagtgctcttgacttcaacacccaaacactgaaaatcatgtcaatgttacccaaagataagtttttatacagatacacaccttataagttctgatttattttcttactcattatgctgtgttctaaataaatcatgaatgagaagagtgctttattgtgaaattatttaaaactgtcctttaaaagaaaaagaggaaacgatgaacaaaaactaatctaattgccaagttagaattcattatttaatttacctcctatgcaatgattaatgctgcaaaatgtatggttatgttaccgtatattcacaaaagaaatattattacaaggtttcagaggtagccaattgcattcttttggaaatttactgtactgtttcaatgtgttaagtgccttgttgtaaagtaaaattttaagtctagattcattattttcctgacatatatttttcattatgatatctactgtatgctattgtgatagttttatgaaatgcttacattttaatcaaatatgtaaatttcagaagctcttttttcctacccaccagtaccttaatcattggtttatcacattggattcaaattcaggttccttttttgataaagaggaaatttgttttccatgcttgtgattttgtgtttgtaaacatttcaggaggaatttaggagtgtaactatagtttatacttctataatgttgtcttacatttacatttttaagtgcctaattgttaaaactgatttatgtttctcttctaaagaggatatgtgtacttggtttctaatctctttggttttgctttttaaaaaatgcaagagcctatactttgtatttacctaataaaccacagtgacatcaacagtcttttcaaaattaa

SEQ ID NO: 29828 - DNA, 2127 bp, Homo sapiens
  source 1..2127: mol_type = unassigned DNA
aaatggagtttcaaaatcacaagcttctttcccacatgaacataagactaggagcacatatggaagagtaaagttgaagggaatttggatgatgatttggcaagatgctgtaagtggattaggcaaggctgctaaagagagacaggaaatggctgtgttagtgcttcggacctccgttagaagtagcagttcatggtgttgaaggtttgttgttgaaaataccttcctgaggcacctcttcattgtgcttattcttcccacaacattgtgccaagacactgtcaagcctgggcctgtcaaagcctgggatgtcaaaggcctgggtctttctcatcctgctgtaatgtattgatagctgggggctctgcagaaggacaagggaaaggtgggatagtaacatctttttgagggaagaattggcttcctttcttgaaagtggtgaaggtacagcatatagctgcatggaagaaacagtaatcggatggctaccttctacattttgtattaggaaacaaagtccattgtaagagtccatgttgatcttggaaatagaaggattgaaaaaagctaaatttccacaaagaacaagaacttgaccatctcctttttgatctgaagactaggggacaatggatatcatagagacagcaaaacttgaagaacatttggaaaatcaacccagtgatcctacgaacacttatgcaagacccgctgaacctgttgaagaagaaaacaaaaatggcaatggtaaacccaagagcttatccagtgggctgcgaaaaggcaccaaaaagtacccggactatatccaaattgctatgcccactgaatcaaggaacaaatttccactagagtggtggaaaacgggcattgccttcatatatgcagttttcaacctcgtcttgacaaccgtcatgatcacagttgtacatgagagggtccctcccaaggagcttagccctccactcccagacaagttttttgattacattgatagggtgaaatgggcattttctgtatcagaaataaatgggattatattagttggattatggatcacccagtggctgtttctgagatacaagtcaatagtgggacgcagattctgttttattattggaactttatacctgtatcgctgcattacaatgtatgttactactctacctgtgcctggaatgcatttccagtgtgctccaaagctcaatggagactctcaggcaaaagttcaacggattctacgattgatttctggtggtggattgtccataactggatcacatatcttatgtggagacttcctcttcagcggtcacacggttacgctgacactgacttatttgttcatcaaagaatattcgcctcgtcacttctggtggtatcatttaatctgctggctgctgagtgctgccgggatcatctgcattcttgtagcacacgaacactacactatcgatgtgatcattgcttattatatcacaacacgactgttttggtggtaccattcaatggccaatgaaaagaacttgaaggtctcttcacagactaatttcttatctcgagcatggtggttccccatcttttatttttttgagaaaaatgtacaaggctcaattccttgctgcttctcctggccgctgtcttggcctcctggctgcttcaaatcatcatgcaaaaagtattcacgggttcagaagattggtgaagacaatgagaaatcgacctgaggagcaaaacaaaggcatcagctcttacaccaaaagagttaacgctgtaaccaaaggtatagttttgttttttattttaggagaactgactggtaaatgaagaaatggaccaaattttgtgtaaacgattagaaagatgaacaaagtattgccctttgactggttttcttcttcatcctgagaaagatacattctcttgcagctcttcattcattggtgacaagcccccaccccgggactttactaatgagcttgttaaagaggtgccaaagaacatattcctcctttctttattctttctccaccaaaaccctctacttcagaattttttcaggatatttttcagcccaaggtcagaagaatgtgttaatattttaaataaaatatctggacatctaca

SEQ ID NO: 29829 - DNA, 581 bp, Homo sapiens
  source 1..581: mol_type = unassigned DNA
gagcagtgtatccagggagaggactaattacgaggtttgaaaacctcatcaggtggctggtttctgtagcaggactaaaagactgctctcctaaattgagaacagctggggctgtgtgctagcaagtataaaagaggtggcagtggtgccccgtgtccgaaagaagtgtgtgctctctggagcctgtggagctgaagccaaaggtgggatagtaacatctttttgagggaagaattggcttcctttcttgaaagtggtgaaggtacagcatatagctgcatggaagaaacagtaatcggatggctaccttctacattttgtattaggaaacaaagtccattgtaagagtccatgttgatcttggaaatagaaggattgaaaaaagctaaatttccacaaagaacaagaacttgaccatctcctttttgatctgaagactaggggacaatggatatcatagagacagcaaaacttgaagaacatttggaaaatcaacccagtgatcctacgaacacttatgcaagacccgctgaacctgttgaagaagaaaacaaaaatggcaatggtaaacccaagagctt

SEQ ID NO: 29830 - DNA, 570 bp, Homo sapiens
  source 1..570: mol_type = unassigned DNA
atctgtacatccactgtgaaatggagtttcaaaatcacaagcttctttcccacatgaacataagactaggagcacatatggaagagtaaagttgaagggaatttggatgatgatttggcaagatgctgtaagtggattaggcaaggctgctaaagagagacaggaaatggctgtgttagtgcttcggacctccgttagaagtagcagttcatggtgttgaaggtgggatagtaacatctttttgagggaagaattggcttcctttcttgaaagtggtgaaggtacagcatatagctgcatggaagaaacagtaatcggatggctaccttctacattttgtattaggaaacaaagtccattgtaagagtccatgttgatcttggaaatagaaggattgaaaaaagctaaatttccacaaagaacaagaacttgaccatctcctttttgatctgaagactaggggacaatggatatcatagagacagcaaaacttgaagaacatttggaaaatcaacccagtgatcctacgaacacttatgcaagacccgctgaacctgttgaagaagaaaa

SEQ ID NO: 29831 - DNA, 3312 bp, Homo sapiens
  source 1..3312: mol_type = unassigned DNA
agcgctgtgccggttccgctgccgctggccaggagcgcggggacagttcggggctgcgccggaggccggcccgccttcccgggggttccgttatcatgtcgctgaggcagcgcctggcccagctggttggccgtctgcaggacccgcagaaagtggcccgtttccagcggctgtgcggggtggaagcgccgccgcgccgctcagcagaccggagggaggatgagaaagcggaggcgcctctcgccggagaccctcgactgcgagggcggcagccaggggcgcctggaggcccccagcctcccgggagcgaccgcaatcagtgcccggccaagccggacggcggcggcgcccccaacggcgtgcggaacgggctggcggccgagctgggcccggcctcgccgcggcgcgcgggcgctctgcgccgcaactcgctgacgggcgaggagggccagctggcccgcgtgagcaactggccgctctactgcctgttctgcttcggcacggagctgggcaacgaactcttctacatcctgttcttccccttctggatctggaacctggaccctctggtgggccggaggctcgtggtcatctgggtgctggtcatgtacctgggccagtgcaccaaggacatcatccgctggccgaggcccgcctcgccgcccgtggtcaagttggaggtcttctacaactctgagtacagcatgccctccacccatgccatgtccggcaccgccatccccatttctatggtcctcctcacctatggccgctggcagtaccctcttatatatggactgattcttattccctgctggtgttctctagtttgcctaagtagaatttacatgggaatgcactctattctggatattattgctggattcctatataccattttaatcttagctgtcttctatccatttgtggacctgattgacaacttcaaccaaactcacaaatatgctccattcatcatcatcgggcttcatttagctttggggatcttttctttcactcttgacacctggagcacatcccgaggagacacagccgagatactaggaagtggtgctggaattgcatgtggatctcatgttacttataacatgggtctagtattagatccttctctagatacattacctttagctgggccccccattactgtgactctgtttggaaaagccatattgcggatcctcatagggatggtatttgtactaataatcagagatgtaatgaaaaagatcaccattcctttagcctgcaaaatcttcaatataccgtgtgatgatattcgaaaagcaagacagcacatggaagttgaacttccttatcggtatattacctatggaatggttggtttctccatcacattttttgttccttacatatttttctttattggtatctcttgatggagaagtattgtttatgataagaaaggagggtatcagttactgatacccaaaaatatattccaggtaaagccaggtcagaattaggcttttgcaggaatttaacttaaataattatttaagtaaattcataagagtcagtgcattttatcattgcacatccagatactgttttaggtgagctgagctatttcgttactgagaaaatgataagtatccatttagaatgttcatgtaatgtttggagagttttgtattatggattcaacttatatataatatatataaggtacataatatgcaattatatatctgatatatattatatataaaataatatacctaagtgtttttttaaactatgggagtgtattataaaatcaataataatatgcaaacagttgtgcctgtgtatttgaactacatacaggtatgttgttattaacagatatatttaacatttatttactatgggagccatttcctaattgaattgcgtaattactagaccagaatgcatatgctactatacattgatttactgcctgtttttacactgccattacctttcatgttatccatgatgttgaacatgggaggcatttttaatggaccaaatttttagaaaaattagtttttggatttttttttaagttctgtatactgttttgaatgaactttatttgcagctattctggatgtcagtttaataattcaggtactgaattttattgcttgctaattgtgcctttccgttgctaaattaagaaatgctatgtgtactgtgatgtaaaaataagacattaactttatcttaagttacatataatcaagcaaatattttaaaaaatgtatgtcagggtgacaggcataaaagtaaattacccttaactctttagcctttatttagaaagaaatgtggaatgggctaaactttctcaccaatttattagaaagctaaatggataaatacttccctttttgtagatatttttctgtgcattgtaagttataggagcaggacatattttttgtacattgtcttgattgtttatactgcaggtaggtatttccagtgaatggaaacgttgaaatttatagatgggacaatgcacatacttcatatgtaaacaaagcatttttctaaataatttggaaaggattggatttagcaccgttaacttttaatacccatttattggctatttaaggtaaattataaaacctaaaattagtatcagtattttagatcctattattttttcaactttctattattttcacagtggaaaatttgcgtatagtattaaactattcttttttctgtctacctttatattttgaagtgtggttgtacttacgttaatagtaagtgtatttgtagaaagtttttcataaagaagagattaactttccatataaataaataccaggtatgaaattactgattttagtgcaatatctgtatgattatccagaactatcacttcagatgtttctattttgggcaccataactatttgagctcatatttttataattctgattgagaatttaggggcatggtaatttttaccaaaactgaagctggtaattttaagtaaagcaactaaatttaccctttacttattagttaaaaggaaaccaaggcatgtaggaaaatattggtacgttggaaaatgtgaaaagagctttactttcaaaatgtatgtttaatgaattgaattttagggaccgtttcccataatttgggcctatgctatcctgttgatttttatgtctagcttaaaaggtatttgaaaatgttccatttgtgttttattattttctgtcctatgacagttctatgctaaatgtattttaaaataaaagccaaattgaagattaaaga

SEQ ID NO: 29832 - DNA, 3336 bp, Homo sapiens
  source 1..3336: mol_type = unassigned DNA
ggcgggggcgaggcgggagtggcggtgccagcggagggcaccggcccggcgtggcagcggcggcggagcgcggccccgggcacaccatggccgagctgctgcggagcctgcaggattcccagctcgtcgcccgcttccagcgccgctgcgggctcttccccgctccggatgaaggcccccgggagaacggcgcggaccccacggagcgcgcggcgcgggtccccggggtcgagcatctccccgcagccaacggcaagggcggcgaggctccggccaacgggctgcgcagagccgcggcgccggaggcttatgtacagaagtacgtcgtgaagaattatttctactattacctattccaattttcagctgctttgggccaagaagtgttctacatcacgtttcttccattcactcactggaatattgacccttatttatccagaagattgatcatcatatgggttttggtgatgtatattggccaagtggccaaggatgtcttgaagtggccccgtccctcctcccctccagttgtaaaactggaaaagagactgatcgctgaatatggaatgccatccacccacgccatggcggccactgccattgccttcaccctccttatctctactatggacagataccagtatccatttgtgttgggactggtgatggccgtggtgttttccaccttggtgtgtctcagcaggctctacactgggatgcatacggtcctggatgtgctgggtggcgtcctgatcaccgcactcctcatcgtcctcacctaccctgcctggaccttcatcgactgcctggactcggccagccccctcttccccgtgtgtgtcatagttgtgccattcttcctgtgttacaattaccctgtttctgattactacagcccaacccgggcggacaccaccaccattctggctgccggggctggagtgaccataggattctggatcaaccatttcttccagcttgtatccaagcccgctgaatctctccctgttattcagaacatcccaccactcaccacctacatgttagttttgggtctgaccaaatttgcagtgggaattgtgttgatcctcttggttcgtcagcttgtacaaaatctctcactgcaagtattatactcatggttcaaggtggtcaccaggaacaaggaggccaggcggagactggagattgaagtgccttacaagtttgttacctacacatctgttggcatctgcgctacaacctttgtgccgatgcttcacaggtttctgggattaccctgagtctcaaacagttggaaactagcccactggacatgaaagccaagacataggaaagttattggtaggcaaatcttgacaacttatttttctttaacaacaacaaaaagtcatacggctgtcttgctactaccagataaatgatgctgctgtgtgaaaggaagaactgtctcatagcggtcattggtcgtccgtggtggttggttgtgctacagttgaacccaggctaaagaccataatccggatctttaaaggcacacaccgcgccccccccccccccgcccggcccctgctcctctcgctgttgcacgggctttggatctagtcatgggctggcaggaattgtggcctggcttaggaatagctatgagccccactgggttctggagagccagtagagatggggtgatctgggaggctggaggtagagcctttcttttccgttacaaccttgcctagcatggagttatttctaaaatgggaactttggtctaggagaaggggtggcaccatatgaaacggcattccttggacagggtgacttccttatcgtttatttggtgattttttgttttgttttgtttgagacaggatcttgctctgtttcccaggctgtattacagtggcacaatctcagctcactgcaaactctgcctcccgggctcaagcaatcctcctgcctgagccaactgagtagctgggactgtaagcatagaccaccatgtgcccagctaatttttgtagagacagggtttctccatgttgcccaggtacgtctgaaactcctgggcttaagtgatccacccacctcagcctcccaaagtgctgggattataggcatgagccactgtgcccggcctcctccttgttatgatcaaattagactgtgcctggttgggtggtaagatcactctgaaagaaagctcactgtgaagagatgaaaggtggaggcagagctgtgaggtcatggggaaaagcctgctttccttataagtcctgctgttcatgttggaataaggatctgctcttccttgtttccatgcattttgcaggattccaggtaccattaccacactcttctgacccatgaaaccaactggctgctcacacatcaccaaacaggttgggggttagccttcagcacaggtggatacatctgggattcactgagattcctgccctctcctgcttcctagtggtttgggacaggccctctgcccatcgtcagcagttttttgctttcatacaaacctggaaggcactggcatctgcctaggaaagtggatctgtgaagaacagatgaactcaatcctttctggagtctgacaaagaagggataggcttccttgacattgcctgtcctgacaaggcctccctgacattactcctccaatttcacagttaccttctgtaaatctattttctcatctactgaatagaatcaggcgccctttttgtcttcccacctcttatctcttggcaattttaaggggaattaatgcaagaacaactttagtgtctcttgggaaaacaagccaaccaaatacaaaacccattaagcctactagggtgagtcctcttaacatgggaaggcgatgattatgcaaacaccggagttccctcctcttcagttcctaagaataaagaacaggtatcaagaactttctttaaagttagtgtaactatagttaacaaagtatccattgaagtttagtgcctgtaggactgagccagtgctttatcaacccaacacatcatcaccatgtgcatactctagaaaaaaaaatagcttccttaaaagttacagaggctcttaacgtgttaaaaccgaaaaatcacatttttcttgatttcaaatatgttctacggccttactgttgggatgatatttagtatgtaacttagcattccaatttctcaagaatttttaggccgggtgcggtggctcatgcctgtaatcccagcactttgggaggccgaggtgggcggaccacgaggtcaggagatcgagaccatcctggctaacacggtaccccgtctctactgaaaatac

SEQ ID NO: 29833 - DNA, 3584 bp, Homo sapiens
  source 1..3584: mol_type = unassigned DNA
cggccgccctggggacgcagacgccaaggcccctccggccagggccgggagccgggccggcctagccagttctgaaagccccatggccccagcaggcctctgagccccaccatgggcagcttgtactcggagtacctgaaccccaacaaggtccaggaacactataattataccaaggagacgctggaaacgcaggagacgacctcccgccaggtggcctcggccttcatcgtcatcctctgttgcgccattgtggtggaaaaccttctggtgctcattgcggtggcccgaaacagcaagttccactcggcaatgtacctgtttctgggcaacctggccgcctccgatctactggcaggcgtggccttcgtagccaataccttgctctctggctctgtcacgctgaggctgacgcctgtgcagtggtttgcccgggagggctctgccttcatcacgctctcggcctctgtcttcagcctcctggccatcgccattgagcgccacgtggccattgccaaggtcaagctgtatggcagcgacaagagctgccgcatgcttctgctcatcggggcctcgtggctcatctcgctggtcctcggtggcctgcccatccttggctggaactgcctgggccacctcgaggcctgctccactgtcctgcctctctacgccaagcattatgtgctgtgcgtggtgaccatcttctccatcatcctgttggccatcgtggccctgtacgtgcgcatctactgcgtggtccgctcaagccacgctgacatggccgccccgcagacgctagccctgctcaagacggtcaccatcgtgctaggcgtctttatcgtctgctggctgcccgccttcagcatcctccttctggactatgcctgtcccgtccactcctgcccgatcctctacaaagcccactactttttcgccgtctccaccctgaattccctgctcaaccccgtcatctacacgtggcgcagccgggacctgcggcgggaggtgcttcggccgctgcagtgctggaggccgggggtgggggtgcaaggacggaggcggggcgggaccccgggccaccacctcctgccactccgcagctccagctccctggagaggggcatgcacatgcccacgtcacccacgtttctggagggcaacacggtggtctgagggtgggggtggaccaacaaccaggccagggcagaggggttcatggagaggccactgggtgaccccagatagagacttggggctactgagccagatgcccccgccccacagacctgggtgatgttgcaaatatttcacacctggaaaggccagataaggcactgactagtcacatagcagtgttgcagtgcggtcctgagggccagtccagtggctagtgtgacccctttagaactggatcctggggaggccagggcaggggacctgtgaagagccagggtgagggcaggcagcatttaaggggagctcagggcaggagcactttaccacctggtacaaaggatttttttttttttttgagacggaatcttgcactgctgcccaggctggagtgcagtggcgtgatctcggctcaccgcaagctccgcctcctgggttcatgtcgttctcctgcctcagcctcccaagtagctgggactataggcgcctgccaccacacctggctaattttttgtacctttagtagagatggggtttcaccgtgttagccaggatggtcttgatctcctgacctcgtgatccgcccgcctcggcctcccaaagtgctgggattacaggcgtgagccaccgtgcccggctttttttttttttttttttttttttttttttttttttgagatgaagtctcgctctgttgcccaggctggagagtgcagtggtacggtctcagctcactgcaacctccacctcccaggttcaagcgattctccagcctgagcctcctgagtagctgggattacaggtgcctaccaccacgcccaggtaattttttttttttttgtatttttagtagagacggggtttcaccatgttggccaggctggtctcgaactcctgacctcatgatccgcccgtgttggcctcccaaagtgtgggattacaggcgtaagccacctcacctggcggtacaaagaatttctgcattttcttccctggcccctagtcctgcaccgatttctccttttcgaatgtattcctcctgccaccttctctgggcaacttcgtgcgactacagaaccactgtcctgaggagctagaggcctcctctctgaccatccagagcccaaatccacagcttccccaaatttcatcagctgccacttgacgacttctccccgtctctctgaggcccggaaaccacggctggaggtggggaggggatggcggctgaggtccattcctcattctcagacctcattgctcagttgcactatttggggcacagaataatcaccaaaagtgagaaaaacgagtttgggtggctggggaggactttgggactcttgatgcaaggcgcaacttgagaaaattctgggtgtgatatttgcacagacaccctcctttcaaaaacagccaccccccaagctattctcagctccacacctgcagccccagctaaggtaccaggtctcctgagcaaggcagagagaagccttgagccttctctgtgtcttctttcaagaaccccgctgtgtcttctttcaagattttttttttgagacagtttcaagatttttgttttgtttttgagatggagtctcactgtgtcacccaggctgaggtggcagtggttcaatctccgttcactgccacctccacctcccgggttcaagcgattctcctgcttcagcctctcgagtagctgggactacaggcacctgccaccatgtctggctaatttttgtatttttagtagagacagggtttcactacgttggccaggctggtctcaaactcctgacctcaagtgatccgcccgcctcggcctccccaattgctgggattacaggcgtgagccactgtgcccggccttcttctttcaagttatatagaatggagcatgggggtggcagtggctagggacatttcctggggacactctcccctaaccccccagaaggacttcacaaaaacctgtggataatggaagggatgttacggtacaaacgtatatttatgtgtgtgtgtgtgtatgtgtgtgcgcgcgcgcgtgtgcacataggcgtgatgtctgtgaccctcctctcctcgtcacatttcccccagaatgaatgctgtcctgtctgctcatgtttgtgttgaagctgccaaagtcggggagctctggtcctgcccagacccctttggaattgctggcccatcctcccactggagagctggggtgcagctcaccttggggaaggaaacctcatgcctcagagtaatttcttgtgaatgcaaagcctgggggagcgggtctttggggggcaaggagccagtcaggggcttgtttcccctcatagagctccccagacgtgcctccgcaatgcctgaaacccagacctaggctaataaacggttcaatttctgtt

SEQ ID NO: 29834 - DNA, 4206 bp, Homo sapiens
  source 1..4206: mol_type = unassigned DNA
tagtctctgactcgctcgggcagaggccgaggaagccggttccggggacgggcaacagggactcagggaccagaaggcggctgcaggacgcgaccgagcaggaccccaggcccgggaacgacgtcgcgagcgctgagactgccgggcctcccagcccatctggcattcgagcgcaggaccgggcgccccggcaccgccgcgcgccacccgctaggatgccggtggccccagcgccctcagccgacggaggagccctttttcaacgccctcgctggagtctggcctgcacgccttgctgaatgaagccggaacctcagccccgcttccctttgaaatgaatgttcctggggcgccctctcgtggattttggagctaatcgtctgtgaatgccaagtgatggcaactgccctcccgccgcgtctccagccggtgcgggggaacgagaccctgcgggagcattaccagtacgtggggaagttggcgggcaggctgaaggaggcctccgagggcagcacgctcaccaccgtgctcttcttggtcatctgcagcttcatcgtcttggagaacctgatggttttgattgccatctggaaaaacaataaatttcacaaccgcatgtactttttcattggcaacctggctctctgcgacctgctggccggcatcgcttacaaggtcaacattctgatgtctggcaagaagacgttcagcctgtctcccacggtctggttcctcagggagggcagtatgttcgtggcccttggggcgtccacctgcagcttactggccatcgccatcgagcggcacttgacaatgatcaaaatgaggccttacgacgccaacaagaggcaccgcgtcttcctcctgatcgggatgtgctggctcattgccttcacgctgggcgccctgcccattctgggctggaactgcctgcacaatctccctgactgctctaccatcctgcccctctactccaagaagtacattgccttctgcatcagcatcttcacggccatcctggtgaccatcgtgatcctctacgcacgcatctacttcctggtgaagtccagcagccgtaaggtggccaaccacaacaactcggagcggtccatggcactgctgcggaccgtggtgattgtggtgagcgtgttcatcgcctgctggtccccactcttcatcctcttcctcattgatgtggcctgcagggtgcaggcgtgccccatcctcttcaaggctcagtggttcatcgtgttggctgtgctcaactccgccatgaacccggtcatctacacgctggccagcaaggagatgcggcgggccttcttccgtctggtctgcaactgcctggtcaggggacggggggcccgcgcctcacccatccagcctgcgctcgacccaagcagaagtaaatcaagcagcagcaacaatagcagccactctccgaaggtcaaggaagacctgccccacacagccccctcatcctgcatcatggacaagaacgcagcacttcagaatgggatcttctgcaactgatcgtctccatgcgccctgctctgcggctgtgttcttatttattgcatgcgtcgcttccacaggggcccctcaagagctgtgactcgggagagctaccttactttgaccaacagcctgcccagtgtggatgtctcttacagagggggcccaaggaatcaccaccccgcttcagtgtaaacaacgtgccttgtccactttgggctccagagtctttcagatgtactaagctgctgacatcatccactgccttctgctgcatcctagacaccctccctgttgttcacagagagggaaggtcgtgggccacacaatgctgtgtgaccctctccgtgtgcctctgaatggtgttttgatgattttacactacatttcctgtgcgtagaatggatgcttgtatattcgtacatctctatgttacacagaatttgtgttgcaggtgtttgccatgtggtacctacatagaatctccatacaacacacaggtaacaggttatacaagtggattcagactgaacccccagtacaaggacattgttttgaactaggtggacatgccatccctggtctccttagactgacatgattctcatgttaaccaagttttaaaagttcaaattccccaaaaaggcttgtccaaggctggccccagatgtgtgggtctgacccacaccagccctgtgtcctgtcctttcagtcatttgtccctgcgtaattttaatcgtattccaaagcccaattatgtgatggttttcaggtttctgcaaattacagaagagccagccaagatcacccaggagcttgtgcccccagatgggccaaagaaagagcctatgaaggagaagcagaagcagacggctggcctggctcaccttcccacgccagtggggcaggggtctgcttcaggaaatggaagctgtccaggaaatgagcagagattcacaagacagcactttgattctatgttgagtttgtttctatattagaaaagcagcaagtcagtaatcccccgtggcatcacagctaagtagctgtggccaccggcagtttcacagcatcctgaaagctggcactgatcgtgactatcagtgaaagaagtttaattttcaggttagaaaatgtgatctggcagtttatgcattcttcagagtaatgtaataatacctatgtgatgctgtaattttacttttcaacataagttgaacccgtagcagtctgtttaccttgtaaagggattacttagaagacatttttgtacatgctcttccccaaggattgtacgtattatacaaatagatggaaagaaaagtgaacacgtttgtagaactttcataagcacacagttgctgtgttgagttctctttaaaaacaaggacaaaaccaaccagcgttcaaaggaacctcccatcagagtcccctaaagtattttaggttcagtgagcatttgcctgaataaaacctaaaagagtagtcttaacacattactaactttttctaagagaaattgattcctgttttgtcatctgatgcaatttgctcttataaagagacattttcataggttcagagtaactcacctccatgggctgaccaaaggcttttctaatttttgttactgatgagatgaaacctatttgtaaggagatcttccccaggagcatttctgttgccttcttgacatcaatgaaaagtagcatattctcttatgaaatagcatgagaaaacacagggcatttctaggacagtaaaacgttaaagtactggattaagaaaacaacaacaggctgggcgcagtggctcacacctgtaatcccagcactttgggaggctgaggcgggtggatcacctgaggtcaggagtttgtgaccagcctggccaacatagtgaaatcctgtttctactaaaaatacaaaaattagctggatgcgatagcacgtgcctgtagtcccagctactcgggaggctgaggctggagagttgctcaaacccgggaggcggagattgcagtgagccaagatcgcaccgctgcactccagcctgggtgacagagcgaccctctgtctcaaaaaataataataataataaataaaacaacaacaaaatgcatcagagagccaaaacattcagtattgcattttcacataggtgatgaaatgactttggaactttatctgtgttatagttatgagttgctttgggagacttggagctctctgtagctattgttcataacactttgctccataaccctgatgtccgcagtatctaagtatctcagccttcatccattaactctactagggagcccacagccaccatttccactaggaggtatcaatatttgtggtatgacataaggctcccttgaaataacaagacttttgagcaatctgaattaaaaatacatcaaaaaagtaatagcgctcatttgctaaatgcaaaaaataatcacctttgataccaatgtgcaccaatatgcctaactagctagccagctggagataatttaccagggaatgtttcaaagccctaaccttgaagtttggaaacaggtggtcttctatgctgcagagaaactatgcattaggtctcttttcaattagaaacctttactatttccaatgtatgtttgttaaaaataataataataaaaccaaaagcctttgtggaaaccca

SEQ ID NO: 29835 - DNA, 8505 bp, Homo sapiens
  source 1..8505: mol_type = unassigned DNA
catggggagaggaaagcaatggacacaattgtatcctgtagggtttcattcacgtgaaggtcagaagcaggctaaactcacctaggggagagtcctatcccaggtagtggtcatgcttggggacaggtggtgactaggaggggcacaaggaaggctgcagggtccggcccatcttgttgctggcctgggtgctggtctcactgatctctgtgtggtggggcaggtcagcctcccaggcctgctggtgcctgcagtgcccagcactcctgccgtgcctggcagtgttagtaccaatccgccagagtgactgactcccctcttgccctgagtagggcttgctgactccaggagcctcagggcggggtgggctttgagctttcttctagcaaacttgaggtctgtggctggtacccctcaggagcggaggggaactcttgtccatgagatgcttttaaccgtgcgcaataatgtgtagacgcatccaaaatcaatctggcctttagcccagcacttaactcttgggatgaggcctgctttgtaaatgttgataatccagagaaaatgagcttttagattccaaagacagccagatatcttccacttatgcaaaatgcagagaatcatatttaacaaaagatgttctggacaaatatgcttcttgagggatgaatatttaattataagggaaatgataaatcaaacattaatgggaaaatatgtttgccctcaagattcatgattttgatgggtctctggcaaatcttatactatgtttattggggttattttattgctggttattagtttttaattgtttgcttgttttctgctctgatcaatttttgtataagccgtgggtctattcaccctcttctctccattcccgggagcaagtccacatctggctgttggatgcatggcaaaagcaaaggtgtggagaaggttcagaggagacaggacatgtataaaatggtagggtcaggttgtcatgggggaaactgaggcacaggaggcaagctgagttagtacaagaacagtctgaatcataacgacatgccagtattacctaaaaggatgaggaacatggagctgtacttgaatccctacgtgagctggggaaaaggggcctcaggaatcactgacattggaaccaaggtttgtctgcagcttgtcggtttctgggacagaaacccaacatactggagtgggtatcccagcaatctgtaggataaaccaggacactgtggtgtcatggatagctggctgtctgccaggtgatggcccctctggttgcaatgtgagccgggcaggtcatccatttggcagcatggtgagggctctggccccagttgctatgggagggaggatgctggcacagggcactgttcacagactgcctttgctccatgccttttccatgagcatgagtggctgttcgtgtgggaaacggcagagccctcgcggtccccatcagcactgtgcagtggtaccggaggtggcaggagacagcctgatggcccaggttgtcttcatacccggcttcatgccagggtgcatgccgggcatagcacatgtgtccctgagaggcccctgatcaggggtggaaacccagcaaagtgaaaatcagaaatagtgattctccagttcctgttcacagataaagaaagaaagaaataataagcaatactaggcctggtgtggtagttcacacctgtaatcccagcactttgggaggccaaggcaggcaatcacttgaggtcaggagttcaagaccagcctggccaacatggtgaaaccccgtctctactaaaaatacaaatattagccgggcatggtggcgggcgcctgtagtcccagctactcaggaggctgaggcagaagaatcgcttgaaccggggaggcggagggtgtggtgagccgggatcgcaccgctgcactccagcctgggtgacagaatgagactccatcccaaaaacaaaacaaaacaaaacaaaaaacaaacaaaaacaactaaaaggacagtatctttttagcacccatcagtgtacaggatgctggggagggtactgtgaacttacccatggtgaaagtccctgtgttaatggataagctcaatgctcagaaaatgctgctgactgtggtattgccccatttaaagagacagtttgcagtacgttttcagaagtggcatgcagcctcagagaaaagtcaccaggggctggcatgattccagaaaatgttacagagcaagtggaatttgacttgaggcttgaaggatgggcaagatttaaataaaattcagaaacggtagagagggaggggctggggggaaggctgcccactggactgtcctgtttgcctccaggagaacctacaggcaagacatggtctcttctcaggtgaatgggaagccaagtagggctggcatgggtgagccacagctcgaggaggcaggccccgggccctgcgctgcctgtcatggctcatgagtgatgggagagatctgggcaggcaacctcctctcatcctgcatcatcagcctggacttggaacttggctgctttttctttctgcagttagcagagggccttggccaacacataagcctttctgccagcacttggcattccagctgacctcgacccaaggcctctgtgacttcaggaggcggcagctgggaagggtcagggcagttccaggcagagcacagacgtcagctcagacatcctaccccccgccaaccccccgcccccggggtttccagagcaaccaacaccaccaagctccaggacactggaaaaaaaatctttgcaaagaagcaaggggccatctcagaaaatccaggtcccccaaattgatgtagggagaggagggctttgacagcattcagcactccagagggtcacgaggatacagaaaccatttggagccacctctgcttctcagccccacccaggcaagccctggatcttcaagggactgatttgtacctgggaataaactcatgcatggatgagattcagagtcaatcacaccctaaaatgcagagcccatagtattggtgagttgttcatgtgtctctgaagcaaatttagggctgtggttcaaacatcgtaaaagttaaaaaaaattcactggatacacacagtaggctcttttaaattagcctcatttgaacttaattacatatttaaatactcaaataataaatgatggctgggtgcggtgtctcatgcctgtaatcccagcactttgggaggctgaggcaggctgatcacttgaggtcaggagttcgagcccagcctggccaacatggtgaaaccccgtctctactaaaaatacaaaaattagccatgcatggtggcgggtgcctgtaatcccagctacttgggaggctgaggcagcagaagcacttgaacccaggaggcagtggttgcaatgagccgagatcgcaccactgcattccagcctgggtgacagagcaacactgtgtctcaaaagaaaattttttttaataaaaataaaaaataaaataaaataagtgagtccactgaaagcggtttctaccttgatagttgggtgtgtggcgtcatcaacatcacagaaggctgatcgatattaccaggtgtggttgagtgcaagtgtttgaggtctcgtgggggaagagtttggaattcagaatccattgaggccttcactcaccactttccctctctcgctgtgttcccaaatgtgccacttttctgttggctcacatgcacccatgctctatttgatattcagggctctgaatttcaagccagactcagtcagtgtgattgtcactgctttcctgtccttcctttatcatctgtagacttgggtcccgtttttgcaggttgatgttctgtcttcgctgggctctggactcactgctcacgagtgcggtgtctgcatgggcactgcccagacatgcactgttggtccctcgatggctgcatggtcaggcctcagggctctctgccaggccgacctacagcccatacagacctgatttctgggcctggatccaggggatgccatctgggaagtgcgggatcttcccacgatgtcactgtaaaactcaccagggaggttttagaaattgaaccggcatcattcagattccatcctgctttttggtcctgagaaaatcctgcttttccctgagtaactgggataatgggtcaccagctcccatgccctagatgaggactagttagcattttctagtgcctggagatttccagatggaagctgtacttgggtctgtgtatctttgttacaggattcaataattcatgcactgaatttcccttcccggcaactccagacaccaaatcgcttcccatggtgtcccccaatcacttaggaatttagcctgtgtctaaagaccctctctgcagcctgacgtggctagccatcccagtacttccacgtttttcatgcctttctccaacagcgttgccgtggccccttaggcggcgatcgttttatcaatggtcgctccctctttttatctgttggcaggagccctttttcaacgccctcgctggagtctggcctgcacgccttgctgaatgaagccggaacctcagccccgcttccctttgaaatgaatgttcctggggcgccctctcgtggattttggagctaatcgtctgtgaatgccaagtgatggcaactgccctcccgccgcgtctccagccggtgcgggggaacgagaccctgcgggagcattaccagtacgtggggaagttggcgggcaggctgaaggaggcctccgagggcagcacgctcaccaccgtgctcttcttggtcatctgcagcttcatcgtcttggagaacctgatggttttgattgccatctggaaaaacaataaatttcacaaccgcatgtactttttcattggcaacctggctctctgcgacctgctggccggcatcgcttacaaggtcaacattctgatgtctggcaagaagacgttcagcctgtctcccacggtctggttcctcagggagggcagtatgttcgtggcccttggggcgtccacctgcagcttactggccatcgccatcgagcggcacttgacaatgatcaaaatgaggccttacgacgccaacaagaggcaccgcgtcttcctcctgatcgggatgtgctggctcattgccttcacgctgggcgccctgcccattctgggctggaactgcctgcacaatctccctgactgctctaccatcctgcccctctactccaagaagtacattgccttctgcatcagcatcttcacggccatcctggtgaccatcgtgatcctctacgcacgcatctacttcctggtgaagtccagcagccgtaaggtggccaaccacaacaactcggagcggtccatggcactgctgcggaccgtggtgattgtggtgagcgtgttcatcgcctgctggtccccactcttcatcctcttcctcattgatgtggcctgcagggtgcaggcgtgccccatcctcttcaaggctcagtggttcatcgtgttggctgtgctcaactccgccatgaacccggtcatctacacgctggccagcaaggagatgcggcgggccttcttccgtctggtctgcaactgcctggtcaggggacggggggcccgcgcctcacccatccagcctgcgctcgacccaagcagaagtaaatcaagcagcagcaacaatagcagccactctccgaaggtcaaggaagacctgccccacacagccccctcatcctgcatcatggacaagaacgcagcacttcagaatgggatcttctgcaactgatcgtctccatgcgccctgctctgcggctgtgttcttatttattgcatgcgtcgcttccacaggggcccctcaagagctgtgactcgggagagctaccttactttgaccaacagcctgcccagtgtggatgtctcttacagagggggcccaaggaatcaccaccccgcttcagtgtaaacaacgtgccttgtccactttgggctccagagtctttcagatgtactaagctgctgacatcatccactgccttctgctgcatcctagacaccctccctgttgttcacagagagggaaggtcgtgggccacacaatgctgtgtgaccctctccgtgtgcctctgaatggtgttttgatgattttacactacatttcctgtgcgtagaatggatgcttgtatattcgtacatctctatgttacacagaatttgtgttgcaggtgtttgccatgtggtacctacatagaatctccatacaacacacaggtaacaggttatacaagtggattcagactgaacccccagtacaaggacattgttttgaactaggtggacatgccatccctggtctccttagactgacatgattctcatgttaaccaagttttaaaagttcaaattccccaaaaaggcttgtccaaggctggccccagatgtgtgggtctgacccacaccagccctgtgtcctgtcctttcagtcatttgtccctgcgtaattttaatcgtattccaaagcccaattatgtgatggttttcaggtttctgcaaattacagaagagccagccaagatcacccaggagcttgtgcccccagatgggccaaagaaagagcctatgaaggagaagcagaagcagacggctggcctggctcaccttcccacgccagtggggcaggggtctgcttcaggaaatggaagctgtccaggaaatgagcagagattcacaagacagcactttgattctatgttgagtttgtttctatattagaaaagcagcaagtcagtaatcccccgtggcatcacagctaagtagctgtggccaccggcagtttcacagcatcctgaaagctggcactgatcgtgactatcagtgaaagaagtttaattttcaggttagaaaatgtgatctggcagtttatgcattcttcagagtaatgtaataatacctatgtgatgctgtaattttacttttcaacataagttgaacccgtagcagtctgtttaccttgtaaagggattacttagaagacatttttgtacatgctcttccccaaggattgtacgtattatacaaatagatggaaagaaaagtgaacacgtttgtagaactttcataagcacacagttgctgtgttgagttctctttaaaaacaaggacaaaaccaaccagcgttcaaaggaacctcccatcagagtcccctaaagtattttaggttcagtgagcatttgcctgaataaaacctaaaagagtagtcttaacacattactaactttttctaagagaaattgattcctgttttgtcatctgatgcaatttgctcttataaagagacattttcataggttcagagtaactcacctccatgggctgaccaaaggcttttctaatttttgttactgatgagatgaaacctatttgtaaggagatcttccccaggagcatttctgttgccttcttgacatcaatgaaaagtagcatattctcttatgaaatagcatgagaaaacacagggcatttctaggacagtaaaacgttaaagtactggattaagaaaacaacaacaggctgggcgcagtggctcacacctgtaatcccagcactttgggaggctgaggcgggtggatcacctgaggtcaggagtttgtgaccagcctggccaacatagtgaaatcctgtttctactaaaaatacaaaaattagctggatgcgatagcacgtgcctgtagtcccagctactcgggaggctgaggctggagagttgctcaaacccgggaggcggagattgcagtgagccaagatcgcaccgctgcactccagcctgggtgacagagcgaccctctgtctcaaaaaataataataataataaataaaacaacaacaaaatgcatcagagagccaaaacattcagtattgcattttcacataggtgatgaaatgactttggaactttatctgtgttatagttatgagttgctttgggagacttggagctctctgtagctattgttcataacactttgctccataaccctgatgtccgcagtatctaagtatctcagccttcatccattaactctactagggagcccacagccaccatttccactaggaggtatcaatatttgtggtatgacataaggctcccttgaaataacaagacttttgagcaatctgaattaaaaatacatcaaaaaagtaatagcgctcatttgctaaatgcaaaaaataatcacctttgataccaatgtgcaccaatatgcctaactagctagccagctggagataatttaccagggaatgtttcaaagccctaaccttgaagtttggaaacaggtggtcttctatgctgcagagaaactatgcattaggtctcttttcaattagaaacctttactatttccaatgtatgtttgttaaaaataataataataaaaccaaaagcctttgtggaaaccca

SEQ ID NO: 29836 - DNA, 1594 bp, Homo sapiens
  source 1..1594: mol_type = unassigned DNA
gcaaggcgggtggctccaccctgcgtcgggcctcagtcagcccccgggggaggccatgaacgccacggggaccccggtggcccccgagtcctgccaacagctggcggccggcgggcacagccggctcattgttctgcactacaaccactcgggccggctggccgggcgcggggggccggaggatggcggcctgggggccctgcgggggctgtcggtggccgccagctgcctggtggtgctggagaacttgctggtgctggcggccatcaccagccacatgcggtcgcgacgctgggtctactattgcctggtgaacatcacgctgagtgacctgctcacgggcgcggcctacctggccaacgtgctgctgtcgggggcccgcaccttccgtctggcgcccgcccagtggttcctacgggagggcctgctcttcaccgccctggccgcctccaccttcagcctgctcttcactgcaggggagcgctttgccaccatggtgcggccggtggccgagagcggggccaccaagaccagccgcgtctacggcttcatcggcctctgctggctgctggccgcgctgctggggatgctgcctttgctgggctggaactgcctgtgcgcctttgaccgctgctccagccttctgcccctctactccaagcgctacatcctcttctgcctggtgatcttcgccggcgtcctggccaccatcatgggcctctatggggccatcttccgcctggtgcaggccagcgggcagaaggccccacgcccagcggcccgccgcaaggcccgccgcctgctgaagacggtgctgatgatcctgctggccttcctggtgtgctggggcccactcttcgggctgctgctggccgacgtctttggctccaacctctgggcccaggagtacctgcggggcatggactggatcctggccctggccgtcctcaactcggcggtcaaccccatcatctactccttccgcagcagggaggtgtgcagagccgtgctcagcttcctctgctgcgggtgtctccggctgggcatgcgagggcccggggactgcctggcccgggccgtcgaggctcactccggagcttccaccaccgacagctctctgaggccaagggacagctttcgcggctcccgctcgctcagctttcggatgcgggagcccctgtccagcatctccagcgtgcggagcatctgaagttgcagtcttgcgtgtggatggtgcagccaccgggtgcgtgccaggcaggccctcctggggtacaggaagctgtgtgcacgcagcctcgcctgtatggggagcagggaacgggacaggcccccatggtcttcccggtggcctctcggggcttctgacgccaaatgggcttcccatggtcaccctggacaaggaggcaaccaccccacctccccgtaggagcagagagcaccctggtgtgggggcgagtgggttccccacaaccccgcttctgtgtgattctggggaagtcccggcccctctctgggcctcagtagggctcccaggctgcaaggggtggactgtgggatgcatgccctggcaacattgaagttcgatcatggt

SEQ ID NO: 29837 - DNA, 2340 bp, Homo sapiens
  source 1..2340: mol_type = unassigned DNA
ctcactcggttcaaggcagcgcgactgcgggtggcgcacgaccagggcgcagaccttggggcgcgcggcccatggagtcggggctgctgcggccggcgccggtgagcgaggtcatcgtcctgcattacaactacaccggcaagctccgcggtgcgcgctaccagccgggtgccggcctgcgcgccgacgccgtggtgtgcctggcggtgtgcgccttcatcgtgctagagaatctagccgtgttgttggtgctcggacgccacccgcgcttccacgctcccatgttcctgctcctgggcagcctcacgttgtcggatctgctggcaggcgccgcctacgccgccaacatcctactgtcggggccgctcacgctgaaactgtcccccgcgctctggttcgcacgggagggaggcgtcttcgtggcactcactgcgtccgtgctgagcctcctggccatcgcgctggagcgcagcctcaccatggcgcgcagggggcccgcgcccgtctccagtcgggggcgcacgctggcgatggcagccgcggcctggggcgtgtcgctgctcctcgggctcctgccagcgctgggctggaattgcctgggtcgcctggacgcttgctccactgtcttgccgctctacgccaaggcctacgtgctcttctgcgtgctcgccttcgtgggcatcctggccgctatctgtgcactctacgcgcgcatctactgccaggtacgcgccaacgcgcggcgcctgccggcacggcccgggactgcggggaccacctcgacccgggcgcgtcgcaagccgcgctcgctggccttgctgcgcacgctcagcgtggtgctcctggcctttgtggcatgttggggccccctcttcctgctgctgttgctcgacgtggcgtgcccggcgcgcacctgtcctgtactcctgcaggccgatcccttcctgggactggccatggccaactcacttctgaaccccatcatctacacgctcaccaaccgcgacctgcgccacgcgctcctgcgcctggtctgctgcggacgccactcctgcggcagagacccgagtggctcccagcagtcggcgagcgcggctgaggcttccgggggcctgcgccgctgcctgcccccgggccttgatgggagcttcagcggctcggagcgctcatcgccccagcgcgacgggctggacaccagcggctccacaggcagccccggtgcacccacagccgcccggactctggtatcagaaccggctgcagactgacaccctcggcccacgactgtcttcccaagttttacagacttgttctttttacataaaggaatttgtaggaaatgcagccaaaggtgcagtcggaaaagatgcaggggaaatgtatttatgcagcgacaccccacaatgtgaacaaacagacaaaaaatctgtgccctcgtggaattgacgttctgcttgggaacacagaaaagaactcggtgatgaaataatggagatgattccagtgacaaacgacagagatggtgatggtggtcagggaagacctctctgcagaggtagtgacttgtgatgtgagctgagacctctgtcctgggaagaccaaaagaaaagcatttcaggatgagggaatggcatgcgcaaaggccctgaggctgaaatgtgcccatgtgttctaagaaatgcagcgatgctggtgtgcctggagcagggacggagggggagaatgggaggagacaaggagctgaaggagtagttcccgaaggaccttgtgggtgatatagaggacttcgcttttgctctgagtgaggtgggagccatagaagcttctaagcagaagagggacttgccctaattcaggtgatcacaggtgtcttgtggcctccatgggaggttgaaaaccagagaaggtgaaggggggctgcactgagccacaggaacaatgatggagattccagctaagcccagaccccgtggattctagatagattttagaggcagcagacagaattactgaggaattgagtgtaagagtggaataaagttatcaaggacaatgccaagggtggggcacccccaaatttgactctgggagactcagccaaatcctatctggtaataaaatttcttttttatttttcttttctttctttctttcttttttttttttttgagttgggatcttgtgctctgtcacccaggctggagtgcaatgggcacaattatagctcactgcagcctggaactcctgggatcaagcctggagttcctgcttcagcctccctagtagctgggactacaggcatgcaccaccatgcccagttaataaaatttcttcaaatgc

SEQ ID NO: 29838 - DNA, 2043 bp, Homo sapiens
  source 1..2043: mol_type = unassigned DNA
gctcactcggttcaaggcagcgcgactgcgggtggcgcacgaccagggcgcagaccttggggcgcgcggcccatggagtcggggctgctgcggccggcgccggtgagcgaggtcatcgtcctgcattacaactacaccggcaagctccgcggtgcgcgctaccagccgggtgccggcctgcgcgccgacgccgtggtgtgcctggcggtgtgcgccttcatcgtgctagagaatctagccgtgttgttggtgctcggacgccacccgcgcttccacgctcccatgttcctgctcctgggcagcctcacgttgtcggatctgctggcaggcgccgcctacgccgccaacatcctactgtcggggccgctcacgctgaaactgtcccccgcgctctggttcgcacgggagggaggcgtcttcgtggcactcactgcgtccgtgctgagcctcctggccatcgcgctggagcgcagcctcaccatggcgcgcagggggcccgcgcccgtctccagtcgggggcgcacgctggcgatggcagccgcggcctggggcgtgtcgctgctcctcgggctcctgccagcgctgggctggaattgcctgggtcgcctggacgcttgctccactgtcttgccgctctacgccaaggcctacgtgctcttctgcgtgctcgccttcgtgggcatcctggccgctatctgtgcactctacgcgctcgctggccttgctgcgcacgctcagcgtggtgctcctggcctttgtggcatgttggggccccctcttcctgctgctgttgctcgacgtggcgtgcccggcgcgcacctgtcctgtactcctgcaggccgatcccttcctgggactggccatggccaactcacttctgaaccccatcatctacacgctcaccaaccgcgacctgcgccacgcgctcctgcgcctggtctgctgcggacgccactcctgcggcagagacccgagtggctcccagcagtcggcgagcgcggctgaggcttccgggggcctgcgccgctgcctgcccccgggccttgatgggagcttcagcggctcggagcgctcatcgccccagcgcgacgggctggacaccagcggctccacaggcagccccggtgcacccacagccgcccggactctggtatcagaaccggctgcagactgacaccctcggcccacgactgtcttcccaagttttacagacttgttctttttacataaaggaatttgtaggaaatgcagccaaaggtgcagtcggaaaagatgcaggggaaatgtatttatgcagcgacaccccacaatgtgaacaaacagacaaaaaatctgtgccctcgtggaattgacgttctgcttgggaacacagaaaagaactcggtgatgaaataatggagatgattccagtgacaaacgacagagatggtgatggtggtcagggaagacctctctgcagaggtagtgacttgtgatgtgagctgagacctctgtcctgggaagaccaaaagaaaagcatttcaggatgagggaatggcatgcgcaaaggccctgaggctgaaatgtgcccatgtgttctaagaaatgcagcgatgctggtgtgcctggagcagggacggagggggagaatgggaggagacaaggagctgaaggagtagttcccgaaggaccttgtgggtgatatagaggacttcgcttttgctctgagtgaggtgggagccatagaagcttctaagcagaagagggacttgccctaattcaggtgatcacaggtgtcttgtggcctccatgggaggttgaaaaccagagaaggtgaaggggggctgcactgagccacaggaacaatgatggagattccagctaagcccagaccccgtggattctagatagattttagaggcagcagacagaattactgaggaattgagtgtaagagtggaataaagttatcaaggacaatgccaagggtggggcacccccaaatttgactctgggagactcagccaaatcctatctggtaataaaatttcttttttatttttc

SEQ ID NO: 29839 - DNA, 2456 bp, Homo sapiens
  source 1..2456: mol_type = unassigned DNA
aattgggaggggcctgtgcccgggagcagcgggaacctatctgctggtgggagaggactcaggctaaggtggcccccactgaagactcctgctaagcaacccactgaagacccctccgaatcatcgacggggcgtccttggggtgcagcccaggaagctcagttcacagccttggggcgcgcggcccatggagtcggggctgctgcggccggcgccggtgagcgaggtcatcgtcctgcattacaactacaccggcaagctccgcggtgcgcgctaccagccgggtgccggcctgcgcgccgacgccgtggtgtgcctggcggtgtgcgccttcatcgtgctagagaatctagccgtgttgttggtgctcggacgccacccgcgcttccacgctcccatgttcctgctcctgggcagcctcacgttgtcggatctgctggcaggcgccgcctacgccgccaacatcctactgtcggggccgctcacgctgaaactgtcccccgcgctctggttcgcacgggagggaggcgtcttcgtggcactcactgcgtccgtgctgagcctcctggccatcgcgctggagcgcagcctcaccatggcgcgcagggggcccgcgcccgtctccagtcgggggcgcacgctggcgatggcagccgcggcctggggcgtgtcgctgctcctcgggctcctgccagcgctgggctggaattgcctgggtcgcctggacgcttgctccactgtcttgccgctctacgccaaggcctacgtgctcttctgcgtgctcgccttcgtgggcatcctggccgctatctgtgcactctacgcgcgcatctactgccaggtacgcgccaacgcgcggcgcctgccggcacggcccgggactgcggggaccacctcgacccgggcgcgtcgcaagccgcgctcgctggccttgctgcgcacgctcagcgtggtgctcctggcctttgtggcatgttggggccccctcttcctgctgctgttgctcgacgtggcgtgcccggcgcgcacctgtcctgtactcctgcaggccgatcccttcctgggactggccatggccaactcacttctgaaccccatcatctacacgctcaccaaccgcgacctgcgccacgcgctcctgcgcctggtctgctgcggacgccactcctgcggcagagacccgagtggctcccagcagtcggcgagcgcggctgaggcttccgggggcctgcgccgctgcctgcccccgggccttgatgggagcttcagcggctcggagcgctcatcgccccagcgcgacgggctggacaccagcggctccacaggcagccccggtgcacccacagccgcccggactctggtatcagaaccggctgcagactgacaccctcggcccacgactgtcttcccaagttttacagacttgttctttttacataaaggaatttgtaggaaatgcagccaaaggtgcagtcggaaaagatgcaggggaaatgtatttatgcagcgacaccccacaatgtgaacaaacagacaaaaaatctgtgccctcgtggaattgacgttctgcttgggaacacagaaaagaactcggtgatgaaataatggagatgattccagtgacaaacgacagagatggtgatggtggtcagggaagacctctctgcagaggtagtgacttgtgatgtgagctgagacctctgtcctgggaagaccaaaagaaaagcatttcaggatgagggaatggcatgcgcaaaggccctgaggctgaaatgtgcccatgtgttctaagaaatgcagcgatgctggtgtgcctggagcagggacggagggggagaatgggaggagacaaggagctgaaggagtagttcccgaaggaccttgtgggtgatatagaggacttcgcttttgctctgagtgaggtgggagccatagaagcttctaagcagaagagggacttgccctaattcaggtgatcacaggtgtcttgtggcctccatgggaggttgaaaaccagagaaggtgaaggggggctgcactgagccacaggaacaatgatggagattccagctaagcccagaccccgtggattctagatagattttagaggcagcagacagaattactgaggaattgagtgtaagagtggaataaagttatcaaggacaatgccaagggtggggcacccccaaatttgactctgggagactcagccaaatcctatctggtaataaaatttcttttttatttttcttttctttctttctttcttttttttttttttgagttgggatcttgtgctctgtcacccaggctggagtgcaatgggcacaattatagctcactgcagcctggaactcctgggatcaagcctggagttcctgcttcagcctccctagtagctgggactacaggcatgcaccaccatgcccagttaataaaatttcttcaaatgc

SEQ ID NO: 29840 - DNA, 6804 bp, Homo sapiens
  source 1..6804: mol_type = unassigned DNA
gtctttcttctctgggcgcccaccaacaatggatggcaactccctgctctcggtaccaagcaacttggagtcatcacggatgtatgacgttttggaaccgcagcagggcagaggctgtggcagctcaggaagcggcccggggaactccatcacagcctgtaagaaggttcttcgcagcaatagcctgctggagtcaacagactactggttgcagaatcagaggatgccctgccaaattggttttgtagaagacaagtctgaaaactgtgcttctgtctgctttgtgaatcttgatgtgaacaaggatgaatgcagcacagagcacctgcaacagaaactggtcaacgtttcaccagatcttccaaaacttatcagttccatgaatgtccaacaaccaaaagaaaatgaaattgttgtcctaagtgggttagcctctggaaatctccaggcagattttgaagtttcacagtgcccttggctgccagatatctgcttggtccaatgtgcaagagggaacagaccaaacagtaccaactgcatcatctttgaaatcaacaaatttctgattggtctggaactggtgcaggagcgacagctccacctggaaacaaacatcttgaaactggaggatgacacgaactgttccttatcttcaatcgaggaagactttctcaccgcttctgagcacttggaggaggaaagcgaggtggatgaatctaggaacgattatgaaaatataaatgtctcagccaatgttttggaaagtaaacagctaaagggagccacccaggtggaatggaattgcaacaaggaaaagtggctttatgctttggaagacaaatacatcaacaaatatcccacaccattgattaaaacagaacgatctccagaaaacctaacaaagaacacagccttgcagagtctagatccctcagccaagccatcacagtggaaaagagaagctgtggggaatgggagacaagccacacattattatcattcagaagcttttaaaggtcaaatggaaaaatcacaggcactgtatattccaaaagatgcttatttctccatgatggataaagatgtaccttctgcatgtgctgtggcagagcagagaagcaacctaaacccaggagaccatgaagacacaagaaacgctctccctcctagacaagatggagaagtcaccactggcaagtatgctacaaatttagcagaatccgtgctgcaggatgcatttattagattatctcaatctcagtccacattaccccaggaatctgcagtcagtgtttctgtaggaagttctctgcttcccagttgctattccacaaaagatacagtggtttctcggtcatggaatgagctccccaaaatcgtcgttgttcagagtccagatggcagtgatgctgccccacagccaggcatctcctcctggcctgagatggaagtctctgttgaaacctcaagcatcctctctggagagaactccagcagacaaccccagagtgctctagaagtggcgttagcttgtgcagccactgtgattggaactatttccagtccacaggccacagaaagactcaaaatggagcaagtggtctcgaactttcccccagggagcagtggtgcactgcaaactcaagcaccccaaggactcaaggaaccttccatcaatgagtactcctttccatctgctttgtgtggcatgactcaggtggccagtgccgtggctgtctgtggtctgggtgaaagagaagaggtgacatgctcagtggctccaagtggtagcctcccgcctgcagctgaggcttctgaagccatgcccccactttgtggtttagcaagcatggagcttggcaaggaagccattgccaagggattgctcaaggaggctgctctggttttaacaaggcctaatacctacagcagcattggagactttctggactccatgaacaggagaatcatggaaactgcttcaaagtctcagaccctgtgctcagaaaatgtcgtcaggaatgaactggcacataccctgtccaatgttatcctgaggcattccattgatgaagttcaccacaaaaatatgataatcgaccccaatgacaacaggcattcatctgaaattctggacaccttaatggaaagtacaaatcaactgcttttagatgtgatatgcttcacgttcaagaagatgagtcatattgtacggcttggtgaatgtcctgctgtcctttctaaggagaccatcagaaggagggagacagaaccaagctgccagccatctgatccgggtgctagtcaagcttggacaaaagccactgaatcctccagcagctctccacttagcaattcacacaacacgagtcttgtcatcaacaatcttgtggatggcatgtattcaaaacaagacaagggtggagtgaggccaggcctcttcaagaaccccacgctgcagtcacaattatcacgtagtcacagagtgcccgattcttcaactgctacaacatcctccaaggaaatatatctgaaaggaatagcaggagaggatacaaaaagccctcatcacagtgagaatgaatgcagagcctcttccgaaggacaaaggtccccaacggtcagccagtccagaagtggttcccaggaggctgaggagagtatccacccaaacacccaagaaaagtacaactgtgccacatctcgcatcaacgaagttcaagtcaacctgtccttgttaggggatgacctgctgcttcctgctcaatccacgcttcaaacaaagcatccagacatctactgcattacagactttgcggaagaattagcagacacggtcgtctccatggcaactgaaattgcagcgatttgccttgacaactccagtggaaaacaaccctggttttgtgcatggaaaagagggagtgagtttctgatgacacccaacgtaccctgccgatccttgaagaggaagaaagagagccaggggagcgggaccgctgtgaggaaacacaagcctccccggctcagtgagatcaagaggaagacggacgagcaccctgagcttaaagaaaagctgatgaacagggttgtggatgagtccatgaaccttgaagatgtcccagattctgtcaatctttttgccaatgaagtggcagccaagatcatgaacctaacggagttctctatggtggacggcatgtggcaggcgcagggctatccccggaatcggttactgagtggcgacaggtggagccggctgaaggcctccagctgcgaaagcattcctgaggaagactccgaggccagggcctatgtcaacagcctgggcttaatgagcacgctgagccagccggtcagcagggccagctctgtctccaagcagtcgagctgtgagagcatcaccgatgagttttccaggttcatggtgaaccagatggaaaatgaagggagaggatttgagttactgctggattactatgctggcaagaacgccagcagcattctgaactcagccatgcaacaggcgtgccggaaaagtgaccacctcagtgtgaggcctagctgtccctctaagcagtccagcacagagagcatcactgaggagttctacaggtacatgctgagggacatcgaaagagacagcagagaaagtgcctcctccagacggagcagccaggattggacagccggcctgctgtctccttctctgcgatccccagtgtgccacagacagtcgtccatgccagacagcagatccccatgctccaggctgacagtgaatgtgcccatcaaagccaactctttagatggctttgctcagaactgcccacaagatttcctaagcgtgcagccggtcagtagcgcgtcctcatccggtctctgcaaatctgactcttgcttgtatcggagaggtgggactgaccacatcaccaacatgttaattcatgaaacgtgggctagctccattgaggctctcatgcgcaagaacaaaatcattgtggatgatgcagaggaagctgacactgagcctgtttctggtggctctccctcgcaagcagagaagtgtgcaaatagattagctgcgagcaggatgtgcagtgggccaactctgcttgttcaggagtctctcgattgcccgaggaaagactctgttaccgaatgtaaacagcccccagtgtcatctttgagcaaaactgcttctcttacaaaccacagccctttagattctaaaaaagaaacttcctcgtgccaggaccctgtaccaataaaccacaaaaggcgatcactttgctcgagggaagtgcctttgattcagattgaaacagatcagagagaagcctgtgctggggaacctgaacccttcctttccaaaagcagcctcctagaggaagcagaagggcattcgaatgacaaaaacatcccagatgtggtgagaggtggagacacagccgtgagcgcttgtcaaatccatagtgacagccttgataccagagatgtaccagaggctgaagcctccacagaagccagagcccccgatgaggcccccaaccctccaagcagcagcgaggagagcacaggcagctggacccagcttgccaatgaggaagacaacccagatgacacaagtagctttctccagctcagtgagcgatccatgagtgaattagtagaagaaaagaagattcttaaaggacagtcagaaagcacagaggcacctgcatctggaccgcctacgggaacagccagcccccagaggagcctgctggtgatcaactttgacctggagccagagtgtccagatgccgagctccgagccactctgcagtggatagctgcctctgaactggggattcccaccatctactttaagaaatctcaggaaaacagaattgaaaagtttctagatgtcgtgcagctggttcatcggaagtcctggaaagtgggtgatatcttccatgcagttgtccagtactgcaaaatgcatgaggagcagaaggatgggagactgagtctctttgactggctcttggaactgggataataaggcagtctgccgtatagatcattccttccctttattccaacttagattacagtggtttgttctaaatgctctaaacattctcaaaacatcacatcacattagcagaactataaaaaaaaatctgctactcagatccactgcatacagaataagtcagaggaaaagcaaaatataggtctgtccaaattcatacaacttgtgggtgagttccaaagagcttggattagaagggctggacaaagagagaattcaatggggcccaaattagaatgcttataatgagacccaatctccaggaaaacaacactcacataagtttaatcatataaaatgatttgtaatgtctctaattagatgaatcaactagaaacaaactcagtggtcaaaataatttttaagagtattccgtaacctatattttacttttctgattatattaaggggctgccagcccggagaaatacttaagatatgggtgagaaatccccagacttttatacaaaagatttccactttcaaatcaatgtcagtagacattgataaaagtatagcagcatcctctactgaggtgatttcatttattccctgcagcccactgataaatatctcacttctcccaaatagtatgtggactcccagctaagcagaaaactattgtcattcaactgaagaagaggaagataaaagattgtcttgtttccatcactgtattacttgtgtaacatgattacataattcttatcctaagagaaagctttcatatttaaaaaaaagtcttttcagataaaatctgcttgtgtcttgaataatatgaaatacaaactttcactttattttattgtaaattataaagagattattgtcttaaataatatattgagttagcttcaagcttcctaaaatatgaagagattgttgtctaaagtcacatattgacattgagctcagtggcctgtttcatcacgtatgtgctgctacctgtacagcagacatgccgctccagtgacatttataatgacagaagcagggtaatggtcttgtgtttgacatgatcagttaggatcatagactttccctgactcgtagatattagccttgaattgggggaaaagaagactttgacacattttagttattttaataacagagatttactcttttgaaaaataaaggtatctaatgtctccctaataagtcttctttccttccaactaaatgacctacacggacttttattttcttgatcaaagaggtgtttattaaggacttctggataactatacttttactctatttttaaagatcacaaagtaattttaaatgtgaacaggttcccataccatgaatgctggcctcaccttctctatcatccacattttgaaatgcaaagaaagctcccttgtaagccatacttccttccccactcccatcctaggatacttgcccagtgctcattaggcatttcttattcagatagtccaaatttaggttattatgcttaatttgacacattaactaaatgcccagttttaaaatatatccatcaattcacgctgaaatgtgcttctttgtgctatcaaatggaatagaatacacttattttttaaacaatcccagaatactgtgtgtagacttttgttgtgctcaaataaatgtttacttatcttacaaagctcaaatactggattgtaaccatgtgatgaagttatctatgttgtacctaacattgcaaattaatcaataaatctctgttgtca

SEQ ID NO: 29841 - DNA, 6917 bp, Homo sapiens
  source 1..6917: mol_type = unassigned DNA
tccttcgcctgcactttccgtctttcttctctgggcgcccaccaacaatggatggcaactccctgctctcggtaccaagcaacttggagtcatcacggatgtatgacgttttggaaccgcagcagggcagaggctgtggcagctcaggaagcggcccggggaactccatcacagcctgtaagaaggttcttcgcagcaatagcctgctggagtcaacagactactggttgcagaatcagaggatgccctgccaaattggttttgtagaagacaagtctgaaaactgtgcttctgtctgctttgtgaatcttgatgtgaacaaggatgaatgcagcacagagcacctgcaacagaaactggtcaacgtttcaccagatcttccaaaacttatcagttccatgaatgtccaacaaccaaaagaaaatgaaattgttgtcctaagtgggttagcctctggaaatctccaggcagattttgaagtttcacagtgcccttggctgccagatatctgcttggtccaatgtgcaagagggaacagaccaaacagtaccaactgcatcatctttgaaatcaacaaatttctgattggtctggaactggtgcaggagcgacagctccacctggaaacaaacatcttgaaactggaggatgacacgaactgttccttatcttcaatcgaggaagactttctcaccgcttctgagcacttggaggaggaaagcgaggtggatgaatctaggaacgattatgaaaatataaatgtctcagccaatgttttggaaagtaaacagctaaagggagccacccaggtggaatggaattgcaacaaggaaaagtggctttatgctttggaagacaaatacatcaacaaatatcccacaccattgattaaaacagaacgatctccagaaaacctaacaaagaacacagccttgcagagtctagatccctcagccaagccatcacagtggaaaagagaagctgtggggaatgggagacaagccacacattattatcattcagaagcttttaaaggtcaaatggaaaaatcacaggcactgtatattccaaaagatgcttatttctccatgatggataaagatgtaccttctgcatgtgctgtggcagagcagagaagcaacctaaacccaggagaccatgaagacacaagaaacgctctccctcctagacaagatggagaagtcaccactggcaagtatgctacaaatttagcagaatccgtgctgcaggatgcatttattagattatctcaatctcagtccacattaccccaggaatctgcagtcagtgtttctgtaggaagttctctgcttcccagttgctattccacaaaagatacagtggtttctcggtcatggaatgagctccccaaaatcgtcgttgttcagagtccagatggcagtgatgctgccccacagccaggcatctcctcctggcctgagatggaagtctctgttgaaacctcaagcatcctctctggagagaactccagcagacaaccccagagtgctctagaagtggcgttagcttgtgcagccactgtgattggaactatttccagtccacaggccacagaaagactcaaaatggagcaagtggtctcgaactttcccccagggagcagtggtgcactgcaaactcaagcaccccaaggactcaaggaaccttccatcaatgagtactcctttccatctgctttgtgtggcatgactcaggtggccagtgccgtggctgtctgtggtctgggtgaaagagaagaggtgacatgctcagtggctccaagtggtagcctcccgcctgcagctgaggcttctgaagccatgcccccactttgtggtttagcaagcatggagcttggcaaggaagccattgccaagggattgctcaaggaggctgctctggttttaacaaggcctaatacctacagcagcattggagactttctggactccatgaacaggagaatcatggaaactgcttcaaagtctcagaccctgtgctcagaaaatgtcgtcaggaatgaactggcacataccctgtccaatgttatcctgaggcattccattgatgaagttcaccacaaaaatatgataatcgaccccaatgacaacaggcattcatctgaaattctggacaccttaatggaaagtacaaatcaactgcttttagatgtgatatgcttcacgttcaagaagatgagtcatattgtacggcttggtgaatgtcctgctgtcctttctaaggagaccatcagaaggagggagacagaaccaagctgccagccatctgatccgggtgctagtcaagcttggacaaaagccactgaatcctccagcagctctccacttagcaattcacacaacacgagtcttgtcatcaacaatcttgtggatggcatgtattcaaaacaagacaagggtggagtgaggccaggcctcttcaagaaccccacgctgcagtcacaattatcacgtagtcacagagtgcccgattcttcaactgctacaacatcctccaaggaaatatatctgaaaggaatagcaggagaggatacaaaaagccctcatcacagtgagaatgaatgcagagcctcttccgaaggacaaaggtccccaacggtcagccagtccagaagtggttcccaggaggctgaggagagtatccacccaaacacccaagaaaagtacaactgtgccacatctcgcatcaacgaagttcaagtcaacctgtccttgttaggggatgacctgctgcttcctgctcaatccacgcttcaaacaaagcatccagacatctactgcattacagactttgcggaagaattagcagacacggtcgtctccatggcaactgaaattgcagcgatttgccttgacaactccagtggaaaacaaccctggttttgtgcatggaaaagagggagtgagtttctgatgacacccaacgtaccctgccgatccttgaagaggaagaaagagagccaggggagcgggaccgctgtgaggaaacacaagcctccccggctcagtgagatcaagaggaagacggacgagcaccctgagcttaaagaaaagctgatgaacagggttgtggatgagtccatgaaccttgaagatgtcccagattctgtcaatctttttgccaatgaagtggcagccaagatcatgaacctaacggagttctctatggtggacggcatgtggcaggcgcagggctatccccggaatcggttactgagtggcgacaggtggagccggctgaaggcctccagctgcgaaagcattcctgaggaagactccgaggccagggcctatgtcaacagcctgggcttaatgagcacgctgagccagccggtcagcagggccagctctgtctccaagcagtcgagctgtgagagcatcaccgatgagttttccaggttcatggtgaaccagatggaaaatgaagggagaggatttgagttactgctggattactatgctggcaagaacgccagcagcattctgaactcagccatgcaacaggcgtgccggaaaagtgaccacctcagtgtgaggcctagctgtccctctaagcagtccagcacagagagcatcactgaggagttctacaggtacatgctgagggacatcgaaagagacagcagagaaagtgcctcctccagacggagcagccaggattggacagccggcctgctgtctccttctctgcgatccccagtgtgccacagacagtcgtccatgccagacagcagatccccatgctccaggctgacagtgaatgtgcccatcaaagccaactctttagatggctttgctcagaactgcccacaagatttcctaagcgtgcagccggtcagtagcgcgtcctcatccggtctctgcaaatctgactcttgcttgtatcggagaggtgggactgaccacatcaccaacatgttaattcatgaaacgtgggctagctccattgaggctctcatgcgcaagaacaaaatcattgtggatgatgcagaggaagctgacactgagcctgtttctggtggctctccctcgcaagcagagaagtgtgcaaatagattagctgcgagcaggatgtgcagtgggccaactctgcttgttcaggagtctctcgattgcccgaggaaagactctgttaccgaatgtaaacagcccccagtgtcatctttgagcaaaactgcttctcttacaaaccacagccctttagattctaaaaaagaaacttcctcgtgccaggaccctgtaccaataaaccacaaaaggcgatcactttgctcgagggaagtgcctttgattcagattgaaacagatcagagagaagcctgtgctggggaacctgaacccttcctttccaaaagcagcctcctagaggaagcagaagggcattcgaatgacaaaaacatcccagatgtggtgagaggtggagacacagccgtgagcgcttgtcaaatccatagtgacagccttgataccagagatgtaccagaggctgaagcctccacagaagccagagcccccgatgaggcccccaaccctccaagcagcagcgaggagagcacaggcagctggacccagcttgccaatgaggaagacaacccagatgacacaagtagctttctccagctcagtgagcgatccatgagcaatggcaacagtagtgccactagcagtcttggcattatggatctggacatttatcaggaaagcatgccatcttctcccatgattaatgaattagtagaagaaaagaagattcttaaaggacagtcagaaagcacagaggcacctgcatctggaccgcctacgggaacagccagcccccagaggagcctgctggtgatcaactttgacctggagccagagtgtccagatgccgagctccgagccactctgcagtggatagctgcctctgaactggggattcccaccatctactttaagaaatctcaggaaaacagaattgaaaagtttctagatgtcgtgcagctggttcatcggaagtcctggaaagtgggtgatatcttccatgcagttgtccagtactgcaaaatgcatgaggagcagaaggatgggagactgagtctctttgactggctcttggaactgggataataaggcagtctgccgtatagatcattccttccctttattccaacttagattacagtggtttgttctaaatgctctaaacattctcaaaacatcacatcacattagcagaactataaaaaaaaatctgctactcagatccactgcatacagaataagtcagaggaaaagcaaaatataggtctgtccaaattcatacaacttgtgggtgagttccaaagagcttggattagaagggctggacaaagagagaattcaatggggcccaaattagaatgcttataatgagacccaatctccaggaaaacaacactcacataagtttaatcatataaaatgatttgtaatgtctctaattagatgaatcaactagaaacaaactcagtggtcaaaataatttttaagagtattccgtaacctatattttacttttctgattatattaaggggctgccagcccggagaaatacttaagatatgggtgagaaatccccagacttttatacaaaagatttccactttcaaatcaatgtcagtagacattgataaaagtatagcagcatcctctactgaggtgatttcatttattccctgcagcccactgataaatatctcacttctcccaaatagtatgtggactcccagctaagcagaaaactattgtcattcaactgaagaagaggaagataaaagattgtcttgtttccatcactgtattacttgtgtaacatgattacataattcttatcctaagagaaagctttcatatttaaaaaaaagtcttttcagataaaatctgcttgtgtcttgaataatatgaaatacaaactttcactttattttattgtaaattataaagagattattgtcttaaataatatattgagttagcttcaagcttcctaaaatatgaagagattgttgtctaaagtcacatattgacattgagctcagtggcctgtttcatcacgtatgtgctgctacctgtacagcagacatgccgctccagtgacatttataatgacagaagcagggtaatggtcttgtgtttgacatgatcagttaggatcatagactttccctgactcgtagatattagccttgaattgggggaaaagaagactttgacacattttagttattttaataacagagatttactcttttgaaaaataaaggtatctaatgtctccctaataagtcttctttccttccaactaaatgacctacacggacttttattttcttgatcaaagaggtgtttattaaggacttctggataactatacttttactctatttttaaagatcacaaagtaattttaaatgtgaacaggttcccataccatgaatgctggcctcaccttctctatcatccacattttgaaatgcaaagaaagctcccttgtaagccatacttccttccccactcccatcctaggatacttgcccagtgctcattaggcatttcttattcagatagtccaaatttaggttattatgcttaatttgacacattaactaaatgcccagttttaaaatatatccatcaattcacgctgaaatgtgcttctttgtgctatcaaatggaatagaatacacttattttttaaacaatcccagaatactgtgtgtagacttttgttgtgctcaaataaatgtttacttatcttacaaagctcaaatactggattgtaaccatgtgatgaagttatctatgttgtacctaacattgcaaattaatcaataaatctctgttgtcagattgtt

SEQ ID NO: 29842 - DNA, 1467 bp, Homo sapiens
  source 1..1467: mol_type = unassigned DNA
ggcaaacagcccgcccggcaccaccatgctcgccctggaggctgcacagctcgacgggccacacttcagctgtctgtacccagatggcgtcttctatgacctggacagctgcaagcattccagctaccctgattcagagggggctcctgactccctgtgggactggactgtggccccacctgtcccagccaccccctatgaagccttcgacccggcagcagccgcttttagccacccccaggctgcccagctctgctacgaaccccccacctacagccctgcagggaacctcgaactggcccccagcctggaggccccggggcctggcctccctgcataccccacggagaacttcgctagccagaccctggttcccccggcatatgccccgtaccccagccctgtgctatcagaggaggaagacttaccgttggacagccctgccctggaggtctcggacagcgagtcggatgaggccctcgtggctggccccgaggggaagggatccgaggcagggactcgcaagaagctgcgcctgtaccagttcctgctggggctactgacgcgcggggacatgcgtgagtgcgtgtggtgggtggagccaggcgccggcgtcttccagttctcctccaagcacaaggaactcctggcgcgccgctggggccagcagaaggggaaccgcaagcgcatgacctaccagaagctggcgcgcgccctccgaaactacgccaagaccggcgagatccgcaaggtcaagcgcaagctcacctaccagttcgacagcgcgctgctgcctgcagtccgccgggcctgagcacacccgaggctcccacctgcggagccgctgggggacctcacgtcccagccaggatccccctggaagaaaaagggcgtccccacactctaggtgataggacttacgcatccccaccttttggggtaaggggagtgctgccctgccataatccccaagcccagcccgggcctgtctgggattccccacttgtgcctggggtcctctgggatttctttgtcatgtacagactccctgggatcctcatgttttgggtgacaggacctatggaccactatactcggggaggcagggtagcagttcttccagaatcccaagagcttctctgggattttcttgtgatatctgattccccagtgaggcctgggacgtttttaagatcgctgtgtgtctgtaaaccctgaatctcatctggggtgggggccctgctggcaaccctgagccctgtccaaggttccctcttgtcagatctgagatttcctagttatgtctggggccctctgggagctgttatcatctcagatctcttcgcccatctatggctgtgttgtcacatctgtcccctcatttttgagatcccccaattctctggaactattctgctgcccctttttatgtgtctggagttccccaatcacatctagggctcctcc

SEQ ID NO: 29843 - DNA, 847 bp, Homo sapiens
  source 1..847: mol_type = unassigned DNA
aaacagcccgcccggcaccaccatgctcgccctggaggctgcacagctcgacgggccacacttcagctgtctgtacccagatggcgtcttctatgacctggacagctgcaagcattccagctaccctgattcagagggggctcctgaccctggttcccccggcatatgccccgtaccccagccctgtgctatcagaggaggaagacttaccgttggacagccctgccctggaggtctcggacagcgagtcggatgaggccctcgtggctggccccgaggggaagggatccgaggcagggactcgcaagaagctgcgcctgtaccagttcctgctggggctactgacgcgcggggacatgcgtgagtgcgtgtggtgggtggagccaggcgccggcgtcttccagttctcctccaagcacaaggaactcctggcgcgccgctggggccagcagaaggggaaccgcaagcgcatgacctaccagaagctggcgcgcgccctccgaaactacgccaagaccggcgagatccgcaaggtcaagcgcaagctcacctaccagttcgacagcgcgctgctgcctgcagtccgccgggcctgagcacacccgaggctcccacctgcggagccgctgggggacctcacgtcccagccaggatccccctggaagaaaaagggcgtccccacactctaggtgataggacttacgcatccccaccttttggggtaaggggagtgctgccctgccataatccccaagcccagcccgggcctgtctgggattccccacttgtgcctggggtcctctgggatttctttgtcatgtacagactccctgggatcctcatgttt

SEQ ID NO: 29844 - DNA, 993 bp, Homo sapiens
  source 1..993: mol_type = unassigned DNA
cagaattgtcaatttattaatgaaatatgacgtgtgttgaacaagacaagctgggtcaagcatttgaagatgcttttgaggttctgaggcaacattcaactggagatcttcagtactcgccagattacagaaattacctggctttaatcaaccatcgtcctcatgtcaaaggaaattccagctgctatggagtgttgcctacagaggagcctgtctataattggagaacggtaattaacagtgctgcggacttctattttgaaggaaatattcatcaatctctgcagaacataactgaaaaccagctggtacaacccactcttctccagcaaaaggggggaaaaggcaggaagaagctccgactgtttgaataccttcacgaatccctgtataatccggagatggcatcttgtattcagtgggtagataaaaccaaaggcatctttcagtttgtatcaaaaaacaaagaaaaacttgccgagctttgggggaaaagaaaaggcaacaggaagaccatgacttaccagaaaatggccagggcactcagaaattacggaagaagtggggaaattaccaaaatccggaggaagctgacttaccagttcagtgaggccattctccaaagactctctccatcctatttcctggggaaagagatcttctattcacagtgtgttcaacctgatcaagaatatctcagtttaaataactggaatgcaaattataattatacatatgccaattaccatgagctaaatcaccatgattgctaaatatactttcatatttcatggtttactggcatcggaaatctctacaagttttaatgatttctccctccctctctttttttcctcctctgaagaaatttaggatttttctcttaaagcaaatactaaagaggaaaaaaaattaactttattgttgcttttatcaaagagtatgtaatctatactaacttgttgggaaattctgccaatgaacaactttttt

SEQ ID NO: 29845 - DNA, 1132 bp, Homo sapiens
  source 1..1132: mol_type = unassigned DNA
ttattttcatgatagcctaccgttgaatttaccgttctgatattaatgaaacatctctataaagggttgaagtgtcttcccggattgtcaacttattttattttattttcttcaagcaacaattgctaaggaacagaattgtcaatttattaatgaaatatgacgtgtgttgaacaagacaagctgggtcaagcatttgaagatgcttttgaggttctgaggcaacattcaactggagatcttcagtactcgccagattacagaaattacctggctttaatcaaccatcgtcctcatgtcaaaggaaattccagctgctatggagtgttgcctacagaggagcctgtctataattggagaacggtaattaacagtgctgcggacttctattttgaaggaaatattcatcaatctctgcagaacataactgaaaaccagctggtacaacccactcttctccagcaaaaggggggaaaaggcaggaagaagctccgactgtttgaataccttcacgaatccctgtataatccggagatggcatcttgtattcagtgggtagataaaaccaaaggcatctttcagtttgtatcaaaaaacaaagaaaaacttgccgagctttgggggaaaagaaaaggcaacaggaagaccatgacttaccagaaaatggccagggcactcagaaattacggaagaagtggggaaattaccaaaatccggaggaagctgacttaccagttcagtgaggccattctccaaagactctctccatcctatttcctggggaaagagatcttctattcacagtgtgttcaacctgatcaagaatatctcagtttaaataactggaatgcaaattataattatacatatgccaattaccatgagctaaatcaccatgattgctaaatatactttcatatttcatggtttactggcatcggaaatctctacaagttttaatgatttctccctccctctctttttttcctcctctgaagaaatttaggatttttctcttaaagcaaatactaaagaggaaaaaaaattaactttattgttgcttttatcaaagagtatgtaatctatactaacttgttgggaaattctgccaatgaacaacttttttataata

SEQ ID NO: 29846 - DNA, 5417 bp, Homo sapiens
  source 1..5417: mol_type = unassigned DNA
aacctgtggcgcgctccgcggttccggcgcctgaagttttagctgcggtggcggcggcagtcgggaccgactgcaaggcaggttgagatgatggatctgaggcttgcagctcgcagtcccaacgagccttagggaccagggctaccaaaagggtggggagaacggtggtggcatctgtctgttgcctgggatccaggcgcccggttggggaatccttacttcaggaagcgcagccgcggctctgtgttttgagagtgcaaatgtcatttgtcagagtgaaccgctgtggtccccgagttggtgtaagaaagacaccgaaagtaaagaagaagaaaacttcagtgaaacaagaatgggataataccgtgactgatctaaccgttcatcgggcaactcccgaagatctggtacgccgtcatgaaatacacaaatcgaagaatagagcattagtacactgggaactccaagaaaaagctttgaagagaaaatggaggaagcagaaaccagaaactttaaatcttgagaaaagaagattgtctatcatgaaggagattctttctgatcaataccagatgcaagatgtgttggagaaatctgatcatctaatagctgcagcaaaagagctgtttcctcgtaggcgcacagggtttccaaatgtaacagtggctcctgattcctctcagggtcccattgtggtaaatcaagaccctatcacccaatctatctttaatgagtctgtcatagaacctcaggctcttaatgatgtagatggtgaagaagaaggaactgttaatagccagtcaggagaaagtgagaatgagaatgagttggataactctctaaactctcagtctaacacgaatacagacaggtttctccaacaactaacagaagagaattttgagttaattagtaagttgtggactgacattcagcagaaaatagcaacccagtcacaaataactcctccaggaacgccatcatctgctctttcatcaggggagcaaagagctgctctgaatgctaccaatgctgtcaagagactccaaaccaggcttcagcctgaagaatctactgagactctagactcaagctacgttgtgggacacgtgctgaactcaaggaagcaaaaacagctgttaaataaagtgaaaaggaaaccgaatttgcatgctctttccaagccgaagaaaaacatatcatcaggtagcacaacctctgcagacttaccaaataggactaattccaacctggatgtcctcaaacacatgatacatgaagtggaacatgaaatggaagaatatgagcggtggacaggtcgcgaggtcaagggtctgcagagcagtcagggtcttacaggcttcactttgtcgctggtgagctccctctgtcgcctggttcggtaccttaaagagagtgagatccagctacgtaaagaagtagagacaaggcaacaactggaacaagtattaggtgatcatcgagagctcattgatgctctgacagctgaaattcttcgtcttagagaagaaaacgctgctacacaggcaagacttcagcagtacatggtcacaacagatgagcaactgatatcactcacacatgctattaagaactgtcctgtgataaataacagacaagaaattcaggcatcagaaagcggagccacaggtagaagagttatggacagtccagagcgtccagttgtaaatgccaatgtctcagtgccattgatgttcagagaggaagtggctgaattcccacaggaagagttgcccgttaaactgtctcaggtgccagaccctccagataacatgaatctggccaagaattttccagcacatatttttgagccagctgtgttgttaacaccacccaggcagaagagcaacttaaaattctctcctcttcaggacgtattgagaaggactgttcaaactcgtcctgctccacgacttcctccaactgtggaaataattgagaaggaacaaaattgggaagagaagaccttacctattgatacagacattcagaattcaagtgaagagaatcgtctcttcactcagagatggagagtctctcacatgggagaagatttggagaacaaaactcaggctccttttgttaacctctcacagcccctctgcaattcccattccaacactcaacagtcaagaagccccacattctcagaagagctcccagtactgggagatgggcagcagctgagaacaaatgagtcattaatacaaagaaaggacataatgacacgaattgctgatttgacattgcagaattcagctatcaaggcacatatgaataatattattgagcccagaggagagcaaggggatggactccgggagttgaacaaacaagaaagtgcaagtgacatgacttctacttttccagtagcacagtctctaacaccaggtagtatggaggaacggattgcagaattgaatcgacaaagtatggaggctcgtggaaaactactgcagttgatagagcagcagaaacttgttggtttgaatctttctccaccaatgtcacctgttcagttacctctcagagcatggactgaaggagcaaagaggacaattgaggtatctattccaggagcagaagccccagaaagctcaaaatgtagtactgtctctcccgtcagcgggataaatacaagaagatcttccggggctactggtaattcttgttctccactaaatgccacctcaggaagtgggagattcacacctcttaatccaagagcaaagattgagaaacagaatgaagaaggctggtttgctctttctacccatgtatcataagtgaagtcaagtctcactgagtttgttcttaataatttattacttccctttccctgctctgacttttaagtttttatatccttctttcagataaaacctacaaagatcctgtgaattagtactaatgaaacagagaaataaagcaattattttttgactttctcaaataagttttcaacaaccaactgacctacagctccctgtgaatgaaactttgactgtagagaagttaaagttttgtattttaatactttcttaagtattttaagggttttttttattaatacatttttacctttatctttattcagggttttttgaggtttagtatatcttagttgatccatttatttatttattttcctgaagaactaatttgctttgcatgtaacttacaataaaattcctctgtgtgattagagtctggctttcaggaatatgtaacacccacttttctttcttttttcttgggaagtcattgctgttcatcactttttccatcaagtgaaatatacagccttaaaaacaataggcctgggagtgtttgtttatatttgcttaagcaggtaagagtggttgcatttattataaaatcttatgtagtttttaaatgtgaaaatgtcatcaataatggtaatgcaaatcaaataaatatgattctagagctcaaatgcctaaatgtggtaacattgatttaatggtatatttaatgcttcaaacaattaaatagaaaaagttgctattaattttcccagccctgaatttaagcagatctttcagggtagatttctcttttttttttttttttgagacagagtcttgctttattgcccaggctggagtgcagttgtataatctggttcactgccacctcagtctcctgggttcaagcaatcctcttacctcagcctcctgagtagctaggattataggttcatgccaccacgcccagctaatttgtgtattttcagtagagacggggtttcaccatgttggccaggctgatctcgaactcctgacctcaaatgatccacctgccttggtttcccaaagtgccgggattacaggtgtgagccactgcacccggctcaggatagatttttcagggtacccttttggttctgagatgtttatttctattttaaacttgttttttgaatgatctctgctccctggctctatgataggaattctcaacctgagtgaacaattcaaactgagattacttgtgtttagactcatatattttgataacatatgacttctccagtatgccccagaaagctgctaataacttgctcaacctgaaatttacagttttccaaattacaggttggcagagatactggattgataacaacatccacagttatcatataatcattcttatgctgtaaacaaaattattttggttagcagaatttaataattaactgttaactacatactaggcaatattgtagccactttatgtgcttcatgacaccttatgggataggtactattatcctcattttgcagatgaggaaactgaggtacaaggaggtattttctcaaggtcacacaactagggagtggtggcattagaatgggaacataggcagtctttctccaaagcctatgctgtgctgcctcttgttggagagtaaacctgttttacagtgtgtgtagtatggaagcagcataataataagaatagctgttccttattgagccattactgtggcagacaccgtactataagctgtggtatcaccattatctcatttgaatctcatagtagacctatcagttagaggtatgtaaatgcttcctcctctcccagcacctttacagatgaggatgctgagccctagaggtgaagaaagttgtctaatgacagagtgcttgtaagaggtaaagccaagacttgaagctctttcttgcagttactggatttctcctaatttacgggaactaatacagtacagtagctaaggatgcaagtactgaaaccagaaatcttgcctcaaatgccatttctgccacttgagctgtgtactttggacaaattaatctaatctttcccatttgaaagtcagacataatgtcttccctagaggcttgtgaggattaagtgaggcaagtgtatgtaaatgggctgagatcagagcttggctcacaacactcagtaatgatcactgccaattttttttggtatataaataaataaatacactatttcccccatgtttccaatttttaagacattgtatagtgaatttattgtatctttctcagattaacaattgcacacagtgcttgaaatttagaggtatttcacctgaaaagatgtctagagattgaaagaaaacatgctgggcatatgatttgaaaatataaataacatgctatttaaaaataagtttaccctatgttttctatcttttctggcacctagatataccatttaataagtaatagcaaggataatcatttttttaagccctggaaaatcttgattaaagaggacatttcagtattgcaaataaatgcatggtatttgtgtaacattgtggaaactaataaacacaaattgtattatagcaa

SEQ ID NO: 29847 - DNA, 590 bp, Homo sapiens
  source 1..590: mol_type = unassigned DNA
aggcaacagcccggaagccgctggctgggttaacctgtggcgcgctccgcggttccggcgcctgaagttttagctgcggtggcggcggcagtcgggaccgactgcaagatgtcatttgtcagagtgaaccgctgtggtccccgagttggtgtaagaaagacaccgaaagtaaagaagaagaaaacttcagtgaaacaagaatgggataataccgtgactgatctaaccgttcatcgggcaactcccgaagatctggtacgccgtcatgaaatacacaaatcgaagaatagagcattagtacactgggaactccaagaaaaagctttgaagagaaaatggaggaagcagaaaccagaaactttaaatcttgagaaaagaagattgtctatcatgaaggagattctttctgatcaataccagatgcaagatgtgttggagaaatctgatcatctaatagctgcagcaaaagagctgtttcctcgtaggcgcacagggtttccaaatgtaacagtggctcctgattcctctcagggtcccattgtggtaaatcaagaccctatcacccaatctatctttaatgagtctgtcat

SEQ ID NO: 29848 - DNA, 568 bp, Homo sapiens
  source 1..568: mol_type = unassigned DNA
tcgagtatgcgcgtgcgcaccgctttcgggagcttttgcacagagctgatgtcatttgtcagagtgaaccgctgtggtccccgagttggtgtaagaaagacaccgaaagtaaagaagaagaaaacttcagtgaaacaagaatgggataataccgtgactgatctaaccgttcatcgggcaactcccgaagatctggtacgccgtcatgaaatacacaaatcgaagaatagagcattagtacactgggaactccaagaaaaagctttgaagagaaaatggaggaagcagaaaccagaaactttaaatcttgagaaaagaagattgtctatcatgaaggagattctttctgatcaataccagatgcaagatgtgttggagaaatctgatcatctaatagctgcagcaaaagagctgtttcctcgtaggcgcacagggtttccaaatgtaacagtggctcctgattcctctcagggtcccattgtggtaaatcaagaccctatcacccaatctatctttaatgagtctgtcatagaacctcaggctcttaatgatgtagatggtgaagaag

SEQ ID NO: 29849 - DNA, 556 bp, Homo sapiens
  source 1..556: mol_type = unassigned DNA
gagagtgcaagtacgtgtcagggtgcgtgtctgggtatgtttgtgcgtggcgccagagcacctcgagtatgcgcgtgcgcaccgctttcgggagcttttgcacagagctggtaattgggggtgctcgattgtagcgttgggggagttcaccgtgtagcaggagagaggcaaactatccagggtgctttgggaccgggagcgtcatttaaatcgatggatgtcagaggggcttctcagaaggctcctcctgtgagttttgaggagtccgtggaagttaacccagtagagaagagagtgagcctaatgagtgttccaagcagagggaaaagaatggttgcaactgtgtgtgaggcgagagcttggttttaggatttgcgggagatgtgagagaacactggaaagaaaagtcagccgggccatatgggggagagggtctgaatgccaagctgagttggattgcttttgacagtggggagccatccgaatctagaggaagtagatgtcatttgtcagagtgaaccgctgtggtccccgagttggtgtaagaaagacaccg

SEQ ID NO: 29850 - DNA, 4484 bp, Homo sapiens
  source 1..4484: mol_type = unassigned DNA
tccgcggcgagggagcgggggcggggaggcgccgtctggctcaggctggggccggcgggagcgcgaacgagcgacggcggaacccgtgggcctgtggactgcagcctcggcggtcagcagagtgcttgtgatttcacgtatttttgctgaactcgtaaaagagacacttggatggtggattaaccagaacactaacattctgtgaaaagtttcaaattggagaatattgaattttcaccctagtccagcagctccgctgctcacttaaatacagatgaatgaagaccccattcggaaagacacctggccagcggtccagagctgatgcaggccatgctggagtatctgccaacatgatgaagaagaggacatcccacaaaaaacatcggagcagtgtgggtccgagcaaacctgtttcccagccccggcggaacatcgtaggctgcaggattcagcatgggtggaaagaggggaatggccctgttacccagtggaaaggaaccgttctggaccaggtgcctgtaaatccttctttgtatcttataaaatacgatggatttgactgtgtttatggactagaacttaataaagatgaaagagtttctgcgcttgaagtcctccctgatagagttgcgacatctcgaatcagcgatgcacacttggcagacacaatgattggcaaagcagtggaacatatgtttgagacagaggatggttctaaagatgagtggaggggaatggtcttagcacgtgcacctgtcatgaacacatggttttacattacctatgagaaagaccctgtcttgtacatgtaccaactcttagatgattacaaagaaggcgaccttcgcattatgcctgattccaatgattcacctccagcagaaagggaaccaggagaagttgtggacagcctggtaggcaaacaagtggaatatgccaaagaagatggctcgaaaaggactggcatggtcattcatcaagtagaagccaagccctccgtctatttcatcaagtttgatgatgatttccatatttatgtctacgatttggtgaaaacatcctagatgtcatcacaaactctgccaaatttgtggaactatgaaatgtattatttgtagacataaagacttgattgctttccagtttaatgaaagcttaaatgtccctgcgaacccacaatctctgccagcagaactggttttgttctgaatagtacagattgatgtgaacacaaagcattttgtgtaaggagaacccctttcttttaaaagaagtctgtctatttcgaggggagttacaggcaagtttggtaaaagttaagctagtatcatagtcatttaaaattgtaatagatcttaaccattttccccctcaccctaactctcttattctgccgccacaatgcaagcatagtttgatgttttcgttattgccttttttgagatgtatgtatctgtatctacctatatctatatgtgtgtatacatatataatatatacacacagatacaagtgtacacacacacaccacacaccacacacaccccactggcagtctttgtggattaggatgggggtgacataattttcttgagtttaacaggagtgctttacccaagtcagtcatggatatgatatcactgctctttatttaaaagtaaactttgggcacaggaaccatatgggaacattcagcttgtttaaaaaaaaaaaatcagaagttcagagcaccttttcaatctggagcccttaaaccataagtccaaatatgaattatttgtgaacagttaatgacccatattagaattttacaatctggtgaacaatctgggtaaaaggctacctttaattctaagcttcatttttttttgggggggggttacattttaatcataaattcttttttgcaaagcccaggttcttgttccacacagtgtaatgtaggtgtattttggacagcacatatggtccattgtgtacaagtcagtaatctggatttcagtacatggatttaaaaggcaacaatccatcactggtttgtgtgtttttggttaagtttctggaagaatacaatgcttttatattggaagtataagttttgagtggcattgttgccttctaacaagctctctgggacttttaaagttttattactattattgctaatgtatgattatggtcagagactttcaacccaccccttcctgcctacccctggcttttcctcacaaagaatgtctagacaaacagcagcttagtctcctgacacctcttgtggggtgcatgttcctgctccaggtatgctgttcatgtggattcattccattcagtggccccttggggtttgcatgccagtgaagcgttaccatagaagagccagccgtttgtgttcgcttggtaggtgtaagtaatagcagcccttagccacggagtctttatgtggtttattcctgcaaggttgttttaaactgaaatagaactgctagtgtgattggttgatcagcaaaacagctgctctcattttgttttggaggaaccctggtggtttgacagccaggagaaaggccatatgtgaaaccagtctcttgtggagattggaaatcctccctgatatttgggcagagcctaaacgtgcatgcttgtcactcaaacaccagaagtttgaatcagaggtctgagtgacctcttttgtggctgttcttgatggtttccaggcctcgttatgcatggtttgcttgatgcccattttttgtgccttgtgctgttggatggtaacgaccactcaccatgtaaacacagtacctcagttttctgtccacagctgcagtcgctctgtccctcgtgcttcactgtgggcagccagggacaagcttctgaaagcagtgtgatacccaagtcataggtgcttctcgtatgtgaacaggtgtcattctacagatctgttatgtgttttcctgttgactcttaagagtccctgcatgtaaatctcaaagctgagcctggctcccagagtccagactgacattacagcgcaagagtttgcaagtgtgtccagcatgcaccaactgtgcagaacttggctcggtaactttgcgtggaaaaataaagtacattttgaagtatcttgagggttgggtcaattgagacatttctagcattacttaatgacttgcattgtggtttttctgcaagcaactttaatgactttttttataccacatggtctcccagtttctagatgaatgcaacatgatgatggtgatgatgacgatgagtttaatcattgttcatttattgcctttagggctgagggaaagggaaggtttgtttttttttctccccattttcccccattctgtctttcttttggtgacttacaccacatgtaatgacgctatgactaattctgctcccaagcccttgtatcttgggcttcattttaggctcatgtgtcagatctgcatgcattgcttgcatttttctggtatctgaatgttggttccttgttccaggaattcaacattaatttccaaaagtatcatgggacttgtgacaatacaagacatgaatctatgtataaaatttatcggcctttctcatttacctgctctagtattattgtattgtgtgtgcgtgcgtgtgtgatgtcaggctgccacgtaaaacttcagagaaaaatcttaaaagcagaccatccttttttgcatgctctattctaagtagaatgttcaatgtaactgactaaaattgcatgttaaagatatttaggtttttttgttttctttatttttatttgttttcagtttcctgtatatttgcttactgtgccgttttagtggttttaggataaaaatgcactggtgaagcaaatgtagtgccaacagaaggtgattttccagttgtaaatgtcatgcagcatttgaagggactgtgttttcttaaaaaaaaatcacagttacttctaaaccagatttcatttcttttattgttttatgtgccaaaccacgaagtgcattgggcttcaatctctgaacactgtagacccattagaagactgttccgattgttacaaattgtagtgcctgaaaacactcttaagctgattgtcttaacaaaatgaaagttctccaaagacaaaacagaacaattattataacaaaataattatggttgaaatgtctgtggttccttggaaatgctgcgctctttgtgtttttccatcattagtgcagttggaatgaatgtgtataggtcagaggtcttcgtgttcacattttaaaattaggtaaatgacctcatctttcaagcttgaattcatttttaattttaattttattttatacaatgtgtagacagttccctgttctctgcatttagaagtatacacaatataaatctgttaattctgtaagtaatttttataattatgatgtaactctatcttatccttaaaacatttaaaataaaccctttatgtgcaa

SEQ ID NO: 29851 - DNA, 2082 bp, Homo sapiens
  source 1..2082: mol_type = unassigned DNA
gagcgggggcggggaggcgccgtctggctcaggctggggccggcgggagcgcgaacgagcgacggcggaacccgtgggcctgtggactgcagcctcggcggtcagcagcaatgaggtcttactgtgtagcccaggctgctctggaactcctggactcaagtgatcttcctaccttggtcttccaaagtgttgggattacagatggagtttcgctcttgttgcccaggctggagtgtagtagcatgatctcggctcactgcaacctccgcctcctgagttcaagtgattctcctgcctcagcctcccgagtatctgggattacaggaagtttatctcgacaatgctagttgcagtctgtgtgaccctgaccaagttattttaatgtctgtgctgcagtttttcagtttccaagatggaatagttatagtgcatatcttcctcatggttgtgaggagtgcatgacacatagcgagtgctcagtgaacagtcatttttctgagtgcttgtgatttcacgtatttttgctgaactcgtaaaagagacacttggatggtggattaaccagaacactaacattctgtgaaaagtttcaaattggagaatattgaattttcaccctagtccagcagctccgctgctcacttaaatacagatgaatgaagaccccattcggaaagacacctggccagcggtccagagctgatgcaggccatgctggagtatctgccaacatgatgaagaagaggacatcccacaaaaaacatcggagcagtgtgggtccgagcaaacctgtttcccagccccggcggaacatcgtaggctgcaggattcagcatgggtggaaagaggggaatggccctgttacccagtggaaaggaaccgttctggaccaggtgcctgtaaatccttctttgtatcttataaaatacgatggatttgactgtgtttatggactagaacttaataaagatgaaagagtttctgcgcttgaagtcctccctgatagagttgcgacatctcgaatcagcgatgcacacttggcagacacaatgattggcaaagcagtggaacatatgtttgagacagaggatggttctaaagatgagtggaggggaatggtcttagcacgtgcacctgtcatgaacacatggttttacattacctatgagaaagaccctgtcttgtacatgtaccaactcttagatgattacaaagaaggcgaccttcgcattatgcctgattccaatgattcacctccagcagaaagggaaccaggagaagttgtggacagcctggtaggcaaacaagtggaatatgccaaagaagatggctcgaaaaggactggcatggtcattcatcaagtagaagccaagccctccgtctatttcatcaagtttgatgatgatttccatatttatgtctacgatttggtgaaaacatcctagatgtcatcacaaactctgccaaatttgtggaactatgaaatgtattatttgtagacataaagacttgattgctttccagtttaatgaaagcttaaatgtccctgcgaacccacaatctctgccagcagaactggttttgttctgaatagtacagattgatgtgaacacaaagcattttgtgtaaggagaacccctttcttttaaaagaagtctgtctatttcgaggggagttacaggcaagtttggtaaaagttaagctagtatcatagtcatttaaaattgtaatagatcttaaccattttccccctcaccctaactctcttattctgccgccacaatgcaagcatagtttgatgttttcgttattgccttttttgagatgtatgtatctgtatctacctatatctatatgtgtgtatacatatataatatatacacacagatacaagtgtacacacacacaccacacaccacacacaccccactggcagtctttgtggattaggatgggggtgacataattttcttgagtttaacaggagtgctttacccaagtcagtcatggatatgatatcactgctctttatttaaaagtaaactttgggcacaggaaccatatgggaacattcagcttgtt

SEQ ID NO: 29852 - DNA, 2213 bp, Homo sapiens
  source 1..2213: mol_type = unassigned DNA
gtcacatgaccggctttaagcaacatggcggctgccgtggtgcagcgcccgggctgagcgacagcaagtgcagcgggctcctaccccgggtgaggggtggcctccgcgtgggatcgtgccctcttcagcccgctcctgtccccgacatcacgtgtattccgcacgtcccctccgcgctgtgtgtctactgagacggggaggcgtgacagggcccgggtcccttctcagtggtgctctgtgcttcagggcaagctccccgtctccgggcgcacttccctcgcctgtgttcggtccatcctcctttctccagcctcctcccctcgcaggtgggatcgtcggtgggaccggagcgcgggcgggcgcggccccccgggaccatggccgggtccgacaccgcgcccttcctcagccaggcggatgacccggacgacgggccagtgcctggcaccccggggttgccagggtccacggggaacccgaagtccgaggagcccgaggtcccggaccaggaggggctgcagcgcatcaccggcctgtctcccggccgttcggctctcatagtggcggtgctgtgctacatcaatctcctgaactacatggaccgcttcaccgtggctggcgtccttcccgacatcgagcagttcttcaacatcggggacagtagctctgggctcatccagaccgtgttcatctccagttacatggtgttggcacctgtgtttggctacctgggtgacaggtacaatcggaagtatctcatgtgcgggggcattgccttctggtccctggtgacactggggtcatccttcatccccggagagcatttctggctgctcctcctgacccggggcctggtgggggtcggggaggccagttattccaccatcgcgcccactctcattgccgacctctttgtggccgaccagcggagccggatgctcagcatcttctactttgccattccggtgggcagtggtctgggctacattgcaggctccaaagtgaaggatatggctggagactggcactgggctctgagggtgacaccgggtctaggagtggtggccgttctgctgctgttcctggtagtgcgggagccgccaaggggagccgtggagcgccactcagatttgccacccctgaaccccacctcgtggtgggcagatctgagggctctggcaagaaatcctagtttcgtcctgtcttccctgggcttcactgctgtggcctttgtcacgggctccctggctctgtgggctccggcattcctgctgcgttcccgcgtggtccttggggagaccccaccctgccttcccggagactcctgctcttcctctgacagtctcatctttggactcatcacctgcctgaccggagtcctgggtgtgggcctgggtgtggagatcagccgccggctccgccactccaacccccgggctgatcccctggtctgtgccactggcctcctgggctctgcacccttcctcttcctgtcccttgcctgcgcccgtggtagcatcgtggccacttatattttcatcttcattggagagaccctcctgtccatgaactgggccatcgtggccgacattctgctgtacgtggtgatccctacccgacgctccaccgccgaggccttccagatcgtgctgtcccacctgctgggtgatgctgggagcccctacctcattggcctgatctctgaccgcctgcgccggaactggcccccctccttcttgtccgagttccgggctctgcagttctcgctcatgctctgcgcgtttgttggggcactgggcggcgcagccttcctgggcaccgccatcttcattgaggccgaccgccggcgggcacagctgcacgtgcagggcctgctgcacgaagcagggtccacagacgaccggattgtggtgccccagcggggccgctccacccgcgtgcccgtggccagtgtgctcatctgagaggctgccgctcacctacctgcacatctgccacagctggccctgggcccaccccacgaagggcctgggcctaaccccttggcctggcccagcttccagagggaccctgggccgtgtgccagctcccagacactacctgggtagctcaggggaggaggtgggggtccaggagggggatccctctccacaggggcagccccaagggctcggtgctatttgtaacggaataaaatttgtagccagacccca

SEQ ID NO: 29853 - DNA, 2125 bp, Homo sapiens
  source 1..2125: mol_type = unassigned DNA
gtcacatgaccggctttaagcaacatggcggctgccgtggtgcagcgcccgggctgagcgacagcaagtgcagcgggctcctaccccgggtgaggggtggcctccgcgtgggatcgtgccctcttcagcccgctcctgtccccgacatcacgtgtattccgcacgtcccctccgcgctgtgtgtctactgagacggggaggcgtgacagggcccgggtcccttctcagtggtgctctgtgcttcagggcaagctccccgtctccgggcgcacttccctcgcctgtgttcggtccatcctcctttctccagcctcctcccctcgcaggcggatgacccggacgacgggccagtgcctggcaccccggggttgccagggtccacggggaacccgaagtccgaggagcccgaggtcccggaccaggaggggctgcagcgcatcaccggcctgtctcccggccgttcggctctcatagtggcggtgctgtgctacatcaatctcctgaactacatggaccgcttcaccgtggctggcgtccttcccgacatcgagcagttcttcaacatcggggacagtagctctgggctcatccagaccgtgttcatctccagttacatggtgttggcacctgtgtttggctacctgggtgacaggtacaatcggaagtatctcatgtgcgggggcattgccttctggtccctggtgacactggggtcatccttcatccccggagagcatttctggctgctcctcctgacccggggcctggtgggggtcggggaggccagttattccaccatcgcgcccactctcattgccgacctctttgtggccgaccagcggagccggatgctcagcatcttctactttgccattccggtgggcagtggtctgggctacattgcaggctccaaagtgaaggatatggctggagactggcactgggctctgagggtgacaccgggtctaggagtggtggccgttctgctgctgttcctggtagtgcgggagccgccaaggggagccgtggagcgccactcagatttgccacccctgaaccccacctcgtggtgggcagatctgagggctctggcaagaaatcctagtttcgtcctgtcttccctgggcttcactgctgtggcctttgtcacgggctccctggctctgtgggctccggcattcctgctgcgttcccgcgtggtccttggggagaccccaccctgccttcccggagactcctgctcttcctctgacagtctcatctttggactcatcacctgcctgaccggagtcctgggtgtgggcctgggtgtggagatcagccgccggctccgccactccaacccccgggctgatcccctggtctgtgccactggcctcctgggctctgcacccttcctcttcctgtcccttgcctgcgcccgtggtagcatcgtggccacttatattttcatcttcattggagagaccctcctgtccatgaactgggccatcgtggccgacattctgctgtacgtggtgatccctacccgacgctccaccgccgaggccttccagatcgtgctgtcccacctgctgggtgatgctgggagcccctacctcattggcctgatctctgaccgcctgcgccggaactggcccccctccttcttgtccgagttccgggctctgcagttctcgctcatgctctgcgcgtttgttggggcactgggcggcgcagccttcctgggcaccgccatcttcattgaggccgaccgccggcgggcacagctgcacgtgcagggcctgctgcacgaagcagggtccacagacgaccggattgtggtgccccagcggggccgctccacccgcgtgcccgtggccagtgtgctcatctgagaggctgccgctcacctacctgcacatctgccacagctggccctgggcccaccccacgaagggcctgggcctaaccccttggcctggcccagcttccagagggaccctgggccgtgtgccagctcccagacactacctgggtagctcaggggaggaggtgggggtccaggagggggatccctctccacaggggcagccccaagggctcggtgctatttgtaacggaataaaatttgtagccagacccc

SEQ ID NO: 29854 - DNA, 2056 bp, Homo sapiens
  source 1..2056: mol_type = unassigned DNA
gtcacatgaccggctttaagcaacatggcggctgccgtggtgcagcgcccgggctgagcgacagcaagtgcagcgggctcctaccccgggtgaggggtggcctccgcgtgggatcgtgccctcttcagcccgctcctgtccccgacatcacgtgtattccgcacgtcccctccgcgctgtgtgtctactgagacggggaggcgtgacagggcccgggtcccttctcagtggtgctctgtgcttcagggcaagctccccgtctccgggcgcacttccctcgcctgtgttcggtccatcctcctttctccagcctcctcccctcgcaggtgggatcgtcggtgggaccggagcgcgggcgggcgcggccccccgggaccatggccgggtccgacaccgcgcccttcctcagccaggcggatgacccggacgacgggccagtgcctggcaccccggggttgccagggtccacggggaacccgaagtccgaggagcccgaggtcccggaccaggaggggctgcagcgcatcaccggcctgtctcccggccgttcggctctcatagtggcggtgctgtgctacatcaatctcctgaactacatggaccgcttcaccgtggctggcgtccttcccgacatcgagcagttcttcaacatcggggacagtagctctgggctcatccagaccgtgttcatctccagttacatggtgttggcacctgtgtttggctacctgggtgacaggtacaatcggaagtatctcatgtgcgggggcattgccttctggtccctggtgacactggggtcatccttcatccccggagagcatttctggctgctcctcctgacccggggcctggtgggggtcggggaggccagttattccaccatcgcgcccactctcattgccgacctctttgtggccgaccagcggagccggatgctcagcatcttctactttgccattccggtgggcagtggtctgggctacattgcaggctccaaagtgaaggatatggctggagactggcactgggctctgagggtgacaccgggtctaggagtggtggccgttctgctgctgttcctggtagtgcgggagccgccaaggggagccgtggagcgccactcagatttgccacccctgaaccccacctcgtggtgggcagatctgagggctctggcaagaaatctcatctttggactcatcacctgcctgaccggagtcctgggtgtgggcctgggtgtggagatcagccgccggctccgccactccaacccccgggctgatcccctggtctgtgccactggcctcctgggctctgcacccttcctcttcctgtcccttgcctgcgcccgtggtagcatcgtggccacttatattttcatcttcattggagagaccctcctgtccatgaactgggccatcgtggccgacattctgctgtacgtggtgatccctacccgacgctccaccgccgaggccttccagatcgtgctgtcccacctgctgggtgatgctgggagcccctacctcattggcctgatctctgaccgcctgcgccggaactggcccccctccttcttgtccgagttccgggctctgcagttctcgctcatgctctgcgcgtttgttggggcactgggcggcgcagccttcctgggcaccgccatcttcattgaggccgaccgccggcgggcacagctgcacgtgcagggcctgctgcacgaagcagggtccacagacgaccggattgtggtgccccagcggggccgctccacccgcgtgcccgtggccagtgtgctcatctgagaggctgccgctcacctacctgcacatctgccacagctggccctgggcccaccccacgaagggcctgggcctaaccccttggcctggcccagcttccagagggaccctgggccgtgtgccagctcccagacactacctgggtagctcaggggaggaggtgggggtccaggagggggatccctctccacaggggcagccccaagggctcggtgctatttgtaacggaataaaatttgtagccagacccc

SEQ ID NO: 29855 - DNA, 1990 bp, Homo sapiens
  source 1..1990: mol_type = unassigned DNA
gtcacatgaccggctttaagcaacatggcggctgccgtggtgcagcgcccgggctgagcgacagcaagtgcagcgggctcctaccccgggtgaggggtggcctccgcgtgggatcgtgccctcttcagcccgctcctgtccccgacatcacgtgtattccgcacgtcccctccgcgctgtgtgtctactgagacggggaggcgtgacagggcccgggtcccttctcagtggtgctctgtgcttcagggcaagctccccgtctccgggcgcacttccctcgcctgtgttcggtccatcctcctttctccagcctcctcccctcgcaggtgggatcgtcggtgggaccggagcgcgggcgggcgcggccccccgggaccatggccgggtccgacaccgcgcccttcctcagccaggcggatgacccggacgacgggccagtgcctggcaccccggggttgccagggtccacggggaacccgaagtccgaggagcccgaggtcccggaccaggaggggctgcagcgcatcaccggcctgtctcccggccgttcggctctcatagtggcggtgctgtgctacatcaatctcctgaactacatggaccgcttcaccgtggctgtgttcatctccagttacatggtgttggcacctgtgtttggctacctgggtgacaggtacaatcggaagtatctcatgtgcgggggcattgccttctggtccctggtgacactggggtcatccttcatccccggagagcatttctggctgctcctcctgacccggggcctggtgggggtcggggaggccagttattccaccatcgcgcccactctcattgccgacctctttgtggccgaccagcggagccggatgctcagcatcttctactttgccattccggtgggcagtggtctgggctacattgcaggctccaaagtgaaggatatggctggagactggcactgggctctgagggtgacaccgggtctaggagtggtggccgttctgctgctgttcctggtagtgcgggagccgccaaggggagccgtggagcgccactcagatttgccacccctgaaccccacctcgtggtgggcagatctgagggctctggcaagaaatctcatctttggactcatcacctgcctgaccggagtcctgggtgtgggcctgggtgtggagatcagccgccggctccgccactccaacccccgggctgatcccctggtctgtgccactggcctcctgggctctgcacccttcctcttcctgtcccttgcctgcgcccgtggtagcatcgtggccacttatattttcatcttcattggagagaccctcctgtccatgaactgggccatcgtggccgacattctgctgtacgtggtgatccctacccgacgctccaccgccgaggccttccagatcgtgctgtcccacctgctgggtgatgctgggagcccctacctcattggcctgatctctgaccgcctgcgccggaactggcccccctccttcttgtccgagttccgggctctgcagttctcgctcatgctctgcgcgtttgttggggcactgggcggcgcagccttcctgggcaccgccatcttcattgaggccgaccgccggcgggcacagctgcacgtgcagggcctgctgcacgaagcagggtccacagacgaccggattgtggtgccccagcggggccgctccacccgcgtgcccgtggccagtgtgctcatctgagaggctgccgctcacctacctgcacatctgccacagctggccctgggcccaccccacgaagggcctgggcctaaccccttggcctggcccagcttccagagggaccctgggccgtgtgccagctcccagacactacctgggtagctcaggggaggaggtgggggtccaggagggggatccctctccacaggggcagccccaagggctcggtgctatttgtaacggaataaaatttgtagccagacccc

SEQ ID NO: 29856 - DNA, 4349 bp, Homo sapiens
  source 1..4349: mol_type = unassigned DNA
gggcggggccgggccgcagctgtcagagccgcggcggcgaacgaggcgcagcgagctgagcggtggcagcgccgcagccggggccggagcgcaggagccgacggggcccgaccaggatggtgcagtggcggctccgcggcgcacgcacgcgctgagcgggcccagcctgggccccgcgccccccgcgccccccgccgccccgatccgggccggcatgatgtgcctggaatgcgcctcggcggcggcgggcggcgcggaggaggaggaggcggacgcggagcggcggcgccggcgccggggggcgcagcgaggggctggcggtagcggttgctgcggggcgcggggcgcgggcggcgctggagtctcggccgcgggcgatgaggtgcagacgctgtcgggcagcgtaaggcgggccccgaccggaccccccggcacccccggcacccccggctgcgcagctactgcaaagggccccggcgctcagcagcccaaaccggccagcttgggccgcgggcggggggcagccgccgccatcctcagcttgggcaacgtgctcaactacctggacaggtacaccgtggcaggcgtccttctggacatccagcagcactttggggtcaaggaccgaggcgccggcctgctgcagtcagtgttcatctgtagcttcatggtggctgcccccatcttcggctacctgggcgaccgcttcaacaggaaggtgattctcagctgcggcattttcttctggtcggccgtcaccttctccagctccttcattccccagcagtacttctggctgctggtcctgtcccgggggctggtgggcatcggggaggccagctactccaccatcgcccccactatcattggcgacctcttcaccaagaacacgcgtacgctcatgctgtccgtcttctacttcgccatcccactgggcagtggcctgggctacattactggctccagcgtgaagcaggcagccggagactggcactgggcattgcgggtgtcccctgtcctgggcatgatcacaggaacactcatcctcattctggtcccagccactaaaaggggtcatgccgaccagctcggggaccagctcaaggcccggacctcatggctccgagatatgaaggccctgattcgaaaccgcagctacgtcttctcctccctggccacgtcggctgtctccttcgccacgggggccctgggcatgtggatcccgctctacctgcaccgcgcccaagttgtgcagaagacagcagagacgtgcaacagcccgccctgtggggccaaggacagcctcatctttggggccatcacctgctttacgggatttctgggcgtggtcacgggggcaggagccacgcgctggtgccgcctgaagacccagcgggccgacccactggtgtgtgccgtgggcatgctgggctctgccatcttcatctgcctgatcttcgtggctgccaagagcagcatcgtaggagcctatatctgtatcttcgtcggggagacgctgctgttttctaactgggccatcactgcagacatcctcatgtacgtggtcatccccacgcggcgcgccactgccgtggccttgcagagcttcacctcccacctgctgggggacgccgggagcccctacctcattggctttatctcagacctgatccgccagagcactaaggactccccgctctgggagttcctgagcctgggctacgcgctcatgctctgccctttcgtcgtggtcctgggcggcatgttcttcctcgccactgcgctcttcttcgtcagcgaccgcgccagggctgagcagcaggtgaaccagctggcgatgccgcccgcatctgtgaaagtctgaggtggtgccattgggacaatgaagaacccacactcccacctcgtctgggaggtgtcctacagcgtccgggaccggctgggctgccccaaagctttctgtgtgatccacggctaggcacccaccctctctggcccaggcctgctgagtggccctggcatcaagaagaggctgtgtcctcagttaccctggaaggatgtgtgtgttggagccacacggttggacaggttcccagccctaggtttgggccgcagggcccctggggccaaggaagaagacagccccaagtgggtgtccggggagagcctggcctgccaccagcttatgtgatcttgggcaagtccctgccctccctggaacgaagggccagggggctggactttcccacacaacttgctgggcaaagcacgatctgcagctttgaagactcaacagaccctggaccatacggagagcaggtggcccaggcctcagggcggcagtcccggctttgaggctcacgcgagggcctggtatgcagggaccactgctcagctgggcctcggaccttggggatattggacgcaacctggcaaatgaagctgggcgcccaagtctctgggtactccctggaggacactgtctcactgtctcgggttggctcccagcctggaggtcccagatggggactgttctgacaagctggcatcaccaggggtgaaggccctggctgcagctgtacaccacctgtgcccccaggctcaaggtctctggcaggtgcacaccagcccaactctgcagggcttctctccctgccaccaccccccaagccaggaccccactccttccccgaggctgagctgagccttttccaggggcagggcccaggagaccattcccagaatccatggggcagtagccagggctccggctgctggaggaagcagctatccacaaagcttcctgccccagagctgaggctgaggccccgggagaggcggcccctacccaaacactggctgctggcattccaccaagtgaccccaggggggggccaggccttcgatcacccacctcccatccatgcacacaccaggatgcagctgccaacttcacaccagccccaacccgctttgggggagcttagccccctgcgtcacccactccctgcacttctgctgcaatcaaggtggttctggtgcgggggtggggtggggggtgaggccttgtggccaatgggggaccccccaagagccagcttggacaatgctcttcttgccccttagttactggctggctgtggcttcagtggtgtgtaagcaggtggaatactcacccaccaagctctggggtaccccgagggcctgacaagaggatggggtgggggtggcatcctccaaagaccagcctccacccccactccagcctcagcggggccccagcgatgttttcttgttgtacaagaaccaggtccgagtgttgcctcctcttccttccggaagccaaactgctcctttattttttagagctgctgattgtgaatctcagagtcttaagagagaagccaaatatattcctcttgtaaatgaagaaataaacctatttaaatcaccccctggtggctccctcacagcaaaaaagcctgggggcaaagaggtggcaggcacgagagatggtcacacctgcctgcagccagcacatcaacctgcaccaacccaggcaaacaccagagccctggacatggccctggagccagggtcccagcccagaaccgggggtggggaggtctctgcaccctgggacccctgcaggaatggctcaggctgtgcttgccagagcaggatgcccgggcaggcggcaacagccaccctccccagtggcagcgccttagaaacagcttgcgtattaaaatcatggtttaaaaaaaaaaaaaaaaaataggcgtctcaggcagatggaggcaggggctgaggggggcccgtacctgtgctcagggcttccctgccttcctcacctgtgctttcttcttggccccactctgaagcaggctgggactcctgatgaccaaagacagccttgcctttttccgtgccagcgcggacagtggtgatttgcccaagaccccctttttgggaagagccttctgatgctgcttttggcctgcaggttccgtgggggacccgggagctccattcacctgggacggcttctggtttttcttctgcagttttggggatttggcaggggtgctggggctccgggtgggggcgccaggggctggactcttggtggttggcgtcccgtttgcctgggctgggaccttagcctttgtcctgttcctcttcttcctgcccatgctggggggctggctcccgccggtggctgcaggtgtgccatcctccgctggcgtgccatcctctgacttgcgtttcttgcgcttcttcgtctctggcaagaatccctttttcttccgcttcttactgatggggctctgggtggcactggggat

SEQ ID NO: 29857 - DNA, 1755 bp, Homo sapiens
  source 1..1755: mol_type = unassigned DNA
gcttcatcctggcgccagtctcaggccaagagctgcaggctggcatggctggggggatgtcagcggagtgccctgagcctgggccaggaggtctgcagggccagtccccagggccaggcaggcagtgtccccctcccatcacgcccacctcctggagcctgcccccgtggagggcctacgtggctgccgccgtcctctgctacatcaacctcctgaattacatgaactggttcatcattgcaggagtgctgctggatatacaggaggttttccagatcagtgacaaccatgctggtttgcttcagactgtattcttggctcttcttcctgtcccggggcatcgtgggcactggctcggccagctactccaccatcgcgcccaccgtcctgggcgacctcttcgtgagggaccagcgcacccgcgtgctggctgtcttctacatctttatccccgttggaagtggtctgggctacgtgctggggtcggctgtgacgatgctgactgggaactggcgctgggccctccgagtcatgccctgcctggaggccgtggccttgatcctgcttatcctgctggttccagacccaccccggggagctgccgagacacagggggagggggccgtgggaggcttcaggagcagctggtgtgaggacgtcagatacctggggaaaaactggagtttcgtgtggtcgaccctcggagtgaccgccatggcctttgtgactggagccctggggttctgggcccccaagtttctgctcgaggcacgcgtggttcacgggctgcagcctccctgcttccaggagccgtgcagcaaccccgacagcctgatttttggggcactgaccatcatgaccggcgtcattggggtcatcttgggggcagaagctgcgaggaggtacaagaaagtcattccaggagctgagcccctcatctgcgcctccagcctgcttgccacagccccctgcctctacctggctctcgtcctggccccgaccaccctgctggcctcctatgtgttcctgggccttggggagctgcttctgtcctgcaactgggcagtggttgccgacatcctgctgtctgtggtggtgcccagatgccgggggacggcagaggcacttcagatcacggtgggccacatcctgggagacgctggcagcccctatctcacaggacttatctctagtgtcctgcgggccaggcgccctgactcctatctgcagcgcttccgcagcctgcagcagagcttcctgtgctgcgcctttgtcatcgccctggggggcggctgcttcctgctgactgcgctgtacctggagagagacgagacccgggcctggcagcctgtcacagggaccccagacagcaatgatgtggacagcaacgacctggagagacaaggcctactttcgggcgctggcgcctctacagaggagccctgaggtccctgcctacactcgtcctgcctgcaagcctcccgttggtccccacagcagcagtgcctcggttcctctttggctgtcctcggggactccggctgaggcacatctgccacttttgaattcccggctggagagctggcaggaccctgtggctgggctgggaatggagctgtcagcactctgcgtgggaggcctgggcctgtgcctgcatcccgctcaaggctgccccagcctggggtctccagcctggctgctgctgggccctgaataaagagaggccagtacaaagcccatggattttgggcctgt

SEQ ID NO: 29858 - DNA, 1892 bp, Homo sapiens
  source 1..1892: mol_type = unassigned DNA
gcttcatcctggcgccagtctcaggccaagagctgcaggctggcatggctggggggatgtcagcggagtgccctgagcctgggccaggaggtctgcagggccagtccccagggccaggcaggcagtgtccccctcccatcacgcccacctcctggagcctgcccccgtggagggcctacgtggctgccgccgtcctctgctacatcaacctcctgaattacatgaactggttcatcattgcaggagtgctgctggatatacaggaggttttccagatcagtgacaaccatgctggtttgcttcagactgtcttcgttagctgcctgctgctgtctgcacctgtgtttggctacctgggcgaccgacatagccgcaaggctaccatgagcttcggtatcttgctgtggtcaggagctggcctctctagctccttcatctccccccggtattcttggctcttcttcctgtcccggggcatcgtgggcactggctcggccagctactccaccatcgcgcccaccgtcctgggcgacctcttcgtgagggaccagcgcacccgcgtgctggctgtcttctacatctttatccccgttggaagtggtctgggctacgtgctggggtcggctgtgacgatgctgactgggaactggcgctgggccctccgagtcatgccctgcctggaggccgtggccttgatcctgcttatcctgctggttccagacccaccccggggagctgccgagacacagggggagggggccgtgggaggcttcaggagcagctggtgtgaggacgtcagatacctggggaaaaactggagtttcgtgtggtcgaccctcggagtgaccgccatggcctttgtgactggagccctggggttctgggcccccaagtttctgctcgaggcacgcgtggttcacgggctgcagcctccctgcttccaggagccgtgcagcaaccccgacagcctgatttttggggcactgaccatcatgaccggcgtcattggggtcatcttgggggcagaagctgcgaggaggtacaagaaagtcattccaggagctgagcccctcatctgcgcctccagcctgcttgccacagccccctgcctctacctggctctcgtcctggccccgaccaccctgctggcctcctatgtgttcctgggccttggggagctgcttctgtcctgcaactgggcagtggttgccgacatcctgctgtctgtggtggtgcccagatgccgggggacggcagaggcacttcagatcacggtgggccacatcctgggagacgctggcagcccctatctcacaggacttatctctagtgtcctgcgggccaggcgccctgactcctatctgcagcgcttccgcagcctgcagcagagcttcctgtgctgcgcctttgtcatcgccctggggggcggctgcttcctgctgactgcgctgtacctggagagagacgagacccgggcctggcagcctgtcacagggaccccagacagcaatgatgtggacagcaacgacctggagagacaaggcctactttcgggcgctggcgcctctacagaggagccctgaggtccctgcctacactcgtcctgcctgcaagcctcccgttggtccccacagcagcagtgcctcggttcctctttggctgtcctcggggactccggctgaggcacatctgccacttttgaattcccggctggagagctggcaggaccctgtggctgggctgggaatggagctgtcagcactctgcgtgggaggcctgggcctgtgcctgcatcccgctcaaggctgccccagcctggggtctccagcctggctgctgctgggccctgaataaagagaggccagtacaaagcccatggattttgggcctgt

SEQ ID NO: 29859 - DNA, 679 bp, Homo sapiens
  source 1..679: mol_type = unassigned DNA
agacaaggtttccctctgtaacccaggctggagtgcagtggaacttctgagctcaagtagtcttcacatctcagccttccaagtagctgtgactagagcttgtgacagtccagccccttcagcctggagttccacctaccagtccccacatgtgctgtctctcaccaaggttgccagtgacctctgaccaaaacaatcttgggcgcaggagttagtcgctcaggcggctcaaaggtcttgacggtggagaacaccatccccagggattcccgacgcggtgatgccatcaaagcgttaattctgagatgggcctgcccgggtgcggactctgccgcactcccttccaggtcaatccaaactggagctcaactttcagaagagaaagacgccccagcaagcctctttcggggagtcctctagctcctcacctccatgggccagacagctctggcagggggcagcagcagcacccccacgccacaggccctgtaccctgacctctcctgtcccgagggcttggaagagctgctgtctgcaccccctcctgacctgggggcccagcggcgccacggttggaaccccaaagactgttcagagaacatcgaggtcaaggaaggagggttgtactttgagcggcggcccgtggcccagagcactgatggggcccggggtaagaggg

SEQ ID NO: 29860 - DNA, 1205 bp, Homo sapiens
  source 1..1205: mol_type = unassigned DNA
cagaggcccggcgacctccagggctgggaagtcaaccgaggttcgggggcagcggcgagggctccgggcgagtcaatccaaactggagctcaactttcagaagagaaagacgccccagcaagcctctttcggggagtcctctagctcctcacctccatgggccagacagctctggcagggggcagcagcagcacccccacgccacaggccctgtaccctgacctctcctgtcccgagggcttggaagagctgctgtctgcaccccctcctgacctgggggcccagcggcgccacggttggaaccccaaagactgttcagagaacatcgaggtcaaggaaggagggttgtactttgagcggcggcccgtggcccagagcactgatggggcccggggtaagaggggctattcaaggggcctgcacgcctgggagatcagctggcccctagagcagaggggcacgcatgccgtggtgggcgtggccacggccctcgccccgctgcagactgaccactacgcggcgctgctgggcagcaacagcgagtcgtggggctgggacatcgggcgggggaagctgtaccatcagagcaaggggcccggagccccccagtatccagcgggaactcagggtgagcagctggaggtgccagagagactgctggtggttctggacatggaggagggaactctgggctacgctattgggggcacctacctggggccagcattccgcggactgaagggcaggaccctctatccggcagtaagcgctgtctggggccagtgccaggtccgcatccgctacctgggcgaaaggagagcggagccacactcccttctgcacctgagccgcctgtgtgtgcgccacaacctgggggatacccggctcggccaggtgtctgccctgcccttgccccctgccatgaagcgctacctgctctaccagtgagccctgtgataccacagactgtgctgaggtcttgccaccacccctccccttggggaggtggggaggcactgctggcctagaccagctgctgaaagctggtgaggctgagcccctaccccaacccaagctctgcggaaatcaacagccccagagccacttggagggaggaagaaagggagccggcgttcaaggctatgacagtctgctacgcaaaacattttttcaagtaaaaatagtaagagatgttgttatagaaa

SEQ ID NO: 29861 - DNA, 1236 bp, Homo sapiens
  source 1..1236: mol_type = unassigned DNA
ggccggcggtctgcgccctgcgcgcctcggcttctttccgcccggctccttcagaggcccggcgacctccagggctgggaagtcaaccgagctcccttccaggtcaatccaaactggagctcaactttcagaagagaaagacgccccagcaagcctctttcggggagtcctctagctcctcacctccatgggccagacagctctggcagggggcagcagcagcacccccacgccacaggccctgtaccctgacctctcctgtcccgagggcttggaagagctgctgtctgcaccccctcctgacctgggggcccagcggcgccacggttggaaccccaaagactgttcagagaacatcgaggtcaaggaaggagggttgtactttgagcggcggcccgtggcccagagcactgatggggcccggggtaagaggggctattcaaggggcctgcacgcctgggagatcagctggcccctagagcagaggggcacgcatgccgtggtgggcgtggccacggccctcgccccgctgcagactgaccactacgcggcgctgctgggcagcaacagcgagtcgtggggctgggacatcgggcgggggaagctgtaccatcagagcaaggggcccggagccccccagtatccagcgggaactcagggtgagcagctggaggtgccagagagactgctggtggttctggacatggaggagggaactctgggctacgctattgggggcacctacctggggccagcattccgcggactgaagggcaggaccctctatccggcagtaagcgctgtctggggccagtgccaggtccgcatccgctacctgggcgaaaggagagcggagccacactcccttctgcacctgagccgcctgtgtgtgcgccacaacctgggggatacccggctcggccaggtgtctgccctgcccttgccccctgccatgaagcgctacctgctctaccagtgagccctgtgataccacagactgtgctgaggtcttgccaccacccctccccttggggaggtggggaggcactgctggcctagaccagctgctgaaagctggtgaggctgagcccctaccccaacccaagctctgcggaaatcaacagccccagagccacttggagggaggaagaaagggagccggcgttcaaggctatgacagtctgctacgcaaaacattttttcaagtaaaaatagtaagagatgttgttatagaaa

SEQ ID NO: 29862 - DNA, 1543 bp, Homo sapiens
  source 1..1543: mol_type = unassigned DNA
gcggggattgtttacgtctcgctccggggcggaaagtgggtcagggccgggccggcggagcgcgcagcgggggctgcagattctttccaccatggccagacgcccccggaacagcagggcctggcacttcgtcctgagtgcagcccgccgagacgcagatgcccgggccgtggctctagcaggctccactaactggggctacgactctgatgggcagcacagcgactcggactccgaccccgagtactccacgctgccgccatccatccccagtgcggtgcccgtgaccggcgagtccttctgtgactgtgctgggcagagcgaggcctccttctgtagcagcctgcactcggcccaccggggcagggactgccgctgcggagaggaagacgagtatttcgactgggtctgggatgacttaaataagtcatcagccaccctgctgagctgtgacaaccgtaaggtcagcttccacatggagtacagctgcggcacagcggccatccggggcaccaaggagctgggggagggccagcacttctgggagatcaagatgacctctcccgtctacggcaccgacatgatggtgggcatcgggacgtcggatgtggacctggacaaataccgccacacgttctgcagcctgctgggcagggatgaggacagctggggcctctcctacacgggcctcctccaccacaagggcgacaagaccagcttctcatcgcggttcggccagggctccatcattggcgtgcacctggacacctggcacggcacactcacctttttcaagaacaggaagtgtataggtgtggcagccaccaagctgcagaacaagagattctacccgatggtgtgctccacggcggcccggagcagcatgaaggtcacccgctcctgtgccagcgccacttccctccagtacctgtgctgccaccgcctgcgccagctgcggccagactcgggagacacgctggagggtctgccgctgccgccgggcctcaagcaggtgctacacaacaagctgggctgggtcctgagcatgagttgcagccgccgcaaggctccagtgtccgatccccaggcagcgacctccgcccaccccagcagtcgcgagcctcggccctgccagaggaagcgctgccgccggacctgactgacttcccagtggaactgccttcttgggctgggacagcccctttcctctgtcccttctttctctgtcccttccttccagccacactccagggcggagttggatgaggcccgtccggagggagccatctcttgctcccgaggctgggacagtcctttctgtgggggctctagggcccctctgctgctgtgctgggtggggaagcggctgccctgagccccaggtcttgtgggaggctgcgaggacgagagcctggctggagcccgcgttgctgttcccacagggcctcggtttttcctaacttgctctgcatgctgtcagcggctgccccgccgtcatagacttaaaggactgcaataaatgtagagttgatgtctaacaccc

SEQ ID NO: 29863 - DNA, 857 bp, Homo sapiens
  source 1..857: mol_type = unassigned DNA
atggagtacagctgcggcacagcggccatccggggcaccaaggagctgggggagggccagcacttctgggagatcaagatgacctctcccgtctacggcacactcacctttttcaagaacaggaagtgtataggtgtggcagccaccaagctgcagaacaagagattctacccgatggtgtgctccacggcggcccggagcagcatgaaggtcacccgctcctgtgccagcgccacttccctccagtacctgtgctgccaccgcctgcgccagctgcggccagactcgggagacacgctggagggtctgccgctgccgccgggcctcaagcaggtgctacacaacaagctgggctgggtcctgagcatgagttgcagccgccgcaaggctccagtgtccgatccccaggcagcgacctccgcccaccccagcagtcgcgagcctcggccctgccagaggaagcgctgccgccggacctgactgacttcccagtggaactgccttcttgggctgggacagcccctttcctctgtcccttctttctctgtcccttccttccagccacactccagggcggagttggatgaggcccgtccggagggagccatctcttgctcccgaggctgggacagtcctttctgtgggggctctagggcccctctgctgctgtgctgggtggggaagcggctgccctgagccccaggtcttgtgggaggctgcgaggacgagagcctggctggagcccgcgttgctgttcccacagggcctcggtttttcctaacttgctctgcatgctgtcagcggctgccccgccgtcatagacttaaaggactgcaataaatgtagagttgatgtct

SEQ ID NO: 29864 - DNA, 1784 bp, Homo sapiens
  source 1..1784: mol_type = unassigned DNA
gatgacacggacctactttccggtcaacgcggcctgcggtaccacctcccacccgggtccaatgtgcgcgcgagctttgtctccaaccgcttgggaactgaccaataggaacgttggattaggactgacagttcctgaaacctctcggcaatagctttgtcacccgactcccgccccctctcccgaagctccgagacaggtgtgcccgcccctcgccgccggagccaatgggcgcagggggcggggattgtttacgtctcgctccggggcggaaagtgggtcagggccgggccggcggagcgcgcagcgggggctgcagattctttccaccatggccagacgcccccggaacagcagggcctggcacttcgtcctgagtgcagcccgccgagacgcagatgcccgggccgtggctctagcaggctccactaactggggctacgactctgatgggcagcacagcgactcggactccgaccccgagtactccacgctgccgccatccatccccagtgcggtgcccgtgaccggcgagtccttctgtgactgtgctgggcagagcgaggcctccttctgtagcagcctgcactcggcccaccggggcagggactgccgctgcggagaggaagacgagtatttcgactgggtctgggatgacttaaataagtcatcagccaccctgctgagctgtgacaaccgtaaggtcagcttccacatggagtacagctgcggcacagcggccatccggggcaccaaggagctgggggagggccagcacttctgggagatcaagatgacctctcccgtctacggcaccgacatgatggtgggcatcgggacgtcggatgtggacctggacaaataccgccacacgttctgcagcctgctgggcagggatgaggacagctggggcctctcctacacgggcctcctccaccacaagggcgacaagaccagcttctcatcgcggttcggccagggctccatcattggcgtgcacctggacacctggcacggcacactcacctttttcaagaacaggaagtgtataggtgtggcagccaccaagctgcagaacaagagattctacccgatggtgtgctccacggcggcccggagcagcatgaaggtcacccgctcctgtgccagcgccacttccctccagtacctgtgctgccaccgcctgcgccagctgcggccagactcgggagacacgctggagggtctgccgctgccgccgggcctcaagcaggtgctacacaacaagctgggctgggtcctgagcatgagttgcagccgccgcaaggctccagtgtccgatccccaggcagcgacctccgcccaccccagcagtcgcgagcctcggccctgccagaggaagcgctgccgccggacctgactgacttcccagtggaactgccttcttgggctgggacagcccctttcctctgtcccttctttctctgtcccttccttccagccacactccagggcggagttggatgaggcccgtccggagggagccatctcttgctcccgaggctgggacagtcctttctgtgggggctctagggcccctctgctgctgtgctgggtggggaagcggctgccctgagccccaggtcttgtgggaggctgcgaggacgagagcctggctggagcccgcgttgctgttcccacagggcctcggtttttcctaacttgctctgcatgctgtcagcggctgccccgccgtcatagacttaaaggactgcaataaatgtagagttgatgtctaacaccca

SEQ ID NO: 29865 - DNA, 2908 bp, Homo sapiens
  source 1..2908: mol_type = unassigned DNA
cggcggcggaggagggggaggcggcggcggctgcagcatccagagctggccgtggcggccggcgcgccccgcgcacaaaagcacccagccccaggggagggcgatgaacacaccacatcccgggcccgggccccagctgctgctaccgctgcgtgcgctcagggcgctggggaagacgcccggcgcgccgggggccagcggccgaggcgcggcccgtgcgccctgagcgcgggactcgtcgccctccgggtcaggcgccaagcttccaagcggctagagcgcgggccttggagcgcccccaggatcgcttcagtaaggcgcttccccactccaggcccgacccccggcgcctgagcgccaacttcgccaagaacgctcctaactccaggccatcctgcagcgcagagggggcgctgctgccgggcatcagccgtgaggacgcgcccctggccgtgcggagagagccggcatttgcgggtcactcgggcgcccctgagtgggcggcggcggcagcagacccctctccagggagtccaggacctgccagcgctggggattcttcccgaacaggcgcttgccctctcttttatggagcttgggcccctgccgcagcccggtagaggctgtggaggtctaccgtccggaagcctggttcccagccccgtggcccattcctggctacggggagtggaggctcccacgaggtagcggtggcctgcagcggcctcctccccgcagtgaagcatgggccagaagctctcggggagcctcaagtcagtggaggtgcgagagccggcgctgcggccggccaagcgggagctgcggggtgcagagcccgggcggccggcgcggctggaccagctgttggacatgccagcggcggggctggctgtgcagctgcggcacgcgtggaaccccgaggaccgctcgctcaacgtcttcgtcaaggacgacgaccggctcaccttccaccggcaccccgtggcccagagcaccgacggcatccgcggcaaggtgggccacgcccgcggcctgcacgcctggcagatcaactggccggctcggcagcgcggcacccacgctgtagttggtgtggccacggcccgtgctcccctgcactccgtgggctacacggcgctggtaggcagtgacgccgagtcgtggggctgggacctgggccgcagccgcctctaccacgacggcaagaaccagcccggcgtggcctacccggcctttctggggcccgacgaggcctttgcgctgcccgactcgctgctcgtggtgctggacatggatgagggcacactcagcttcatcgtggatggccagtacctgggcgtggccttccgaggtctcaagggcaagaagctgtacccggtggtgagtgccgtgtggggccactgtgaagtcaccatgcgctacatcaacggccttgaccccgagcccctgccactgatggacctgtgccggagatccatccgctcggccctgggccgccagcgcctgcaggacatcagctccctgcccctgcctcagtctctcaaaaactatctgcagtaccagtgagccaagcctgatgggcagcacagacacagacacacaccgcagggcccgaccctcctgtcattcacagtcccatggcacataggggaaaggatctacccttctcctggctccccaggacactcagttctttcaaagaccaggatgtggtaccaactttggaaacgaaaggtctcttgccaacagtatctactgccctcgaggcagccctcccaagtcagacacctccttcggagccacagagagcctggagtctgcacctcctggaaatcctgccaccaaccaggacacagcagccaccgtattgatcagagagcctgtttccttattcaagagaatgaataaaacatttaggcaggagactttctattgtgtgccccgttgcagacagggccagggagaaattagccagtgcagggggaaaattgcctctgaataatgaatgatgaaagcctgacgccgtgcccctcctggcccatacgccttgccagggcggcaggattgtcacaccgttttaggactctgtgccactttgagagactgttcccaggaggcccaaccgcagacctggcaagtggacagtgcagtgtggagacaccttccggcttacctctttgaacgttgtttacctacccctttccacgtgctccccttcccagccactgactcacagttctctggatgcccagacacctctcttcagggaagatgagtctgactggtttgccccagggaagagcatatccttaccattattttaagtagcatttgcattttaaaagaggaatgcggagaggacagtacttagtccaaaggtgctaacgggggaactgggggcattgtgacacccaagtctgatgtgtcctgggttggggggccttcctggagtgtcagggtctctgggcaacgtccattcagggtgcggcatggctgtcacaaagctttatttgagcaaattattttttcactttaggagacttctacaagtttgtttcctgtttcaaatgtgtgtgtgatgtgctgtttatttatcagcttgaggtccatgggggcagccttgtgactggaagggtggatatgggagacacattctctacctgctccgagcctggtcctctcgcaggaatgctgctgctgcctccgccgccactgctgctgccacctcttatatgtttcagacactctctgcccagactcatttttaactggaaatcatcacagcagtgggatatcagagccccagacagcactgcctcttcctccccaccccactgcccccaccttaatgtgaatttgactgatgaatgaagagcgtttctaataaagtttgtcattcagtccttca

SEQ ID NO: 29866 - DNA, 4990 bp, Homo sapiens
  source 1..4990: mol_type = unassigned DNA
tcctctcagatttgtgtgcttcttcccttcccacattctatactgcccagcgcctgggattccagatctgcgtttgaatccaggaaagggaggtggacacctgcgcaggtgtgtgccctccggcccctgaagcatggccagcagcggcatggctgacagcgccaaccacctgcccttctttttcggcaacatcacccgggaggaggcagaagattacctggtccaggggggcatgagtgatgggctttatttgctgcgccagagccgcaactacctgggtggcttcgccctgtccgtggcccacgggaggaaggcacaccactacaccatcgagcgggagctgaatggcacctacgccatcgccggtggcaggacccatgccagccccgccgacctctgccactaccactcccaggagtctgatggcctggtctgcctcctcaagaagcccttcaaccggccccaaggggtgcagcccaagactgggccctttgaggatttgaaggaaaacctcatcagggaatatgtgaagcagacatggaacctgcagggtcaggctctggagcaggccatcatcagtcagaagcctcagctggagaagctgatcgctaccacagcccatgaaaaaatgccttggttccatggaaaaatctctcgggaagaatctgagcaaattgtcctgataggatcaaagacaaatggaaagttcctgatccgagccagagacaacaacggctcctacgccctgtgcctgctgcacgaagggaaggtgctgcactatcgcatcgacaaagacaagacagggaagctctccatccccgagggaaagaagttcgacacgctctggcagctagtcgagcattattcttataaagcagatggtttgttaagagttcttactgtcccatgtcaaaaaatcggcacacagggaaatgttaattttggaggccgtccacaacttccaggttcccatcctgcgacttggtcagcgggtggaataatctcaagaatcaaatcatactccttcccaaagcctggccacagaaagtcctcccctgcccaagggaaccggcaagagagtactgtgtcattcaatccgtatgagccagaacttgcaccctgggctgcagacaaaggcccccagagagaagccctacccatggacacagaggtgtacgagagcccctacgcggaccccgaggagatcaggcccaaggaggtttacctggaccgaaagctgctgacgctggaagacaaagaactgggctctggtaattttggaactgtgaaaaagggctactaccaaatgaaaaaagttgtgaaaaccgtggctgtgaaaatactgaaaaacgaggccaatgaccccgctcttaaagatgagttattagcagaagcaaatgtcatgcagcagctggacaacccgtacatcgtgcggatgatcgggatatgcgaggccgagtcctggatgctggttatggagatggcagaacttggtcccctcaataagtatttgcagcagaacagacatgtcaaggataagaacatcatagaactggttcatcaggtttccatgggcatgaagtacttggaggagagcaattttgtgcacagagatctggctgcaagaaatgtgttgctagttacccaacattacgccaagatcagtgatttcggactttccaaagcactgcgtgctgatgaaaactactacaaggcccagacccatggaaagtggcctgtcaagtggtacgctccggaatgcatcaactactacaagttctccagcaaaagcgatgtctggagctttggagtgttgatgtgggaagcattctcctatgggcagaagccatatcgagggatgaaaggaagtgaagtcaccgctatgttagagaaaggagagcggatggggtgccctgcagggtgtccaagagagatgtacgatctcatgaatctgtgctggacatacgatgtggaaaacaggcccggattcgcagcagtggaactgcggctgcgcaattactactatgacgtggtgaactaaccgctcccgcacctgtcggtggctgcctttgatcacaggagcaatcacaggaaaatgtatccagaggaattgattgtcagccacctccctctgccagtcgggagagccaggcttggatggaacatgcccacaacttgtcacccaaagcctgtcccaggactcaccctccacaaagcaaaggcagtcccgggagaaaagacggatggcaggatccaaggggctagctggatttgtttgttttcttgtctgtgtgattttcatacaggttatttttacgatctgtttccaaatccctttcatgtctttccacttctctgggtcccggggtgcatttgttactcatcgggcccagggacattgcagagtggcctagagcactctcaccccaagcggccttttccaaatgcccaaggatgccttagcatgtgactcctgaagggaaggcaaaggcagaggaatttggctgcttctacggccatgagactgatccctggccactgaaaagctttcctgacaataaaaatgttttgaggctttaaaaagaaaatcaagtttgaccagtgcagtttctaagcatgtagccagttaaggaaagaaagaaagaaaaaaaaaaaaggcctggatactgcttttgctgtctctgttatgagatggaagacttacatgtttgtgataaaaggggaccatgagaatgaattggcttggcttactttccccctgaaatcctctctcctgcagactgtcttgaagacctggtgactggtaaataaagccctgcatggaggctgcacagcaggggcaagaggcccatcccccagcatctcactgaggacagcttcaggctgccttcctctgaacgtggtccacaccttcctctcctccacagagagggtgccgccagaatcccctgtcgctttctgtgtctgcaatggggggcagcacagggatcaaagccatctaaagagtttccaaagaaagtattaattcagaacaagccaaagaccctgagcctcaccacaaacaggccttttggagtgtgaatttgagttgaagatacaagatcggagaatgattttctggtcttaactaatcctcatcttcatgtttgatctttaagaagtcatcacccattgatttcagttttgctgtacctcttgaaagttaaagagacatctcagcactttaggaggccgaggcgggtggatcacttgaggtaaggagtttgagactagcctggccaatatggtaaaaccccatctctactaaaaatacaaaaattagccgggcatggtggcatgtgtctgtagtcccagctactcgggaggctgaggcaggagaatcgcttgaacccaggaaacggaggtcgcagtgagccaagatcatgccactgcactccagcttgggcatcacagcgagactctgtcaaaacaaacaaacaaaaaaacaacttaaagaggtaatttagccatcattcttatgccagcagatataaataaacttggacccatctggtcttcagctaaacctgagacattttaaagtgcatggacagccatggacagcaggccctcctctaacaggggatgcaaggcatggagaaagacaatcagtacccaagctcagccacagaagacaggagtcactcatataacttgtgtttagaagtttttggtagccacgcacactttctgaaatcacactatctggtggtttaatcatatttttaaagacagaatccctgagtgctgagcagattctcaaaacacatttagaatccctgaaattagaaagatcaatgacaaaatatctgtcagccaggccacaaacaggtgtaaaattatgaaaggagtggttggatgtgccaagtttggtaaagtggtgactgcatctgagaaagaggctgtgaggctgaactcttggtggcttccttctgtaacttccagagggagtcttcaacacaggccccgtgctcgtaggaatacggtagcacctatgtaggaagtgcgtggagttttctgtcttctttctgtgtgatttttggcctttttatcagcacttctcccctcccaggagcctggggatgccaaacatccagaatgtgatgggacaagatgggggcaggggcctcacctccctgcagaggtccggccaggtctccttgtccctggacaatctcctgagcctctctgcttggtggagcaggcacctgtgtgcagaattcccactgtggccagcacgaggaagtcttttctagtgaaaatgtgtcttgtggtcaggaataattatcctttcccctgtagccaccaaggagggcaaatagagaaaggtaacctaattgaaggattggtcatgtgaaaagggctacatttgggaagctgggaaaggcctccaggcttctagagcagctagcttgggctggattctcatacccaggctgccccttggattgttctacccaagcttttccctggggtctgggctcactccataaggtaaggtgccttttaccttatggtccttctttagcaggtaacaaaggagcatcaggggcaggctgccctggtggcatcacactggctagtgaggccgtgaatatcttgtcccccagcagggccgacagtttctatcacagaaaacagtgtgttcagtggtgaaaatcgttgcatgcatgttttcatctgagcgtgtccttctcccatactccctatcagccagccctgcctgtagctgctgtatggtgattgcacttggacatcagtccaatgactgcaagtcggcctggattttcacttgcagaggctacagctgcattgtcaggtctcccagccctgcagagagctccctccactggttagcagtgtgttgtgttttccattcatttcagaagagctacattgtgtcactggacatttttaaaaactgtgatttttaataaaaatttaaaatttg

SEQ ID NO: 29867 - DNA, 4908 bp, Homo sapiens
  source 1..4908: mol_type = unassigned DNA
ctttctggtaaggagaggaggttacggggaacgacgcgctgctttcatgccctttcttgttctaccttcatcggccgaggtggacacctgcgcaggtgtgtgccctccggcccctgaagcatggccagcagcggcatggctgacagcgccaaccacctgcccttctttttcggcaacatcacccgggaggaggcagaagattacctggtccaggggggcatgagtgatgggctttatttgctgcgccagagccgcaactacctgggtggcttcgccctgtccgtggcccacgggaggaaggcacaccactacaccatcgagcgggagctgaatggcacctacgccatcgccggtggcaggacccatgccagccccgccgacctctgccactaccactcccaggagtctgatggcctggtctgcctcctcaagaagcccttcaaccggccccaaggggtgcagcccaagactgggccctttgaggatttgaaggaaaacctcatcagggaatatgtgaagcagacatggaacctgcagggtcaggctctggagcaggccatcatcagtcagaagcctcagctggagaagctgatcgctaccacagcccatgaaaaaatgccttggttccatggaaaaatctctcgggaagaatctgagcaaattgtcctgataggatcaaagacaaatggaaagttcctgatccgagccagagacaacaacggctcctacgccctgtgcctgctgcacgaagggaaggtgctgcactatcgcatcgacaaagacaagacagggaagctctccatccccgagggaaagaagttcgacacgctctggcagctagtcgagcattattcttataaagcagatggtttgttaagagttcttactgtcccatgtcaaaaaatcggcacacagggaaatgttaattttggaggccgtccacaacttccaggttcccatcctgcgtcctcccctgcccaagggaaccggcaagagagtactgtgtcattcaatccgtatgagccagaacttgcaccctgggctgcagacaaaggcccccagagagaagccctacccatggacacagaggtgtacgagagcccctacgcggaccccgaggagatcaggcccaaggaggtttacctggaccgaaagctgctgacgctggaagacaaagaactgggctctggtaattttggaactgtgaaaaagggctactaccaaatgaaaaaagttgtgaaaaccgtggctgtgaaaatactgaaaaacgaggccaatgaccccgctcttaaagatgagttattagcagaagcaaatgtcatgcagcagctggacaacccgtacatcgtgcggatgatcgggatatgcgaggccgagtcctggatgctggttatggagatggcagaacttggtcccctcaataagtatttgcagcagaacagacatgtcaaggataagaacatcatagaactggttcatcaggtttccatgggcatgaagtacttggaggagagcaattttgtgcacagagatctggctgcaagaaatgtgttgctagttacccaacattacgccaagatcagtgatttcggactttccaaagcactgcgtgctgatgaaaactactacaaggcccagacccatggaaagtggcctgtcaagtggtacgctccggaatgcatcaactactacaagttctccagcaaaagcgatgtctggagctttggagtgttgatgtgggaagcattctcctatgggcagaagccatatcgagggatgaaaggaagtgaagtcaccgctatgttagagaaaggagagcggatggggtgccctgcagggtgtccaagagagatgtacgatctcatgaatctgtgctggacatacgatgtggaaaacaggcccggattcgcagcagtggaactgcggctgcgcaattactactatgacgtggtgaactaaccgctcccgcacctgtcggtggctgcctttgatcacaggagcaatcacaggaaaatgtatccagaggaattgattgtcagccacctccctctgccagtcgggagagccaggcttggatggaacatgcccacaacttgtcacccaaagcctgtcccaggactcaccctccacaaagcaaaggcagtcccgggagaaaagacggatggcaggatccaaggggctagctggatttgtttgttttcttgtctgtgtgattttcatacaggttatttttacgatctgtttccaaatccctttcatgtctttccacttctctgggtcccggggtgcatttgttactcatcgggcccagggacattgcagagtggcctagagcactctcaccccaagcggccttttccaaatgcccaaggatgccttagcatgtgactcctgaagggaaggcaaaggcagaggaatttggctgcttctacggccatgagactgatccctggccactgaaaagctttcctgacaataaaaatgttttgaggctttaaaaagaaaatcaagtttgaccagtgcagtttctaagcatgtagccagttaaggaaagaaagaaagaaaaaaaaaaaaggcctggatactgcttttgctgtctctgttatgagatggaagacttacatgtttgtgataaaaggggaccatgagaatgaattggcttggcttactttccccctgaaatcctctctcctgcagactgtcttgaagacctggtgactggtaaataaagccctgcatggaggctgcacagcaggggcaagaggcccatcccccagcatctcactgaggacagcttcaggctgccttcctctgaacgtggtccacaccttcctctcctccacagagagggtgccgccagaatcccctgtcgctttctgtgtctgcaatggggggcagcacagggatcaaagccatctaaagagtttccaaagaaagtattaattcagaacaagccaaagaccctgagcctcaccacaaacaggccttttggagtgtgaatttgagttgaagatacaagatcggagaatgattttctggtcttaactaatcctcatcttcatgtttgatctttaagaagtcatcacccattgatttcagttttgctgtacctcttgaaagttaaagagacatctcagcactttaggaggccgaggcgggtggatcacttgaggtaaggagtttgagactagcctggccaatatggtaaaaccccatctctactaaaaatacaaaaattagccgggcatggtggcatgtgtctgtagtcccagctactcgggaggctgaggcaggagaatcgcttgaacccaggaaacggaggtcgcagtgagccaagatcatgccactgcactccagcttgggcatcacagcgagactctgtcaaaacaaacaaacaaaaaaacaacttaaagaggtaatttagccatcattcttatgccagcagatataaataaacttggacccatctggtcttcagctaaacctgagacattttaaagtgcatggacagccatggacagcaggccctcctctaacaggggatgcaaggcatggagaaagacaatcagtacccaagctcagccacagaagacaggagtcactcatataacttgtgtttagaagtttttggtagccacgcacactttctgaaatcacactatctggtggtttaatcatatttttaaagacagaatccctgagtgctgagcagattctcaaaacacatttagaatccctgaaattagaaagatcaatgacaaaatatctgtcagccaggccacaaacaggtgtaaaattatgaaaggagtggttggatgtgccaagtttggtaaagtggtgactgcatctgagaaagaggctgtgaggctgaactcttggtggcttccttctgtaacttccagagggagtcttcaacacaggccccgtgctcgtaggaatacggtagcacctatgtaggaagtgcgtggagttttctgtcttctttctgtgtgatttttggcctttttatcagcacttctcccctcccaggagcctggggatgccaaacatccagaatgtgatgggacaagatgggggcaggggcctcacctccctgcagaggtccggccaggtctccttgtccctggacaatctcctgagcctctctgcttggtggagcaggcacctgtgtgcagaattcccactgtggccagcacgaggaagtcttttctagtgaaaatgtgtcttgtggtcaggaataattatcctttcccctgtagccaccaaggagggcaaatagagaaaggtaacctaattgaaggattggtcatgtgaaaagggctacatttgggaagctgggaaaggcctccaggcttctagagcagctagcttgggctggattctcatacccaggctgccccttggattgttctacccaagcttttccctggggtctgggctcactccataaggtaaggtgccttttaccttatggtccttctttagcaggtaacaaaggagcatcaggggcaggctgccctggtggcatcacactggctagtgaggccgtgaatatcttgtcccccagcagggccgacagtttctatcacagaaaacagtgtgttcagtggtgaaaatcgttgcatgcatgttttcatctgagcgtgtccttctcccatactccctatcagccagccctgcctgtagctgctgtatggtgattgcacttggacatcagtccaatgactgcaagtcggcctggattttcacttgcagaggctacagctgcattgtcaggtctcccagccctgcagagagctccctccactggttagcagtgtgttgtgttttccattcatttcagaagagctacattgtgtcactggacatttttaaaaactgtgatttttaataaaaatttaaaatttg

SEQ ID NO: 29868 - DNA, 4936 bp, Homo sapiens
  source 1..4936: mol_type = unassigned DNA
gaggaagagccgcgggcccggcggctgaggccaccccggcggcggctggagagcgaggaggagcgggtggccccgcgctgcgcccgccctcgcctcacctggcgcaggtggacacctgcgcaggtgtgtgccctccggcccctgaagcatggccagcagcggcatggctgacagcgccaaccacctgcccttctttttcggcaacatcacccgggaggaggcagaagattacctggtccaggggggcatgagtgatgggctttatttgctgcgccagagccgcaactacctgggtggcttcgccctgtccgtggcccacgggaggaaggcacaccactacaccatcgagcgggagctgaatggcacctacgccatcgccggtggcaggacccatgccagccccgccgacctctgccactaccactcccaggagtctgatggcctggtctgcctcctcaagaagcccttcaaccggccccaaggggtgcagcccaagactgggccctttgaggatttgaaggaaaacctcatcagggaatatgtgaagcagacatggaacctgcagggtcaggctctggagcaggccatcatcagtcagaagcctcagctggagaagctgatcgctaccacagcccatgaaaaaatgccttggttccatggaaaaatctctcgggaagaatctgagcaaattgtcctgataggatcaaagacaaatggaaagttcctgatccgagccagagacaacaacggctcctacgccctgtgcctgctgcacgaagggaaggtgctgcactatcgcatcgacaaagacaagacagggaagctctccatccccgagggaaagaagttcgacacgctctggcagctagtcgagcattattcttataaagcagatggtttgttaagagttcttactgtcccatgtcaaaaaatcggcacacagggaaatgttaattttggaggccgtccacaacttccaggttcccatcctgcgtcctcccctgcccaagggaaccggcaagagagtactgtgtcattcaatccgtatgagccagaacttgcaccctgggctgcagacaaaggcccccagagagaagccctacccatggacacagaggtgtacgagagcccctacgcggaccccgaggagatcaggcccaaggaggtttacctggaccgaaagctgctgacgctggaagacaaagaactgggctctggtaattttggaactgtgaaaaagggctactaccaaatgaaaaaagttgtgaaaaccgtggctgtgaaaatactgaaaaacgaggccaatgaccccgctcttaaagatgagttattagcagaagcaaatgtcatgcagcagctggacaacccgtacatcgtgcggatgatcgggatatgcgaggccgagtcctggatgctggttatggagatggcagaacttggtcccctcaataagtatttgcagcagaacagacatgtcaaggataagaacatcatagaactggttcatcaggtttccatgggcatgaagtacttggaggagagcaattttgtgcacagagatctggctgcaagaaatgtgttgctagttacccaacattacgccaagatcagtgatttcggactttccaaagcactgcgtgctgatgaaaactactacaaggcccagacccatggaaagtggcctgtcaagtggtacgctccggaatgcatcaactactacaagttctccagcaaaagcgatgtctggagctttggagtgttgatgtgggaagcattctcctatgggcagaagccatatcgagggatgaaaggaagtgaagtcaccgctatgttagagaaaggagagcggatggggtgccctgcagggtgtccaagagagatgtacgatctcatgaatctgtgctggacatacgatgtggaaaacaggcccggattcgcagcagtggaactgcggctgcgcaattactactatgacgtggtgaactaaccgctcccgcacctgtcggtggctgcctttgatcacaggagcaatcacaggaaaatgtatccagaggaattgattgtcagccacctccctctgccagtcgggagagccaggcttggatggaacatgcccacaacttgtcacccaaagcctgtcccaggactcaccctccacaaagcaaaggcagtcccgggagaaaagacggatggcaggatccaaggggctagctggatttgtttgttttcttgtctgtgtgattttcatacaggttatttttacgatctgtttccaaatccctttcatgtctttccacttctctgggtcccggggtgcatttgttactcatcgggcccagggacattgcagagtggcctagagcactctcaccccaagcggccttttccaaatgcccaaggatgccttagcatgtgactcctgaagggaaggcaaaggcagaggaatttggctgcttctacggccatgagactgatccctggccactgaaaagctttcctgacaataaaaatgttttgaggctttaaaaagaaaatcaagtttgaccagtgcagtttctaagcatgtagccagttaaggaaagaaagaaagaaaaaaaaaaaaggcctggatactgcttttgctgtctctgttatgagatggaagacttacatgtttgtgataaaaggggaccatgagaatgaattggcttggcttactttccccctgaaatcctctctcctgcagactgtcttgaagacctggtgactggtaaataaagccctgcatggaggctgcacagcaggggcaagaggcccatcccccagcatctcactgaggacagcttcaggctgccttcctctgaacgtggtccacaccttcctctcctccacagagagggtgccgccagaatcccctgtcgctttctgtgtctgcaatggggggcagcacagggatcaaagccatctaaagagtttccaaagaaagtattaattcagaacaagccaaagaccctgagcctcaccacaaacaggccttttggagtgtgaatttgagttgaagatacaagatcggagaatgattttctggtcttaactaatcctcatcttcatgtttgatctttaagaagtcatcacccattgatttcagttttgctgtacctcttgaaagttaaagagacatctcagcactttaggaggccgaggcgggtggatcacttgaggtaaggagtttgagactagcctggccaatatggtaaaaccccatctctactaaaaatacaaaaattagccgggcatggtggcatgtgtctgtagtcccagctactcgggaggctgaggcaggagaatcgcttgaacccaggaaacggaggtcgcagtgagccaagatcatgccactgcactccagcttgggcatcacagcgagactctgtcaaaacaaacaaacaaaaaaacaacttaaagaggtaatttagccatcattcttatgccagcagatataaataaacttggacccatctggtcttcagctaaacctgagacattttaaagtgcatggacagccatggacagcaggccctcctctaacaggggatgcaaggcatggagaaagacaatcagtacccaagctcagccacagaagacaggagtcactcatataacttgtgtttagaagtttttggtagccacgcacactttctgaaatcacactatctggtggtttaatcatatttttaaagacagaatccctgagtgctgagcagattctcaaaacacatttagaatccctgaaattagaaagatcaatgacaaaatatctgtcagccaggccacaaacaggtgtaaaattatgaaaggagtggttggatgtgccaagtttggtaaagtggtgactgcatctgagaaagaggctgtgaggctgaactcttggtggcttccttctgtaacttccagagggagtcttcaacacaggccccgtgctcgtaggaatacggtagcacctatgtaggaagtgcgtggagttttctgtcttctttctgtgtgatttttggcctttttatcagcacttctcccctcccaggagcctggggatgccaaacatccagaatgtgatgggacaagatgggggcaggggcctcacctccctgcagaggtccggccaggtctccttgtccctggacaatctcctgagcctctctgcttggtggagcaggcacctgtgtgcagaattcccactgtggccagcacgaggaagtcttttctagtgaaaatgtgtcttgtggtcaggaataattatcctttcccctgtagccaccaaggagggcaaatagagaaaggtaacctaattgaaggattggtcatgtgaaaagggctacatttgggaagctgggaaaggcctccaggcttctagagcagctagcttgggctggattctcatacccaggctgccccttggattgttctacccaagcttttccctggggtctgggctcactccataaggtaaggtgccttttaccttatggtccttctttagcaggtaacaaaggagcatcaggggcaggctgccctggtggcatcacactggctagtgaggccgtgaatatcttgtcccccagcagggccgacagtttctatcacagaaaacagtgtgttcagtggtgaaaatcgttgcatgcatgttttcatctgagcgtgtccttctcccatactccctatcagccagccctgcctgtagctgctgtatggtgattgcacttggacatcagtccaatgactgcaagtcggcctggattttcacttgcagaggctacagctgcattgtcaggtctcccagccctgcagagagctccctccactggttagcagtgtgttgtgttttccattcatttcagaagagctacattgtgtcactggacatttttaaaaactgtgatttttaataaaaatttaaaatttg

SEQ ID NO: 29869 - DNA, 5005 bp, Homo sapiens
  source 1..5005: mol_type = unassigned DNA
gaggaagagccgcgggcccggcggctgaggccaccccggcggcggctggagagcgaggaggagcgggtggccccgcgctgcgcccgccctcgcctcacctggcgcaggtggacacctgcgcaggtgtgtgccctccggcccctgaagcatggccagcagcggcatggctgacagcgccaaccacctgcccttctttttcggcaacatcacccgggaggaggcagaagattacctggtccaggggggcatgagtgatgggctttatttgctgcgccagagccgcaactacctgggtggcttcgccctgtccgtggcccacgggaggaaggcacaccactacaccatcgagcgggagctgaatggcacctacgccatcgccggtggcaggacccatgccagccccgccgacctctgccactaccactcccaggagtctgatggcctggtctgcctcctcaagaagcccttcaaccggccccaaggggtgcagcccaagactgggccctttgaggatttgaaggaaaacctcatcagggaatatgtgaagcagacatggaacctgcagggtcaggctctggagcaggccatcatcagtcagaagcctcagctggagaagctgatcgctaccacagcccatgaaaaaatgccttggttccatggaaaaatctctcgggaagaatctgagcaaattgtcctgataggatcaaagacaaatggaaagttcctgatccgagccagagacaacaacggctcctacgccctgtgcctgctgcacgaagggaaggtgctgcactatcgcatcgacaaagacaagacagggaagctctccatccccgagggaaagaagttcgacacgctctggcagctagtcgagcattattcttataaagcagatggtttgttaagagttcttactgtcccatgtcaaaaaatcggcacacagggaaatgttaattttggaggccgtccacaacttccaggttcccatcctgcgacttggtcagcgggtggaataatctcaagaatcaaatcatactccttcccaaagcctggccacagaaagtcctcccctgcccaagggaaccggcaagagagtactgtgtcattcaatccgtatgagccagaacttgcaccctgggctgcagacaaaggcccccagagagaagccctacccatggacacagaggtgtacgagagcccctacgcggaccccgaggagatcaggcccaaggaggtttacctggaccgaaagctgctgacgctggaagacaaagaactgggctctggtaattttggaactgtgaaaaagggctactaccaaatgaaaaaagttgtgaaaaccgtggctgtgaaaatactgaaaaacgaggccaatgaccccgctcttaaagatgagttattagcagaagcaaatgtcatgcagcagctggacaacccgtacatcgtgcggatgatcgggatatgcgaggccgagtcctggatgctggttatggagatggcagaacttggtcccctcaataagtatttgcagcagaacagacatgtcaaggataagaacatcatagaactggttcatcaggtttccatgggcatgaagtacttggaggagagcaattttgtgcacagagatctggctgcaagaaatgtgttgctagttacccaacattacgccaagatcagtgatttcggactttccaaagcactgcgtgctgatgaaaactactacaaggcccagacccatggaaagtggcctgtcaagtggtacgctccggaatgcatcaactactacaagttctccagcaaaagcgatgtctggagctttggagtgttgatgtgggaagcattctcctatgggcagaagccatatcgagggatgaaaggaagtgaagtcaccgctatgttagagaaaggagagcggatggggtgccctgcagggtgtccaagagagatgtacgatctcatgaatctgtgctggacatacgatgtggaaaacaggcccggattcgcagcagtggaactgcggctgcgcaattactactatgacgtggtgaactaaccgctcccgcacctgtcggtggctgcctttgatcacaggagcaatcacaggaaaatgtatccagaggaattgattgtcagccacctccctctgccagtcgggagagccaggcttggatggaacatgcccacaacttgtcacccaaagcctgtcccaggactcaccctccacaaagcaaaggcagtcccgggagaaaagacggatggcaggatccaaggggctagctggatttgtttgttttcttgtctgtgtgattttcatacaggttatttttacgatctgtttccaaatccctttcatgtctttccacttctctgggtcccggggtgcatttgttactcatcgggcccagggacattgcagagtggcctagagcactctcaccccaagcggccttttccaaatgcccaaggatgccttagcatgtgactcctgaagggaaggcaaaggcagaggaatttggctgcttctacggccatgagactgatccctggccactgaaaagctttcctgacaataaaaatgttttgaggctttaaaaagaaaatcaagtttgaccagtgcagtttctaagcatgtagccagttaaggaaagaaagaaagaaaaaaaaaaaaggcctggatactgcttttgctgtctctgttatgagatggaagacttacatgtttgtgataaaaggggaccatgagaatgaattggcttggcttactttccccctgaaatcctctctcctgcagactgtcttgaagacctggtgactggtaaataaagccctgcatggaggctgcacagcaggggcaagaggcccatcccccagcatctcactgaggacagcttcaggctgccttcctctgaacgtggtccacaccttcctctcctccacagagagggtgccgccagaatcccctgtcgctttctgtgtctgcaatggggggcagcacagggatcaaagccatctaaagagtttccaaagaaagtattaattcagaacaagccaaagaccctgagcctcaccacaaacaggccttttggagtgtgaatttgagttgaagatacaagatcggagaatgattttctggtcttaactaatcctcatcttcatgtttgatctttaagaagtcatcacccattgatttcagttttgctgtacctcttgaaagttaaagagacatctcagcactttaggaggccgaggcgggtggatcacttgaggtaaggagtttgagactagcctggccaatatggtaaaaccccatctctactaaaaatacaaaaattagccgggcatggtggcatgtgtctgtagtcccagctactcgggaggctgaggcaggagaatcgcttgaacccaggaaacggaggtcgcagtgagccaagatcatgccactgcactccagcttgggcatcacagcgagactctgtcaaaacaaacaaacaaaaaaacaacttaaagaggtaatttagccatcattcttatgccagcagatataaataaacttggacccatctggtcttcagctaaacctgagacattttaaagtgcatggacagccatggacagcaggccctcctctaacaggggatgcaaggcatggagaaagacaatcagtacccaagctcagccacagaagacaggagtcactcatataacttgtgtttagaagtttttggtagccacgcacactttctgaaatcacactatctggtggtttaatcatatttttaaagacagaatccctgagtgctgagcagattctcaaaacacatttagaatccctgaaattagaaagatcaatgacaaaatatctgtcagccaggccacaaacaggtgtaaaattatgaaaggagtggttggatgtgccaagtttggtaaagtggtgactgcatctgagaaagaggctgtgaggctgaactcttggtggcttccttctgtaacttccagagggagtcttcaacacaggccccgtgctcgtaggaatacggtagcacctatgtaggaagtgcgtggagttttctgtcttctttctgtgtgatttttggcctttttatcagcacttctcccctcccaggagcctggggatgccaaacatccagaatgtgatgggacaagatgggggcaggggcctcacctccctgcagaggtccggccaggtctccttgtccctggacaatctcctgagcctctctgcttggtggagcaggcacctgtgtgcagaattcccactgtggccagcacgaggaagtcttttctagtgaaaatgtgtcttgtggtcaggaataattatcctttcccctgtagccaccaaggagggcaaatagagaaaggtaacctaattgaaggattggtcatgtgaaaagggctacatttgggaagctgggaaaggcctccaggcttctagagcagctagcttgggctggattctcatacccaggctgccccttggattgttctacccaagcttttccctggggtctgggctcactccataaggtaaggtgccttttaccttatggtccttctttagcaggtaacaaaggagcatcaggggcaggctgccctggtggcatcacactggctagtgaggccgtgaatatcttgtcccccagcagggccgacagtttctatcacagaaaacagtgtgttcagtggtgaaaatcgttgcatgcatgttttcatctgagcgtgtccttctcccatactccctatcagccagccctgcctgtagctgctgtatggtgattgcacttggacatcagtccaatgactgcaagtcggcctggattttcacttgcagaggctacagctgcattgtcaggtctcccagccctgcagagagctccctccactggttagcagtgtgttgtgttttccattcatttcagaagagctacattgtgtcactggacatttttaaaaactgtgatttttaataaaaatttaaaatttg

SEQ ID NO: 29870 - DNA, 2850 bp, Homo sapiens
  source 1..2850: mol_type = unassigned DNA
gcgacacctcccagcccaccgaactccgccgccatttcctcgcttggcctaacggttcggccaatcccagcgcgcatcaagaaggactgaggctccgccaatcggaggccgccgatttcgacccttcgcctcggcccggcccaatccaggccccggccccgccgcccccggcccgcccccgcggtgccctctctcctccctctttgtgcgtctcgcgccgccgccgcccgccgcgtgagaggacgggctccgcgcgctccggcagcgcattcgggtcccctccccccgggaggcttgcgaaggagaagccgccgcagaggaaaagcaggtgccggtgcctgtccccgggggcgccatggcgaccggagcgaacgccacgccgttggacttcccaagtaagaagcggaagaggagccgctggaaccaagacacaatggaacagaagacagtgattccaggaatgcctacagttattccccctggacttactcgagaacaagaaagagcttatatagtgcaactgcagatagaagacctgactcgtaaactgcgcacaggagacctgggcatcccccctaaccctgaggacaggtccccttcccctgagcccatctacaatagcgaggggaagcggcttaacacccgagagttccgcacccgcaaaaagctggaagaggagcggcacaacctcatcacagagatggttgcactcaatccggatttcaagccacctgcagattacaaacctccagcaacacgtgtgagtgataaagtcatgattccacaagatgagtacccagaaatcaactttgtggggctgctcatcgggcccagagggaacaccctgaagaacatagagaaggagtgcaatgccaagattatgatccgggggaaagggtctgtgaaagaagggaaggttgggcgcaaagatggccagatgttgccaggagaagatgagccacttcatgccctggttactgccaatacaatggagaacgtcaaaaaggcagtggaacagataagaaacatcctgaagcagggtatcgagactccagaggaccagaatgatctacggaagatgcagcttcgggagttggctcgcttaaatgggacccttcgggaagacgataacaggatcttaagaccctggcagagctcagagacccgcagcattaccaacaccacagtgtgtaccaagtgtggaggggctggccacattgcttcagactgtaaattccaaaggcctggtgatcctcagtcagctcaggataaagcacggatggataaagaatatttgtccctcatggctgaactgggtgaagcacctgtcccagcatctgtgggctccacctctgggcctgccaccacacccctggccagcgcacctcgtcctgctgctcccgccaacaacccacctccaccgtctctcatgtctaccacccagagccgcccaccctggatgaattctggcccttcagagagtcggccctaccacggcatgcatggaggtggtcctggtgggcccggaggtggcccccacagcttcccacacccattacccagcctgacaggtgggcatggtggacatcccatgcagcacaaccccaatggacccccacccccttggatgcagccaccaccaccaccgatgaaccagggcccccaccctcctgggcaccatggccctcctccaatggatcagtacctgggaagtacgcctgtgggctctggggtctatcgcctgcatcaaggaaaaggtatgatgccgccaccacctatgggcatgatgccgccgccgccgccgcctcccagtgggcagcccccaccccctccctctggtcctcttcccccatggcaacaacagcagcagcagcctccgccaccccctccgcccagcagcagtatggcttccagtacccccttgccatggcagcaaagatccctccccgcggcggcgatggcccgagccatgagagtgaggactttccgcgcccattggtgacccttccaggcagacagcctcagcaacgcccctggtggacaggatggttcggcaaagcagcctgagttatttttgtggacggaatcggaacacgctggctccatatcgtgaaatttttattaatttttttctttttcctttgttacttctttatcttttcctttcttcagactccgtccaaggagatgctctccccggtcttctgctgcaatttagattcctttcccttctctccagttctccttcccttaccaaggagaggggagcaaatggttttgggcaagggctttggccattcatgtcaagctggttgtgggtttttcaaggtgccatagccacccccaaagatgtttgtttaaagcgtggggttttttaatctctgccacccttgtcaagggagtcttgtaaagttgccgagggtaggttcatctccaggtttcgggattcccatccgtcctggcgatcctgccagcagtgggtgggcagcctgagctccctcgggctcgcctgccagcctggagttcttcctgtgctccttgatcacctgagctgcctcagattccatttggtcctctccttcctggaaggcttccttttatgttttgttttaatcccaaatgtctgaatgttttgcagtgtgtaggggtttgagccccttgttcattctccttcctttttcctcccgcttccctctccatgaagtgattctgttgacaataatgtatactgcgcgttctcttcactggtttatctgcagaaatttctctgggcttttttcggtgttagattcaacactgcgctaaagcggggatgttccattgaataaaagagcagtgtggttttctggg

SEQ ID NO: 29871 - DNA, 3094 bp, Homo sapiens
  source 1..3094: mol_type = unassigned DNA
cggagctcagttcacgcagtaacaaatgaagtgcgcgctgcgacacctcccagcccaccgaactccgccgccatttcctcgcttggcctaacggttcggccaatcccagcgcgcatcaagaaggactgaggctccgccaatcggaggccgccgatttcgacccttcgcctcggcccggcccaatccaggccccggccccgccgcccccggcccgcccccgcggtgccctctctcctccctctttgtgcgtctcgcgccgccgccgcccgccgcgtgagaggacgggctccgcgcgctccggcagcgcattcgggtcccctccccccgggaggcttgcgaaggagaagccgccgcagaggaaaagcaggtgccggtgcctgtccccgggggcgccatggcgaccggagcgaacgccacgccgttggacttcccaagtaagaagcggaagaggagccgctggaaccaagacacaatggaacagaagacagtgattccaggaatgcctacagttattccccctggacttactcgagaacaagaaagagcttatatagtgcaactgcagatagaagacctgactcgtaaactgcgcacaggagacctgggcatcccccctaaccctgaggacaggtccccttcccctgagcccatctacaatagcgaggggaagcggcttaacacccgagagttccgcacccgcaaaaagctggaagaggagcggcacaacctcatcacagagatggttgcactcaatccggatttcaagccacctgcagattacaaacctccagcaacacgtgtgagtgataaagtcatgattccacaagatgagtacccagaaatcaactttgtggggctgctcatcgggcccagagggaacaccctgaagaacatagagaaggagtgcaatgccaagattatgatccgggggaaagggtctgtgaaagaagggaaggttgggcgcaaagatggccagatgttgccaggagaagatgagccacttcatgccctggttactgccaatacaatggagaacgtcaaaaaggcagtggaacagataagaaacatcctgaagcagggtatcgagactccagaggaccagaatgatctacggaagatgcagcttcgggagttggctcgcttaaatgggacccttcgggaagacgataacaggatcttaagaccctggcagagctcagagacccgcagcattaccaacaccacagtgtgtaccaagtgtggaggggctggccacattgcttcagactgtaaattccaaaggcctggtgatcctcagtcagctcaggataaagcacggatggataaagaatatttgtccctcatggctgaactgggtgaagcacctgtcccagcatctgtgggctccacctctgggcctgccaccacacccctggccagcgcacctcgtcctgctgctcccgccaacaacccacctccaccgtctctcatgtctaccacccagagccgcccaccctggatgaattctggcccttcagagagtcggccctaccacggcatgcatggaggtggtcctggtgggcccggaggtggcccccacagcttcccacacccattacccagcctgacaggtgggcatggtggacatcccatgcagcacaaccccaatggacccccacccccttggatgcagccaccaccaccaccgatgaaccagggcccccaccctcctgggcaccatggccctcctccaatggatcagtacctgggaagtacgcctgtgggctctggggtctatcgcctgcatcaaggaaaaggtatgatgccgccaccacctatgggcatgatgccgccgccgccgccgcctcccagtgggcagcccccaccccctccctctggtcctcttcccccatggcaacaacagcagcagcagcctccgccaccccctccgcccagcagcagtatggcttccagtacccccttgccatggcagcaaaatacgacgactaccaccacgagcgctggcacagggtccatcccgccatggcaacagcagcaggcggctgccgcagcttctccaggagcccctcagatgcaaggcaaccccactatggtgcccctgccccccggggtccagccgcctctgccgcctggggcccctccccctccgccgcctccaccgcctggttccgccggcatgatgatccctccccgcggcggcgatggcccgagccatgagagtgaggactttccgcgcccattggtgacccttccaggcagacagcctcagcaacgcccctggtggacaggatggttcggcaaagcagcctgagttatttttgtggacggaatcggaacacgctggctccatatcgtgaaatttttattaatttttttctttttcctttgttacttctttatcttttcctttcttcagactccgtccaaggagatgctctccccggtcttctgctgcaatttagattcctttcccttctctccagttctccttcccttaccaaggagaggggagcaaatggttttgggcaagggctttggccattcatgtcaagctggttgtgggtttttcaaggtgccatagccacccccaaagatgtttgtttaaagcgtggggttttttaatctctgccacccttgtcaagggagtcttgtaaagttgccgagggtaggttcatctccaggtttcgggattcccatccgtcctggcgatcctgccagcagtgggtgggcagcctgagctccctcgggctcgcctgccagcctggagttcttcctgtgctccttgatcacctgagctgcctcagattccatttggtcctctccttcctggaaggcttccttttatgttttgttttaatcccaaatgtctgaatgttttgcagtgtgtaggggtttgagccccttgttcattctccttcctttttcctcccgcttccctctccatgaagtgattctgttgacaataatgtatactgcgcgttctcttcactggtttatctgcagaaatttctctgggcttttttcggtgttagattcaacactgcgctaaagcggggatgttccattgaataaaagagcagtgtggttttctggg

SEQ ID NO: 29872 - DNA, 3470 bp, Homo sapiens
  source 1..3470: mol_type = unassigned DNA
accgaactccgccgccatttcctcgcttggcctaacggttcggccaatcccagcgcgcatcaagaaggactgaggctccgccaatcggaggccgccgatttcgacccttcgcctcggcccggcccaatccaggccccggccccgccgcccccggcccgcccccgcggtgccctctctcctccctctttgtgcgtctcgcgccgccgccgcccgccgcgtgagaggacgggctccgcgcgctccggcagcgcattcgggtcccctccccccgggaggcttgcgaaggagaagccgccgcagaggaaaagcaggtgccggtgcctgtccccgggggcgccatggcgaccggagcgaacgccacgccgttggacttcccaagtaagaagcggaagaggagccgctggaaccaagacacaatggaacagaagacagtgattccaggaatgcctacagttattccccctggacttactcgagaacaagaaagagcttatatagtgcaactgcagatagaagacctgactcgtaaactgcgcacaggagacctgggcatcccccctaaccctgaggacaggtccccttcccctgagcccatctacaatagcgaggggaagcggcttaacacccgagagttccgcacccgcaaaaagctggaagaggagcggcacaacctcatcacagagatggttgcactcaatccggatttcaagccacctgcagattacaaacctccagcaacacgtgtgagtgataaagtcatgattccacaagatgagtacccagaaatcaactttgtggggctgctcatcgggcccagagggaacaccctgaagaacatagagaaggagtgcaatgccaagattatgatccgggggaaagggtctgtgaaagaagggaaggttgggcgcaaagatggccagatgttgccaggagaagatgagccacttcatgccctggttactgccaatacaatggagaacgtcaaaaaggcagtggaacagataagaaacatcctgaagcagggtatcgagactccagaggaccagaatgatctacggaagatgcagcttcgggagttggctcgcttaaatgggacccttcgggaagacgataacaggatcttaagaccctggcagagctcagagacccgcagcattaccaacaccacagtgtgtaccaagtgtggaggggctggccacattgcttcagactgtaaattccaaaggcctggtgatcctcagtcagctcaggataaagcacggatggataaagaatatttgtccctcatggctgaactgggtgaagcacctgtcccagcatctgtgggctccacctctgggcctgccaccacacccctggccagcgcacctcgtcctgctgctcccgccaacaacccacctccaccgtctctcatgtctaccacccagagccgcccaccctggatgaattctggcccttcagagagtcggccctaccacggcatgcatggaggtggtcctggtgggcccggaggtggcccccacagcttcccacacccattacccagcctgacaggtgggcatggtggacatcccatgcagcacaaccccaatggacccccacccccttggatgcagccaccaccaccaccgatgaaccagggcccccaccctcctgggcaccatggccctcctccaatggatcagtacctgggaagtacgcctgtgggctctggggtctatcgcctgcatcaaggaaaaggtatgatgccgccaccacctatgggcatgatgccgccgccgccgccgcctcccagtgggcagcccccaccccctccctctggtcctcttcccccatggcaacaacagcagcagcagcctccgccaccccctccgcccagcagcagtatggcttccagtacccccttgccatggcagcaaaatacgacgactaccaccacgagcgctggcacagggtccatcccgccatggcaacagcagcaggcggctgccgcagcttctccaggagcccctcagatgcaaggcaaccccactatggtgcccctgccccccggggtccagccgcctctgccgcctggggcccctccccctccgccgcctccaccgcctggttccgccggcatgatgtatgccccgccccctcctcctccgcctcccatggacccttctaactttgtcaccatgatgggcatgggggtggcgggcatgccgcccttcgggatgcctccagctcccccaccgcctccaccacagaactagacttgttttttaagaaaatatatattatatatagagagaattggtctcgtttaaacacgccgaacctcaccatatggagccagacattgggacgcacgcatgtgattgtgtgtgcacgcatgtgtgtgtgtgcacgcactgggctgggccaagcgactgaggattcgcttgggaacgggcaggtggtagtaggggcgccagcttgggctctcctggcgccccgtagcatcgagtgtcttctttgtcttctttctctcctcacccaactccctttgcctctccccaaaccgggccgccaggatccctccccgcggcggcgatggcccgagccatgagagtgaggactttccgcgcccattggtgacccttccaggcagacagcctcagcaacgcccctggtggacaggatggttcggcaaagcagcctgagttatttttgtggacggaatcggaacacgctggctccatatcgtgaaatttttattaatttttttctttttcctttgttacttctttatcttttcctttcttcagactccgtccaaggagatgctctccccggtcttctgctgcaatttagattcctttcccttctctccagttctccttcccttaccaaggagaggggagcaaatggttttgggcaagggctttggccattcatgtcaagctggttgtgggtttttcaaggtgccatagccacccccaaagatgtttgtttaaagcgtggggttttttaatctctgccacccttgtcaagggagtcttgtaaagttgccgagggtaggttcatctccaggtttcgggattcccatccgtcctggcgatcctgccagcagtgggtgggcagcctgagctccctcgggctcgcctgccagcctggagttcttcctgtgctccttgatcacctgagctgcctcagattccatttggtcctctccttcctggaaggcttccttttatgttttgttttaatcccaaatgtctgaatgttttgcagtgtgtaggggtttgagccccttgttcattctccttcctttttcctcccgcttccctctccatgaagtgattctgttgacaataatgtatactgcgcgttctcttcactggtttatctgcagaaatttctctgggcttttttcggtgttagattcaacactgcgctaaagcggggatgttccattgaataaaagagcagtgtggttttctggg

SEQ ID NO: 29873 - DNA, 2854 bp, Homo sapiens
  source 1..2854: mol_type = unassigned DNA
gcgacacctcccagcccaccgaactccgccgccatttcctcgcttggcctaacggttcggccaatcccagcgcgcatcaagaaggactgaggctccgccaatcggaggccgccgatttcgacccttcgcctcggcccggcccaatccaggccccggccccgccgcccccggcccgcccccgcggtgccctctctcctccctctttgtgcgtctcgcgccgccgccgcccgccgcgtgagaggacgggctccgcgcgctccggcagcgcattcgggtcccctccccccgggaggcttgcgaaggagaagccgccgcagaggaaaagcaggtgccggtgcctgtccccgggggcgccatggcgaccggagcgaacgccacgccgttggacttcccaagtaagaagcggaagaggagccgctggaaccaagacacaatggaacagaagacagtgattccaggaatgcctacagttattccccctggacttactcgagaacaagaaagagcttatatagtgcaactgcagatagaagacctgactcgtaaactgcgcacaggagacctgggcatcccccctaaccctgaggacaggtccccttcccctgagcccatctacaatagcgaggggaagcggcttaacacccgagagttccgcacccgcaaaaagctggaagaggagcggcacaacctcatcacagagatggttgcactcaatccggatttcaagccacctgcagattacaaacctccagcaacacgtgtgagtgataaagtcatgattccacaagatgagtacccagaaatcaactttgtggggctgctcatcgggcccagagggaacaccctgaagaacatagagaaggagtgcaatgccaagattatgatccgggggaaagggtctgtgaaagaagggaaggttgggcgcaaagatggccagatgttgccaggagaagatgagccacttcatgccctggttactgccaatacaatggagaacgtcaaaaaggcagtggaacagataagaaacatcctgaagcagggtatcgagactccagaggaccagaatgatctacggaagatgcagcttcgggagttggctcgcttaaatgggacccttcgggaagacgataacaggatcttaagaccctggcagagctcagagacccgcagcattaccaacaccacagtgtgtaccaagtgtggaggggctggccacattgcttcagactgtaaattccaaaggcctggtgatcctcagtcagctcaggataaagcacggatggataaagaatatttgtccctcatggctgaactgggtgaagcacctgtcccagcatctgtgggctccacctctgggcctgccaccacacccctggccagcgcacctcgtcctgctgctcccgccaacaacccacctccaccgtctctcatgtctaccacccagagccgcccaccctggatgaattctggcccttcagagagtcggccctaccacggcatgcatggaggtggtcctggtgggcccggaggtggcccccacagcttcccacacccattacccagcctgacaggtgggcatggtggacatcccatgcagcacaaccccaatggacccccacccccttggatgcagccaccaccaccaccgatgaaccagggcccccaccctcctgggcaccatggccctcctccaatgggtaaatcagtacctgggaagtacgcctgtgggctctggggtctatcgcctgcatcaaggaaaaggtatgatgccgccaccacctatgggcatgatgccgccgccgccgccgcctcccagtgggcagcccccaccccctccctctggtcctcttcccccatggcaacaacagcagcagcagcctccgccaccccctccgcccagcagcagtatggcttccagtacccccttgccatggcagcaaagatccctccccgcggcggcgatggcccgagccatgagagtgaggactttccgcgcccattggtgacccttccaggcagacagcctcagcaacgcccctggtggacaggatggttcggcaaagcagcctgagttatttttgtggacggaatcggaacacgctggctccatatcgtgaaatttttattaatttttttctttttcctttgttacttctttatcttttcctttcttcagactccgtccaaggagatgctctccccggtcttctgctgcaatttagattcctttcccttctctccagttctccttcccttaccaaggagaggggagcaaatggttttgggcaagggctttggccattcatgtcaagctggttgtgggtttttcaaggtgccatagccacccccaaagatgtttgtttaaagcgtggggttttttaatctctgccacccttgtcaagggagtcttgtaaagttgccgagggtaggttcatctccaggtttcgggattcccatccgtcctggcgatcctgccagcagtgggtgggcagcctgagctccctcgggctcgcctgccagcctggagttcttcctgtgctccttgatcacctgagctgcctcagattccatttggtcctctccttcctggaaggcttccttttatgttttgttttaatcccaaatgtctgaatgttttgcagtgtgtaggggtttgagccccttgttcattctccttcctttttcctcccgcttccctctccatgaagtgattctgttgacaataatgtatactgcgcgttctcttcactggtttatctgcagaaatttctctgggcttttttcggtgttagattcaacactgcgctaaagcggggatgttccattgaataaaagagcagtgtggttttctggg

SEQ ID NO: 29874 - DNA, 2309 bp, Homo sapiens
  source 1..2309: mol_type = unassigned DNA
agtaacaaatgaagtgcgcgctgcgacacctcccagcccaccgaactccgccgccatttcctcgcttggcctaacggttcggccaatcccagcgcgcatcaagaaggactgaggctccgccaatcggaggccgccgatttcgacccttcgcctcggcccggcccaatccaggccccggccccgccgcccccggcccgcccccgcggtgccctctctcctccctctttgtgcgtctcgcgccgccgccgcccgccgcgtgagaggacgggctccgcgcgctccggcagcgcattcgggtcccctccccccgggaggcttgcgaaggagaagccgccgcagaggaaaagcaggtgccggtgcctgtccccgggggcgccatggcgaccggagcgaacgccacgccgttggacttcccaagtaagaagcggaagaggagccgctggaaccaagacacaatggaacagaagacagtgattccaggaatgcctacagttattccccctggacttactcgagaacaagaaagagcttatataggtccccttcccctgagcccatctacaatagcgaggggaagcggcttaacacccgagagttccgcacccgcaaaaagctggaagaggagcggcacaacctcatcacagagatggttgcactcaatccggatttcaagccacctgcagattacaaacctccagcaacacgtgtgagtgataaagtcatgattccacaagatgagtacccagaaatcaactttgtggggctgctcatcgggcccagagggaacaccctgaagaacatagagaaggagtgcaatgccaagattatgatccgggggaaagggtctgtgaaagaagggaaggttgggcgcaaagatggccagatgttgccaggagaagatgagccacttcatgccctggttactgccaatacaatggagaacgtcaaaaaggcagtggaacagataagaaacatcctgaagcagggtatcgagactccagaggaccagaatgatctacggaagatgcagcttcgggagttggctcgcttaaatgggacccttcgggaagacgataacaggatcttaagaccctggcagagctcagagacccgcagcattaccaacaccacagtgtgtaccaagtgtggaggggctggccacattgcttcagactgtaaattccaaaggcctggtgatcctcagtcagctcaggataaagcacggatggataaagaatatttgtccctcatggctgaactgggtgaagcacctgtcccagcatctgtgggctccacctctgggcctgccaccacacccctggccagcgcacctcgtcctgctgctcccgccaacaacccacctccaccgtctctcatgtctaccacccagagccgcccaccctggatgaattctggcccttcagagagtcggccctaccacggcatgcatggaggtggtcctggtgggcccggaggtggcccccacagcttcccacacccattacccagcctgacaggtgggcatggtggacatcccatgcagcacaaccccaatggacccccacccccttggatgcagccaccaccaccaccgatgaaccagggcccccaccctcctgggcaccatggccctcctccaatggatcagtacctgggaagtacgcctgtgggctctggggtctatcgcctgcatcaaggaaaaggtatgatgccgccaccacctatgggcatgatgccgccgccgccgccgcctcccagtgggcagcccccaccccctccctctggtcctcttcccccatggcaacaacagcagcagcagcctccgccaccccctccgcccagcagcagtatggcttccagtacccccttgccatggcagcaaagatccctccccgcggcggcgatggcccgagccatgagagtgaggactttccgcgcccattggtgacccttccaggcagacagcctcagcaacgcccctggtggacaggatggttcggcaaagcagcctgagttatttttgtggacggaatcggaacacgctggctccatatcgtgaaatttttattaatttttttctttttcctttgttacttctttatcttttcctttcttcagactccgtccaaggagatgctctccccggtcttctgctgcaatttagattcctttcccttctctccagttctccttcccttaccaaggagaggggagcaaatggttttgggcaagggctttggccattcatgtcaagctggttgtgggtttttcaaggtgccatagccacccccaaagatgtttgtttaaag

SEQ ID NO: 29875 - DNA, 2947 bp, Homo sapiens
  source 1..2947: mol_type = unassigned DNA
cctccccccgggaggcttgcgaaggagaagccgccgcagaggaaaagcaggtgccggtgcctgtccccgggggcgccatggcgaccggagcgaacgccacgccgttgggtaagctgggcccccccgggctgcccccgctccccgggcccaaaggaggcttcgagccgggccctccgcctgcacccgggcctggggcggggctgctggctcccgggccgccgccgcccccgcccgtgggctcgatgggggccctgaccgcggccttccccttcgcggcgctgcctccgccgcctccgccgccgccccctccgcctccccagcagccgccgccgcctccaccgccaccgtcccccggcgcctcgtacccgccgccgcagccgccccctccgccgccgctctaccagcgcgtgtcgccgccgcagccgccgccaccccagccgccgcgtaaggaccagcagccgggcccggccggcggcggaggagacttcccaagtaagaagcggaagaggagccgctggaaccaagacacaatggaacagaagacagtgattccaggaatgcctacagttattccccctggacttactcgagaacaagaaagagcttatatagtgcaactgcagatagaagacctgactcgtaaactgcgcacaggagacctgggcatcccccctaaccctgaggacaggtccccttcccctgagcccatctacaatagcgaggggaagcggcttaacacccgagagttccgcacccgcaaaaagctggaagaggagcggcacaacctcatcacagagatggttgcactcaatccggatttcaagccacctgcagattacaaacctccagcaacacgtgtgagtgataaagtcatgattccacaagatgagtacccagaaatcaactttgtggggctgctcatcgggcccagagggaacaccctgaagaacatagagaaggagtgcaatgccaagattatgatccgggggaaagggtctgtgaaagaagggaaggttgggcgcaaagatggccagatgttgccaggagaagatgagccacttcatgccctggttactgccaatacaatggagaacgtcaaaaaggcagtggaacagataagaaacatcctgaagcagggtatcgagactccagaggaccagaatgatctacggaagatgcagcttcgggagttggctcgcttaaatgggacccttcgggaagacgataacaggatcttaagaccctggcagagctcagagacccgcagcattaccaacaccacagtgtgtaccaagtgtggaggggctggccacattgcttcagactgtaaattccaaaggcctggtgatcctcagtcagctcaggataaagcacggatggataaagaatatttgtccctcatggctgaactgggtgaagcacctgtcccagcatctgtgggctccacctctgggcctgccaccacacccctggccagcgcacctcgtcctgctgctcccgccaacaacccacctccaccgtctctcatgtctaccacccagagccgcccaccctggatgaattctggcccttcagagagtcggccctaccacggcatgcatggaggtggtcctggtgggcccggaggtggcccccacagcttcccacacccattacccagcctgacaggtgggcatggtggacatcccatgcagcacaaccccaatggacccccacccccttggatgcagccaccaccaccaccgatgaaccagggcccccaccctcctgggcaccatggccctcctccaatggatcagtacctgggaagtacgcctgtgggctctggggtctatcgcctgcatcaaggaaaaggtatgatgccgccaccacctatgggcatgatgccgccgccgccgccgcctcccagtgggcagcccccaccccctccctctggtcctcttcccccatggcaacaacagcagcagcagcctccgccaccccctccgcccagcagcagtatggcttccagtacccccttgccatggcagcaaagatccctccccgcggcggcgatggcccgagccatgagagtgaggactttccgcgcccattggtgacccttccaggcagacagcctcagcaacgcccctggtggacaggatggttcggcaaagcagcctgagttatttttgtggacggaatcggaacacgctggctccatatcgtgaaatttttattaatttttttctttttcctttgttacttctttatcttttcctttcttcagactccgtccaaggagatgctctccccggtcttctgctgcaatttagattcctttcccttctctccagttctccttcccttaccaaggagaggggagcaaatggttttgggcaagggctttggccattcatgtcaagctggttgtgggtttttcaaggtgccatagccacccccaaagatgtttgtttaaagcgtggggttttttaatctctgccacccttgtcaagggagtcttgtaaagttgccgagggtaggttcatctccaggtttcgggattcccatccgtcctggcgatcctgccagcagtgggtgggcagcctgagctccctcgggctcgcctgccagcctggagttcttcctgtgctccttgatcacctgagctgcctcagattccatttggtcctctccttcctggaaggcttccttttatgttttgttttaatcccaaatgtctgaatgttttgcagtgtgtaggggtttgagccccttgttcattctccttcctttttcctcccgcttccctctccatgaagtgattctgttgacaataatgtatactgcgcgttctcttcactggtttatctgcagaaatttctctgggcttttttcggtgttagattcaacactgcgctaaagcggggatgttccattgaataaaagagcagtgtggttttctggg

SEQ ID NO: 29876 - DNA, 2317 bp, Homo sapiens
  source 1..2317: mol_type = unassigned DNA
gacgcagtgaggtggccgggctgtgcggcgcaactgtatagactgggggcccactattgctgtccagtccgctggtgtcgggaacaggggtggcgggtgttcagcgctggacggggtgctagctgtgaatgccagcagggcgtgaaagcctcacctgatgacgtgcagcgactcccttctggtcttgaggaaccagaatgggaaccgtaccaaggatagctcctctgcttctacagcaaggcagggttttcatccgggagagacttcccaagtaagaagcggaagaggagccgctggaaccaagacacaatggaacagaagacagtgattccaggaatgcctacagttattccccctggacttactcgagaacaagaaagagcttatatagtgcaactgcagatagaagacctgactcgtaaactgcgcacaggagacctgggcatcccccctaaccctgaggacaggtccccttcccctgagcccatctacaatagcgaggggaagcggcttaacacccgagagttccgcacccgcaaaaagctggaagaggagcggcacaacctcatcacagagatggttgcactcaatccggatttcaagccacctgcagattacaaacctccagcaacacgtgtgagtgataaagtcatgattccacaagatgagtacccagaaatcaactttgtggggctgctcatcgggcccagagggaacaccctgaagaacatagagaaggagtgcaatgccaagattatgatccgggggaaagggtctgtgaaagaagggaaggttgggcgcaaagatggccagatgttgccaggagaagatgagccacttcatgccctggttactgccaatacaatggagaacgtcaaaaaggcagtggaacagataagaaacatcctgaagcagggtatcgagactccagaggaccagaatgatctacggaagatgcagcttcgggagttggctcgcttaaatgggacccttcgggaagacgataacaggatcttaagaccctggcagagctcagagacccgcagcattaccaacaccacagtgtgtaccaagtgtggaggggctggccacattgcttcagactgtaaattccaaaggcctggtgatcctcagtcagctcaggataaagcacggatggataaagaatatttgtccctcatggctgaactgggtgaagcacctgtcccagcatctgtgggctccacctctgggcctgccaccacacccctggccagcgcacctcgtcctgctgctcccgccaacaacccacctccaccgtctctcatgtctaccacccagagccgcccaccctggatgaattctggcccttcagagagtcggccctaccacggcatgcatggaggtggtcctggtgggcccggaggtggcccccacagcttcccacacccattacccagcctgacaggtgggcatggtggacatcccatgcagcacaaccccaatggacccccacccccttggatgcagccaccaccaccaccgatgaaccagggcccccaccctcctgggcaccatggccctcctccaatggatcagtacctgggaagtacgcctgtgggctctggggtctatcgcctgcatcaaggaaaaggtatgatgccgccaccacctatgggcatgatgccgccgccgccgccgcctcccagtgggcagcccccaccccctccctctggtcctcttcccccatggcaacaacagcagcagcagcctccgccaccccctccgcccagcagcagtatggcttccagtacccccttgccatggcagcaaaatacgacgactaccaccacgagcgctggcacagggtccatcccgccatggcaacagcagcaggcggctgccgcagcttctccaggagcccctcagatgcaaggcaaccccactatggtgcccctgccccccggggtccagccgcctctgccgcctggggcccctccccctccgccgcctccaccgcctggttccgccggcatgatgtatgccccgccccctcctcctccgcctcccatggacccttctaactttgtcaccatgatgggcatgggggtggcgggcatgccgcccttcgggatgcctccagctcccccaccgcctccaccacagaactagacttgttttttaagaaaatatatattatatatagagagaattggtctcgtttaaacacgccgaacctcaccatatggagccagacattgggacgcacgcatgtgattgtgtgtgcacgcatgtgtgtgtgtgcacgcactgggctgggccaagcgactgaggattc

SEQ ID NO: 29877 - DNA, 3510 bp, Homo sapiens
  source 1..3510: mol_type = unassigned DNA
ggtcccggaagtgcgccagtcgtaccttcgcggccgcaactcgctcggccgccgccatcttgcgagctcgtcgtactgaccgagcggggaggctgtcttgaggcggcaccgctcaccgacaccgaggcggactggcagccctgagcgtcgcagtcatgccggccggacccgtgcaggcggtgcccccgccgccgcccgtgcccacggagcccaaacagcccacagaagaagaagcatcttcaaaggaggattctgcaccttctaagccagttgtggggattatttaccctcctccagaggtcagaaatattgttgacaagactgccagctttgtggccagaaacgggcctgaatttgaagctaggatccgacagaacgagatcaacaaccccaagttcaactttctgaaccccaatgacccttaccatgcctactaccgccacaaggtcagcgagttcaaggaagggaaggctcaggagccgtccgccgccatccccaaggtcatgcagcagcagcagcagaccacccagcagcagctgccccagaaggtccaagcccaagtaatccaagagaccatcgtgcccaaagagcctcctcctgagtttgagttcattgctgatcctccctctatctcagccttcgacttggatgtggtgaagctgacggctcagtttgtggccaggaatgggcgccagtttctgacccagctgatgcagaaagagcagcgcaactaccagtttgactttctccgcccacagcacagcctcttcaactacttcacgaagctagtggaacagtacaccaagatcttgattccacccaaaggtttattttcaaagctcaagaaagaggctgaaaacccccgagaagttttggatcaggtgtgttaccgagtggaatgggccaaattccaggaacgtgagaggaagaaggaagaagaggagaaggagaaggagcgggtggcctatgctcagatcgactggcatgattttgtggtggtggaaacagtggacttccaacccaatgagcaagggaacttccctccccccaccacgccagaggagctgggggcccgaatcctcattcaggagcgctatgaaaagtttggggagagtgaggaagttgagatggaggtcgagtctgatgaggaggatgacaaacaggagaaggcggaggagcctccttcccagctggaccaggacacccaagtacaagatatggatgagggttcagatgatgaagaagaagggcagaaagtgcccccacccccagagacacccatgcctccacctctgcccccaactccagaccaagtcattgtccgcaaggattatgatcccaaagcctccaagcccttgcctccagcccctgctccagatgagtatcttgtgtcccccattactggggagaagatccccgccagcaaaatgcaggaacacatgcgcattggacttcttgaccctcgctggctggagcagcgggatcgctccatccgtgagaagcagagcgatgatgaggtgtacgcaccaggtctggatattgagagcagcttgaagcagttggctgagcggcgtactgacatcttcggtgtagaggaaacagccattggtaagaagatcggtgaggaggagatccagaagccagaggaaaaggtgacctgggatggccactcaggcagcatggcccggacccagcaggctgcccaggccaacatcaccctccaggagcagattgaggccattcacaaggccaaaggcctggtgccagaggatgacactaaagagaagattggccccagcaagcccaatgaaatccctcaacagccaccgccaccatcttcagccaccaacatccccagctcggctccacccatcacttcagtgccccgaccacccacaatgccacctccagttcgtactacagttgtctccgcagtacccgtcatgccccggcccccaatggcatctgtggtccggctgcccccaggctcagtgatcgcccccatgccgcccatcatccacgcgcccagaatcaacgtggtgcccatgcctccctcggcccctcctattatggccccccgcccaccccccatgattgtgccaacagcctttgtgcctgctccacctgtggcacctgtcccagctccagccccaatgccccctgtgcatcccccacctcccatggaagatgagcccacctccaaaaaactgaagacagaggacagcctcatgccagaggaggagttcctgcgcagaaacaagggtccagtgtccatcaaagtccaggtgcccaacatgcaggataagacggaatggaaactgaatgggcaggtgctggtcttcaccctcccactcacggaccaggtctctgtcattaaggtgaagattcatgaagccacaggcatgcctgcagggaaacagaagctacagtatgagggtatcttcatcaaagattccaactcactggcttactacaacatggccaatggcgcagtcatccacctggccctcaaggagagaggcgggaggaagaagtagacaagaggaacctgctgtcaagtccctgccattttgcctctcctgtctcccaccccctgccccagacccaggagcccccctgaggctttgccttgcctgcatatttgtttcgctcttactcagtttgggaattcaaattgtcctgcagaggttcattcccctgaccctttccccacattggtaagagtagctgggttttctaagccactctctggaatctctttgtgttagggtctcgatttgaggacattcatttcttcagcagcccattagcaactgagagcccagggatgtcctacaggatagtttcatagtgacaggtggcacttggctaatagaatatggctgatattgtcattaatcattttgtaccttgacatgggttgtctaataaaactcggacccttcttgtgaaatcagttaaataagacttgtctcggtcacctgtgccctgtccagactcgaggcagtggtaacactgcacagtgctatgtggcttctctttgaggatttttgggttttgtaactaaattcttgctgccctcatactttttatgtattagaatcatattcgtattgcccttttaaaacattgggatcctccaaaggcctgccccatgtatttaacagtaatacaggaagcatggcaggcaccatgcaaaccaaggatggatggtgcagtccctgtgtcagtgggcggtggtttcctgctggcctggaatcactcatcacctgattgattggctctgtggtcctgggcaggtgcctcataggtgtgtggatatgatgacgtttctttaaaatgtatgtatttaacaaatacttaattgtattaaggtcatgtaccaaggatttgataaagtttaaataatttactctctacttttatccattttatccattttaactcatgtaatcctcatgtgagtattcctgtttaacacttgagtaaactgaggcacagagaacataa

SEQ ID NO: 29878 - DNA, 4923 bp, Homo sapiens
  source 1..4923: mol_type = unassigned DNA
accttcgcggccgcaactcgctcggccgccgccatcttgcgagctcgtcgtactgaccgagcggggaggctgtcttgaggcggcaccgctcaccgacaccgaggcggactggcagccctgagcgtcgcagtcatgccggccggacccgtgcaggcggtgcccccgccgccgcccgtgcccacggagcccaaacagcccacagaagaagaagcatcttcaaaggaggattctgcaccttctaagccagttgtggggattatttaccctcctccagaggtcagaaatattgttgacaagactgccagctttgtggccagaaacgggcctgaatttgaagctaggatccgacagaacgagatcaacaaccccaagttcaactttctgaaccccaatgacccttaccatgcctactaccgccacaaggtcagcgagttcaaggaagggaaggctcagtttgtggccaggaatgggcgccagtttctgacccagctgatgcagaaagagcagcgcaactaccagtttgactttctccgcccacagcacagcctcttcaactacttcacgaagctagtggaacagtacaccaagatcttgattccacccaaaggtttattttcaaagctcaagaaagaggctgaaaacccccgagaagttttggatcaggtgtgttaccgagtggaatgggccaaattccaggaacgtgagaggaagaaggaagaagaggagaaggagaaggagcgggtggcctatgctcagatcgactggcatgattttgtggtggtggaaacagtggacttccaacccaatgagcaagggaacttccctccccccaccacgccagaggagctgggggcccgaatcctcattcaggagcgctatgaaaagtttggggagagtgaggaagttgagatggaggtcgagtctgatgaggaggatgacaaacaggagaaggcggaggagcctccttcccagctggaccaggacacccaagtacaagatatggatgagggttcagatgatgaagaagaagggcagaaagtgcccccacccccagagacacccatgcctccacctctgcccccaactccagaccaagtcattgtccgcaaggattatgatcccaaagcctccaagcccttgcctccagcccctgctccagatgagtatcttgtgtcccccattactggggagaagatccccgccagcaaaatgcaggaacacatgcgcattggacttcttgaccctcgctggctggagcagcgggatcgctccatccgtgagaagcagagcgatgatgaggtgtacgcaccaggtctggatattgagagcagcttgaagcagttggctgagcggcgtactgacatcttcggtgtagaggaaacagccattggtaagaagatcggtgaggaggagatccagaagccagaggaaaaggtgacctgggatggccactcaggcagcatggcccggacccagcaggctgcccaggccaacatcaccctccaggagcagattgaggccattcacaaggccaaaggcctggtgccagaggatgacactaaagagaagattggccccagcaagcccaatgaaatccctcaacagccaccgccaccatcttcagccaccaacatccccagctcggctccacccatcacttcagtgccccgaccacccacaatgccacctccagttcgtactacagttgtctccgcagtacccgtcatgccccggcccccaatggcatctgtggtccggctgcccccaggctcagtgatcgcccccatgccgcccatcatccacgcgcccagaatcaacgtggtgcccatgcctccctcggcccctcctattatggccccccgcccaccccccatgattgtgccaacagcctttgtgcctgctccacctgtggcacctgtcccagctccagccccaatgccccctgtgcatcccccacctcccatggaagatgagcccacctccaaaaaactgaagacagaggacagcctcatgccagaggaggagttcctgcgcagaaacaagggtccagtgtccatcaaagtccaggtgcccaacatgcaggataagacggaatggaaactgaatgggcaggtgctggtcttcaccctcccactcacggaccaggtctctgtcattaaggtgaagattcatgaagccacaggcatgcctgcagggaaacagaagctacagtatgagggtatcttcatcaaagattccaactcactggcttactacaacatggccaatggcgcagtcatccacctggccctcaaggagagaggcgggaggaagaagtagacaagaggaacctgctgtcaagtccctgccattttgcctctcctgtctcccaccccctgccccagacccaggagcccccctgaggctttgccttgcctgcatatttgtttcgctcttactcagtttgggaattcaaattgtcctgcagaggttcattcccctgaccctttccccacattggtaagagtagctgggttttctaagccactctctggaatctctttgtgttagggtctcgatttgaggacattcatttcttcagcagcccattagcaactgagagcccagggatgtcctacaggatagtttcatagtgacaggtggcacttggctaatagaatatggctgatattgtcattaatcattttgtaccttgacatgggttgtctaataaaactcggacccttcttgtgaaatcagttaaataagacttgtctcggtcacctgtgccctgtccagactcgaggcagtggtaacactgcacagtgctatgtggcttctctttgaggatttttgggttttgtaactaaattcttgctgccctcatactttttatgtattagaatcatattcgtattgcccttttaaaacattgggatcctccaaaggcctgccccatgtatttaacagtaatacaggaagcatggcaggcaccatgcaaaccaaggatggatggtgcagtccctgtgtcagtgggcggtggtttcctgctggcctggaatcactcatcacctgattgattggctctgtggtcctgggcaggtgcctcataggtgtgtggatatgatgacgtttctttaaaatgtatgtatttaacaaatacttaattgtattaaggtcatgtaccaaggatttgataaagtttaaataatttactctctacttttatccattttatccattttaactcatgtaatcctcatgtgagtattcctgtttaacacttgagtaaactgaggcacagagaacataagttgcatgccatagtcacacactgtgaaagtgaaaagagaatgtgtgcaaaacacgtcacagtcctggtttctgagtaaaggcaggctgttatctttagaatcaagctatcacagggagataggcaatgctgtgggtgttggaggaaggtgagagcctgttgctaacaatttcctggttttaaagctaaggctgattttattgggaagatctcacatgtgtgtggcccctgagagttcccagtgccttttatttgcagtccttccatttggacctcctagctgccccatcaggtcatctccagggctcagaggggtgagaccatttcccaaggtcacagaaccagctctctagtcaccaccctgcctctccctctcacccagagtcagtaccagttttatggctttattacaaactgctgggtccctcccattttcaacttgattgatgggatgtcatcccttatcctgtctgacatttgcctctggcctggttgctagaagtttgccccaggggcaagagttgaaatttggcttcctgaggtgggctttgtggtttgcgtccctaaagtgagcccactactggttgcttgtccatggccaacaccagaaatcccctgagcactacctgggtctcattccaagaaggaagagggtcaggagacctggggagtctcatattccaagttcttctttctttctgggagcagtgggcagttcatggtgttagggcactcacccccacagactggcaaaccctgcaggacttccgtggctgaggctgtgaccggaggccaggaatgccgttgggtggattgtgagtgaatgggccctttgagctgccctctagagagcaaatccagtttcctggagctcctgaatgaatatctgtactggctcgctcagatgcagaagctccattgaccatgaggccttgtgaacatcagtggccacaggcccagtgtgctgcttggcactgcactagtttaggacctgcagcatgtaggtagcgtcctagtgtttataatacaaagctgctctgcacagcttttctgattcttcttgcaatctcctgaggattatctgccccatttttaaaacgaggtggaatacccaaggtcatgtagccagtgagtgctctggaaagccaaagcagctcatcccttcctggggaccacactgctctgctccaccagaccacactatgaaataggaataagtgctcctgttgcaggactgctgggaaaacaggtggtgtgggacttaagtcaccataattttgaagacttgcatgcagagggctccaggaattgtagacattaaggaatttcactttcagttctacccactacttaagtacttgtcatgtactcttagaggaggccagtaatgatcagaaccattttactttaaaattaataatattgtattagagaatatattaaatggttatattgggttatgttaggatatatacttgaatggaaatacatgtactattagcaatcatatttcatttatccctgtaattagacaagaaagcataatatagctctactcatgggtacacataccagtgtataagatttttagaagtttactttttaaaaataaaagcaaaatgtaagatctt

SEQ ID NO: 29879 - DNA, 2920 bp, Homo sapiens
  source 1..2920: mol_type = unassigned DNA
cttcgcggccgcaactcgctcggccgccgccatcttgcgagctcgtcgtactgaccgagcggggaggctgtcttgaggcggcaccgctcaccgacaccgaggcggactggcagccctgagcgtcgcagtcatgccggccggacccgtgcaggcggtgcccccgccgccgcccgtgcccacggagcccaaacagcccacagaagaagaagcatcttcaaaggaggattctgcaccttctaagccagttgtggggattatttaccctcctccagaggtcagaaatattgttgacaagactgccagctttgtggccagaaacgggcctgaatttgaagctaggatccgacagaacgagatcaacaaccccaagttcaactttctgaaccccaatgacccttaccatgcctactaccgccatccccaaggtcatgcagcagcagcagcagaccacccagcagcagctgccccagaaggtccaagcccaagtaatccaagagaccatcgtgcccaaagagcctcctcctgagtttgagttcattgctgatcctccctctatctcagccttcgacttggatgtggtgaagctgacggctcagtttgtggccaggaatgggcgccagtttctgacccagctgatgcagaaagagcagcgcaactaccagtttgactttctccgcccacagcacagcctcttcaactacttcacgaagctagtggaacagtacaccaagatcttgattccacccaaaggtttattttcaaagctcaagaaagaggctgaaaacccccgagaagttttggatcaggtgtgttaccgagtggaatgggccaaattccaggaacgtgagaggaagaaggaagaagaggagaaggagaaggagcgggtggcctatgctcagatcgactggcatgattttgtggtggtggaaacagtggacttccaacccaatgagcaagggaacttccctccccccaccacgccagaggagctgggggcccgaatcctcattcaggagcgctatgaaaagtttggggagagtgaggaagttgagatggaggtcgagtctgatgaggaggatgacaaacaggagaaggcggaggagcctccttcccagctggaccaggacacccaagtacaagatatggatgagggttcagatgatgaagaagaagggcagaaagtgcccccacccccagagacacccatgcctccacctctgcccccaactccagaccaagtcattgtccgcaaggattatgatcccaaagcctccaagcccttgcctccagcccctgctccagatgagtatcttgtgtcccccattactggggagaagatccccgccagcaaaatgcaggaacacatgcgcattggacttcttgaccctcgctggctggagcagcgggatcgctccatccgtgagaagcagagcgatgatgaggtgtacgcaccaggtctggatattgagagcagcttgaagcagttggctgagcggcgtactgacatcttcggtgtagaggaaacagccattggtaagaagatcggtgaggaggagatccagaagccagaggaaaaggtgacctgggatggccactcaggcagcatggcccggacccagcaggctgcccaggccaacatcaccctccaggagcagattgaggccattcacaaggccaaaggcctggtgccagaggatgacactaaagagaagattggccccagcaagcccaatgaaatccctcaacagccaccgccaccatcttcagccaccaacatccccagctcggctccacccatcacttcagtgccccgaccacccacaatgccacctccagttcgtactacagttgtctccgcagtacccgtcatgccccggcccccaatggcatctgtggtccggctgcccccaggctcagtgatcgcccccatgccgcccatcatccacgcgcccagaatcaacgtggtgcccatgcctccctcggcccctcctattatggccccccgcccaccccccatgattgtgccaacagcctttgtgcctgctccacctgtggcacctgtcccagctccagccccaatgccccctgtgcatcccccacctcccatggaagatgagcccacctccaaaaaactgaagacagaggacagcctcatgccagaggaggagttcctgcgcagaaacaagggtccagtgtccatcaaagtccaggtgcccaacatgcaggataagacggaatggaaactgaatgggcaggtgctggtcttcaccctcccactcacggaccaggtctctgtcattaaggtgaagattcatgaagccacaggcatgcctgcagggaaacagaagctacagtatgagggtatcttcatcaaagattccaactcactggcttactacaacatggccaatggcgcagtcatccacctggccctcaaggagagaggcgggaggaagaagtagacaagaggaacctgctgtcaagtccctgccattttgcctctcctgtctcccaccccctgccccagacccaggagcccccctgaggctttgccttgcctgcatatttgtttcgctcttactcagtttgggaattcaaattgtcctgcagaggttcattcccctgaccctttccccacattggtaagagtagctgggttttctaagccactctctggaatctctttgtgttagggtctcgatttgaggacattcatttcttcagcagcccattagcaactgagagcccagggatgtcctacaggatagtttcatagtgacaggtggcacttggctaatagaatatggctgatattgtcattaatcattttgtaccttgacatgggttgtctaataaaactcggacccttcttgtgaaatcagttaaataagacttgtctcggtcacctgtgccctgtcca

SEQ ID NO: 29880 - DNA, 1649 bp, Homo sapiens
  source 1..1649: mol_type = unassigned DNA
ggaagtgctttctttgcccgccgttcgccaaacgaagtcgtggaggtggcgaaacgaggaggagataacgcggccttgggctctggtgtctcccagtctgctaaagccctaaggccatcaccatggacttccagcatcgccccgggggcaagaccgggagcgggggcgtggcctcctcctccgagagcaaccgtgaccgcagggagcgcctccggcagctggccctggagaccatcgacatcaacaaggacccgtacttcatgaagaaccacctgggctcctatgaatgcaaactctgcctgacacttcacaacaatgaggggagctacctggcacatacgcaggggaagaagcaccagaccaacctggcccggcgagcagccaaggaggccaaggaggcccctgcccagcccgcgcctgagaaggtcaaggtggaggtgaagaagtttgtgaagatcggccgcccgggctacaaagtgaccaagcagagagactcggagatgggccagcagagcctcctcttccagattgactaccctgagatcgccgagggcatcatgccacgtcaccgcttcatgtctgcgtacgagcagaggatcgagcctccggaccggcgctggcagtacctgctcatggccgccgagccctacgagaccattgccttcaaggtgccgagcagagagatcgacaaggcggagggcaagttctggacacactggaaccgggagaccaagcagttcttcctccagttccactttaagatggagaagcccccggctccacccagcctccctgctggcccccctggggtgaagcggcctccacccccgctgatgaacggtctgccccctcggccaccgctgcctgagtctttgccaccgcccccgccaggaggcctgcctctgccacccatgccccccacagggcctgcgccctcagggcccccgggaccaccccagctacccccgccagctccaggggtccaccccccggccccagtggtgcatccccctgcatctggggtccatcccccagctcctggcgtccaccccccagctcctggcgtccatcccccagcccctggggtccacccaccaacctctggggtccaccccccagctcctggagtccaccctccagcccccggggttcacccaccagcccccggagtccacccaccagcccctggggttcacccaccagccccaggggtccatcctcccccatcagcgggggttcacccccaggccccgggggtgcacccagcagcccccgccgttcaccctcaggccccaggggtgcacccaccagccccagggatgcaccctcaggccccgggggtccacccccaacctcccggggtccatccgtcggctcctggggtccaccctcagcctccgggagttcacccctcaaatcctggggtgcaccccccaactcccatgcccccaatgctgaggcccccacttccctccgaaggcccagggaacatacctccccctcccccaaccaactgagaagctgctccctcccccagcaagcccagcgccaggtgctcttgccttttcccactgagagaaggctgctcttttgtactgccccccgctcattaaacagcctcccccagccctgagtgcactgatgtccgc

SEQ ID NO: 29881 - DNA, 4336 bp, Homo sapiens
  source 1..4336: mol_type = unassigned DNA
agtgcagcccccagctatttttctccgtggcggcggcgacgagcggaagttcttgggagcgccagttccgtctgtgtgttcgagtggacaaaatggcgaagatcgccaagactcacgaagatattgaagcacagattcgagaaattcaaggcaagaaggcagctcttgatgaagctcaaggagtgggcctcgattctacaggttattatgaccaggaaatttatggtggaagtgacagcagatttgctggatacgtgacatcaattgctgcaactgaacttgaagatgatgacgatgactattcatcatctacgagtttgcttggtcagaagaagccaggatatcatgcccctgtggcattgcttaatgatataccacagtcaacagaacagtatgatccatttgctgagcacagacctccaaagattgcagaccgggaagatgaatacaaaaagcataggcggaccatgataatttccccagagcgtcttgatccttttgcagatggagggaaaacccctgatcctaaaatgaatgctaggacttacatggatgtaatgcgagaacaacacttgactaaagaagaacgagaaattaggcaacagctagcagaaaaagctaaagctggagaactaaaagtcgtcaatggagcagcagcgtcccagcctccatcaaaacgaaaacggcgttgggatcaaacagctgatcagactcctggtgccactcccaaaaaactatcaagttgggatcaggcagagacccctgggcatactccttccttaagatgggatgagacaccaggtcgtgcaaagggaagcgagactcctggagcaaccccaggctcaaaaatatgggatcctacacctagccacacaccagcgggagctgctactcctggacgaggtgatacaccaggccatgcgacaccaggccatggaggcgcaacttccagtgctcgtaaaaacagatgggatgaaacccccaaaacagagagagatactcctgggcatggaagtggatgggctgagactcctcgaacagatcgaggtggagattctattggtgaaacaccgactcctggagccagtaaaagaaaatcacggtgggatgaaacaccagctagtcagatgggtggaagcactccagttctgacccctggaaagacaccaattggcacaccagccatgaacatggctacccctactccaggtcacataatgagtatgactcctgaacagcttcaggcttggcggtgggaaagagaaattgatgagagaaatcgcccactttctgatgaggaattagatgctatgttcccagaaggatataaggtacttcctcctccagctggttatgttcctattcgaactccagctcgaaagctgacagctactccaacacctttgggtggtatgactggtttccacatgcaaactgaagatcgaactatgaaaagtgttaatgaccagccatctggaaatcttccatttttaaaacctgatgatattcaatactttgataaactattggttgatgttgatgaatcaacacttagtccagaagagcaaaaagagagaaaaataatgaagttgcttttaaaaattaagaatggaacaccaccaatgagaaaggctgcattgcgtcagattactgataaagctcgtgaatttggagctggtcctttgtttaatcagattcttcctctgctgatgtctcctacacttgaggatcaagagcgtcatttacttgtgaaagttattgataggatactgtacaaacttgatgacttagttcgtccatatgtgcataagatcctcgtggtcattgaaccgctattgattgatgaagattactatgctagagtggaaggccgagagatcatttctaatttggcaaaggctgctggtctggctactatgatctctaccatgagacctgatatagataacatggatgagtatgtccgtaacacaacagctagagcttttgctgttgtagcctctgccctgggcattccttctttattgcccttcttaaaagctgtgtgcaaaagcaagaagtcctggcaagcgagacacactggtattaagattgtacaacagatagctattcttatgggctgtgccatcttgccacatcttagaagtttagttgaaatcattgaacatggtcttgtggatgagcagcagaaagttcggaccatcagtgctttggccattgctgccttggctgaagcagcaactccttatggtatcgaatcttttgattctgtgttaaagcctttatggaagggtatccgccaacacagaggaaagggtttggctgctttcttgaaggctattgggtatcttattcctcttatggatgcagaatatgccaactactatactagagaagtgatgttaatccttattcgagaattccagtctcctgatgaggaaatgaaaaaaattgtgctgaaggtggtaaaacagtgttgtgggacagatggtgtagaagcaaactacattaaaacagagattcttcctcccttttttaaacacttctggcagcacaggatggctttggatagaagaaattaccgacagttagttgatactactgtggagttggcaaacaaagtaggtgcagcagaaattatatccaggattgtggatgatctgaaagatgaagccgaacagtacagaaaaatggtgatggagacaattgagaaaattatgggtaatttgggagcagcagatattgatcataaacttgaagaacaactgattgatggtattctttatgctttccaagaacagactacagaggactcagtaatgttgaacggctttggcacagtggttaatgctcttggcaaacgagtcaaaccatacttgcctcagatctgtggtacagttttgtggcgtttaaataacaaatctgctaaagttaggcaacaggcagctgacttgatttctcgaactgctgttgtcatgaagacttgtcaagaggaaaaattgatgggacacttgggtgttgtattgtatgagtatttgggtgaagagtaccctgaagtattgggcagcattcttggagcactgaaggccattgtaaatgtcataggtatgcataagatgactccaccaattaaagatctgctgcctagactcacccccatcttaaagaacagacatgaaaaagtacaagagaattgtattgatcttgttggtcgtattgctgacaggggagctgaatatgtatctgcaagagagtggatgaggatttgctttgagcttttagagctcttaaaagcccacaaaaaggctattcgtagagccacagtcaacacatttggttatattgcaaaggccattggccctcatgatgtattggctacacttctgaacaacctcaaagttcaagaaaggcagaacagagtttgtaccactgtagcaatagctattgttgcagaaacatgttcaccctttacagtactccctgccttaatgaatgaatacagagttcctgaactgaatgttcaaaatggagtgttaaaatcgctttccttcttgtttgaatatattggtgaaatgggaaaagactacatttatgccgtaacaccgttacttgaagatgctttaatggatagagaccttgtacacagacagacggctagtgcagtggtacagcacatgtcacttggggtttatggatttggttgtgaagattcgctgaatcacttgttgaactatgtatggcccaatgtatttgagacatctcctcatgtaattcaggcagttatgggagccctagagggcctgagagttgctattggaccatgtagaatgttgcaatattgtttacagggtctgtttcacccagcccggaaagtcagagatgtatattggaaaatttacaactccatctacattggttcccaggacgctctcatagcacattacccaagaatctacaacgatgataagaacacctatattcgttatgaacttgactatatcttataattttattgtttattttgtgtttaatgcacagctacttcacaccttaaacttgctttgatttggtgatgtaaacttttaaacattgcagatcagtgtagaactggtcatagaggaagagctagaaatccagtagcatgatttttaaataacctgtctttgtttttgatgttaaacagtaaatgccagtagtgaccaagaacacagtgattatatacactatactggagggatttcatttttaattcatctttatgaagatttagaactcattccttgtgtttaaagggaatgtttaattgagaaataaacatttgtgtacaaaatgctaa

SEQ ID NO: 29882 - DNA, 600 bp, Homo sapiens
  source 1..600: mol_type = unassigned DNA
gttccgtctgtgtgttcgagtggacaaaatggcgaagatcgccaagactcacgaagatattgaagcacagattcgagaaattcaaggcaagaaggcagctcttgatgaagctcaaggagtgggcctcgattctacaggttattatgaccaggaaatttatggtggaagtgacagcagatttgctggatacgtgacatcaattgctgcaactgaacttgaagatgatgacgatgactattcatcatctacgagtttgcttggtcagaagaagccaggatatcatgcccctgtggcattgcttaatgatataccacagtcaacagaacagtatgatccatttgctgagcacagacctccaaagattgcagaccgggaagatgaatacaaaaagcataggcggaccatgataatttccccagagcgtcttgatccttttgcagatggcttctattctgctgcttgaagtcagaactgctgatggagacaaaggcacgaaagtgagggaaaacccctgatcctaaaatgaatgctaggacttacatggatgtaatgcgagaacaacacttgactaaagaagaacgagaaattaggcaacagcta

SEQ ID NO: 29883 - DNA, 651 bp, Homo sapiens
  source 1..651: mol_type = unassigned DNA
agctatttttctccgtggcggcggcgacgagcggaagttcttgggagcgccagttccgtctgtgtgttcgagtggacaaaatggcgaagatcgccaagactcacgaagatattgaagcacagattcgagaaattcaaggcaagaaggcagctcttgatgaagctcaaggagtgggcctcgattctacaggttattatgaccaggaaatttatggtggaagtgacagcagatttgctggatacgtgacatcaattgctgcaactgaacttgaagatgatgacgatgactattcatcatctacgagtttgcttggtcagaagaagccaggatatcatgcccctgtggcattgcttaatgatataccacagtcaacagaacagtatgatccatttgctgagcacagacctccaaagattgcagaccgggaagatgaatacaaaaagcataggcggaccatgataatttccccagagcgtcttgatccttttgcagatggcttctattctgctgcttgaagtcagaactgctgatggagacaaaggcacgaaagtgtacgtattccggattagcaacccaggaacccatcacttctgaagactctaaactgtgctgtcattttgtttttatatgcattaaaatatttgttttaaa

SEQ ID NO: 29884 - DNA, 2903 bp, Homo sapiens
  source 1..2903: mol_type = unassigned DNA
gaggctggccccagcttccgggttggtcgcgcgccttcctgcggctaagatggcgacggagcatcccgagcctcccaaagcagaattgcagctgccgccgccgccacctccaggccactatggcgcctgggctgcccaggagcttcaggccaagttggcagagatcggagctccgatccagggtaatcgcgaggagctggtggagcggctgcagagctacacccgccagactggcatcgtgctgaatcggccggttttgagaggggaagatggggacaaagccgctccacctcccatgtcggcacagctccctggaattcccatgccaccaccacctttgggactcccccctctgcagcctcctccgccacccccaccacctccaccaggccttggccttggctttcctatggcccacccaccaaatttggggcccccgcctcctctccgtgtgggtgagccagtggcactgtcagaggaggagcggctgaagttggctcagcagcaggcggcattgctgatgcagcaggaggagcgtgccaagcagcagggagatcattcgctgaaggaacatgagctcttggagcagcagaagcgggcagctgtgttactggagcaggaacgacagcaggagattgccaagatgggcaccccagtccctcggcccccacaagacatgggccagattggtgtgcgcactcctctgggtcctcgagtagctgctccagtgggcccagtgggccccactcctacagttttgcccatgggagcccctgttccccggcctcgtggtcccccaccgccccctggagatgagaacagagagatggatgacccctctgtgggccccaagatcccccaggctttggagaagatcctgcagctgaaggagagccgccaggaagagatgaattctcagcaggaggaagaggaaatggaaacagatgctcgctcgtccctgggccagtcagcgtcagagactgaggaggacacagtgtccgtatctaaaaaggagaaaaaccggaagcgtaggaaccgaaagaagaagaaaaagccccagcgggtgcgaggggtgtcctctgagagctctggggaccgggagaaagactcaacccggtcccgtggctctgattccccagcagctgatgttgagattgagtatgtgactgaagaacctgaaatttacgagcccaactttatcttctttaagaggatctttgaggcttttaagctcactgatgatgtgaagaaggagaaagagaaggagccagagaaacttgacaaactggagaactctgcagcccccaagaagaagggatttgaagaggagcacaaggacagtgatgatgacagcagtgatgacgagcaggaaaagaagccagaagcccccaagctgtccaagaagaagttgcgccgaatgaaccgcttcactgtggctgaactcaagcagctggtggctcggcccgatgtcgtggagatgcacgatgtgacagcgcaggaccctaagctcttggttcacctcaaggccactcggaactctgtgcctgtgccacgccactggtgttttaagcgcaaatacctgcagggcaaacggggcattgagaagccccccttcgagctgccagacttcatcaaacgcacaggcatccaggagatgcgagaggccctgcaggagaaggaagaacagaagaccatgaagtcaaaaatgcgagagaaagttcggcctaagatgggcaaaattgacatcgactaccagaaactgcatgatgccttcttcaagtggcagaccaagccaaagctgaccatccatggggacctgtactatgaggggaaggagttcgagacacgactgaaggagaagaagccaggagatctgtctgatgagctaaggatttccttggggatgccagtaggaccaaatgcccacaaggtccctcccccatggctgattgccatgcagcgatatggaccacccccatcgtatcccaacctgaaaatccctgggctgaactcgcccatccctgagagctgttcctttgggtaccatgctggtggctggggcaaacctccagtggatgagactgggaaaccgctctatggggacgtgtttggaaccaatgctgctgaatttcagaccaagactgaggaagaagagattgatcggaccccttggggggaactggaaccatctgatgaagaatcctcagaagaagaggaagaggaagaaagtgatgaagacaaaccagatgagacaggctttattacccctgcagacagtggccttatcactcctggaggcttttcatcagtgcctgctggaatggagacccctgaactcattgagctgaggaagaagaagattgaggaggcgatggacggaagtgagacacctcagctcttcactgtgttgccagagaagagaacagccactgttggaggggccatgatgggatcaacccacatttatgacatgtccacggttatgagccggaagggcccggctcctgagctgcaaggtgtggaagtggcgctggcgcctgaagagttggagctggatcctatggccatgacccagaagtatgaggagcatgtgcgggagcagcaggctcaagtagagaaggaggacttcagtgacatggtggctgagcacgctgccaaacagaagcaaaaaaaacggaaagctcagccccaggacagccgtgggggcagcaagaaatataaggagttcaagttttaggtcccctcacactagccctttttttggccctacgtctggatgcctgggcttcacacaagaaccacctctcccgcagttcccaaggacttgtcatttcatgttcttattttagacctgttttgtaaataaagctgtttcccaaggaaagagatgaatatttaacact

SEQ ID NO: 29885 - DNA, 2553 bp, Homo sapiens
  source 1..2553: mol_type = unassigned DNA
gctaagatggcgacggagcatcccgagcctcccaaagcagaattgcagctgccgccgccgccacctccaggccactatggcgcctgggctgcccaggagcttcaggccaagttggcagagatcggagctccgatccagggtaatcgcgaggagctggtggagcggctgcagagctacacccgccagactggcatcgtgctgaatcggccggttttgagaggggaagatggggacaaagccgctccacctcccatgtcggcacagctccctggaattcccatgccaccaccacctttgggactcccccctctgcagcctcctccgccacccccaccacctccaccaggccttggccttggctttcctatggcccacccaccaaatttggggcccccgcctcctctccgtgtgggtgagccagtggcactgtcagaggaggagcggctgaagttggctcagcagcaggcggcattgctgatgcagcaggaggagcgtgccaagcagggagatcattcgctgaaggaacatgagctcttggagcagcagaagcgggcagctgtgttactggagcaggaacgacagcaggaggaagaggaaatggaaacagatgctcgctcgtccctgggccagtcagcgtcagagactgaggaggacacagtgtccgtatctaaaaaggagaaaaaccggaagcgtaggaaccgaaagaagaagaaaaagccccagcgggtgcgaggggtgtcctctgagagctctggggaccgggagaaagactcaacccggtcccgtggctctgattccccagcagctgatgttgagattgagtatgtgactgaagaacctgaaatttacgagcccaactttatcttctttaagaggatctttgaggcttttaagctcactgatgatgtgaagaaggagaaagagaaggagccagagaaacttgacaaactggagaactctgcagcccccaagaagaagggatttgaagaggagcacaaggacagtgatgatgacagcagtgatgacgagcaggaaaagaagccagaagcccccaagctgtccaagaagaagttgcgccgaatgaaccgcttcactgtggctgaactcaagcagctggtggctcggcccgatgtcgtggagatgcacgatgtgacagcgcaggaccctaagctcttggttcacctcaaggccactcggaactctgtgcctgtgccacgccactggtgttttaagcgcaaatacctgcagggcaaacggggcattgagaagccccccttcgagctgccagacttcatcaaacgcacaggcatccaggagatgcgagaggccctgcaggagaaggaagaacagaagaccatgaagtcaaaaatgcgagagaaagttcggcctaagatgggcaaaattgacatcgactaccagaaactgcatgatgccttcttcaagtggcagaccaagccaaagctgaccatccatggggacctgtactatgaggggaaggagttcgagacacgactgaaggagaagaagccaggagatctgtctgatgagctaaggatttccttggggatgccagtaggaccaaatgcccacaaggtccctcccccatggctgattgccatgcagcgatatggaccacccccatcgtatcccaacctgaaaatccctgggctgaactcgcccatccctgagagctgttcctttgggtaccatgctggtggctggggcaaacctccagtggatgagactgggaaaccgctctatggggacgtgtttggaaccaatgctgctgaatttcagaccaagactgaggaagaagagattgatcggaccccttggggggaactggaaccatctgatgaagaatcctcagaagaagaggaagaggaagaaagtgatgaagacaaaccagatgagacaggctttattacccctgcagacagtggccttatcactcctggaggcttttcatcagtgcctgctggaatggagacccctgaactcattgagctgaggaagaagaagattgaggaggcgatggacggaagtgagacacctcagctcttcactgtgttgccagagaagagaacagccactgttggaggggccatgatgggatcaacccacatttatgacatgtccacggttatgagccggaagggcccggctcctgagctgcaaggtgtggaagtggcgctggcgcctgaagagttggagctggatcctatggccatgacccagaagtatgaggagcatgtgcgggagcagcaggctcaagtagagaaggaggacttcagtgacatggtggctgagcacgctgccaaacagaagcaaaaaaaacggaaagctcagccccaggacagccgtgggggcagcaagaaatataaggagttcaagttttaggtcccctcacactagccctttttttggccctacgtctggatgcctgggcttcacacaagaaccacctctcccgcagttcccaaggacttgtcatttcatgttcttattttagacctgttttgtaaataaagctgtttcccaaggaaagagatg

SEQ ID NO: 29886 - DNA, 6969 bp, Homo sapiens
  source 1..6969: mol_type = unassigned DNA
gcctttttccgccgcgcgccaccagaatgtccctgtcttgaggtctaatggcggacgccagtatgttggagttggtggtggcttaagttttgaagggaggtagcatccgttggatatccacaccatccttctcgctgcaggctttcttggactccgtactgttggtgtaaccaaggcctggaggtctgggtggctcaggtttcctgcagccatgtttctgtacaacttaaccttgcagagagccactggcatcagctttgccattcatggaaacttttctggaaccaaacaacaagaaattgttgtttcccgtgggaagatcttggagctgcttcgcccagaccccaacactggcaaagtacataccctactcactgtggaagtattcggtgttatccggtcactcatggcctttaggctgacaggtggcaccaaagactacattgtagttggcagtgactctggtcgaattgttattttggaataccagccatctaagaatatgtttgagaagattcaccaagaaacctttggcaagagtggatgccgtcgcatcgttcctggccagttcttagctgtggatcccaaagggcgagccgttatgattagtgccattgagaaacagaaattggtgtatattttgaacagagatgctgcagcccgacttaccatttcatctcccctggaagcccacaaagcaaacactttagtgtatcatgtagttggagtagatgtcggatttgaaaatccaatgtttgcttgtctggaaatggattatgaggaagcagacaatgatccaacaggggaagcagcagctaatacccagcagacacttactttctatgagctagaccttggtttaaatcatgtggtccgaaaatacagtgaacctttggaggaacacggcaacttccttattacagttccaggagggtcagatggtccaagtggagtactgatctgctctgaaaactatattacttacaagaactttggtgaccagccagatatccgctgtccaattcccaggaggcggaatgacctggatgaccctgaaagaggaatgatttttgtctgctctgcaacccataaaaccaaatcgatgttcttctttttggctcaaactgagcagggagatatctttaagatcactttggagacagatgaagatatggttactgagatccggctcaaatattttgatactgtacccgttgctgctgccatgtgtgtgcttaaaacagggttcctttttgtagcatcagaatttggaaaccattacttatatcaaattgcacatcttggagatgatgatgaagaacctgagttttcatcagccatgcctctggaagaaggagacacattcttttttcagccaagaccacttaaaaaccttgtgctggttgatgagttggacagcctctctcccattctgttttgccagatagctgatctggccaatgaagatactccacagttgtatgtggcctgtggtaggggaccccgatcatctctgagagtcctaagacatggacttgaggtgtcagaaatggctgtttctgagctacctggtaaccccaacgctgtctggacagtgcgtcgacacattgaagatgagtttgatgcctacatcattgtgtctttcgtgaatgccaccctagtgttgtccattggagaaactgtagaagaagtgactgactctgggttcctggggaccaccccgaccttgtcctgctccttattaggagatgatgccttggtgcaggtctatccagatggcattcggcacatacgagcagacaagagagtcaatgagtggaagacccctggaaagaaaacaattgtgaagtgtgcagtgaaccagcgacaagtggtgattgccctgacaggaggagagctggtctatttcgagatggatccttcaggacagctgaatgagtacacagaacggaaggagatgtcagcagatgtggtgtgcatgagtctggccaatgtaccccctggagagcagcggtctcgcttcctggctgtggggcttgtggacaacactgtcagaatcatctccctggatccctcagactgtttgcaacctctaagcatgcaggctctcccagcccagcctgagtccttgtgtatcgtggaaatgggtgggactgagaagcaggatgagctgggtgagaggggctcgattggcttcctatacctgaatattgggctacagaacggtgtgctgctgaggactgtcttggaccctgtcactggggatttgtctgatactcgcactcggtacctggggtcccgtcctgtgaagctcttccgagtccgaatgcaaggccaggaggcagtattggccatgtcaagccgctcatggttgagctattcttaccaatctcgcttccatctcaccccactgtcttacgagacactggaatttgcatcgggttttgcctcggaacagtgtcccgagggcattgtggccatctccaccaacaccctacggattttggcattagagaagctcggtgctgtcttcaatcaagtagccttcccactgcagtacacacccaggaaatttgtcatccaccctgagagtaacaaccttattatcattgaaacggaccacaatgcctacactgaggccacgaaagctcagagaaagcagcagatggcagaggaaatggtggaagcagcaggggaggatgagcgggagctggccgcagagatggcagcagcattcctcaatgaaaacctccctgaatccatctttggagctcccaaggctggcaatgggcagtgggcctctgtgatccgagtgatgaatcccattcaagggaacacactggaccttgtccagctggaacagaatgaggcagcttttagtgtggctgtgtgcaggttttccaacactggtgaagactggtatgtgctggtgggtgtggccaaggacctgatactaaacccccgatctgtggcagggggcttcgtctatacttacaagcttgtgaacaatggggaaaaactggagtttttgcacaagactcctgtggaagaggtccctgctgctattgccccattccaggggagggtgttgattggtgtggggaagctgttgcgtgtctatgacctgggaaagaagaagttactccgaaaatgtgagaataagcatattgccaattatatctctgggatccagactatcggacatagggtaattgtatctgatgtccaagaaagtttcatctgggttcgctacaagcgtaatgaaaaccagcttatcatctttgctgatgatacctacccccgatgggtcactacagccagcctcctggactatgacactgtggctggggcagacaagtttggcaacatatgtgtggtgaggctcccacctaacaccaatgatgaagtagatgaggatcctacaggaaacaaagccctgtgggaccgtggcttgctcaatggggcctcccagaaggcagaggtgatcatgaactaccatgtcggggagacggtgctgtccttgcagaagaccacgctgatccctggaggctcagaatcacttgtctataccaccttgtctggaggaattggcatccttgtgccattcacgtcccatgaggaccatgacttcttccagcatgtggaaatgcacctgcggtctgaacatccccctctctgtgggcgggaccacctcagctttcgctcctactacttccctgtgaagaatgtgattgatggagacctctgtgagcagttcaattccatggaacccaacaaacaaaagaacgtctctgaagaactggaccgaaccccacccgaagtgtccaagaaactcgaggatatccggacccgctacgccttctgagccctcctttcccggtggggcttgccagagactgtgtgttttgtttcccccaccaccatcactgccacctggcttctgccatgtggcaggagggtgactggataattaagactgcattatgaaagtcaacagctctttcccctcagctcttctcctggaatgactggcttcccctcaaattggcactgagatttgctacacttctccccacctggtacatgatacatgaccccaggttccagtgtagaacctgagtcccccattccccaaagccatccctgcattgatatgtcttgactctcctgtctacttttgcacacacccttaatttttaattggttttcttgtaaatacagttttgtacaatgttatctctgtgggaggaaggaggcaggctgtggtgggactgggtagggtatagtatcactcctgagttccactgctctagaatctaaccagaaatagaaacctagtttttaaggtgactggcatccatgtgtcttgttctggagatgaggatgtaggtgggaggtttgaacccaagttagagcaggaagaactgagtagactccttccttccagataccgacttggacttgcggcactctgtggctccccacccccaggtctgtggtggtttctttgttttttcctggttctttttgctgtgctgatgaaacatgacctcaataaccatgtgtatacccacccctcttcccactgggtattgaggaagggtggctgattcttcctcctcttctactctgaggatgttagtatggggattttagcatgaattctagctggggagtcttaacagatgccccttttactgatacagcacctaaagcgatctttggctccataggaccataggaagggtcagtacagaagaacctagatactgccctgcccctgagaactgtgtatatgtggggcctgtctgcagcacccatctcaggtgggttccagagggcctttagggtataatgagagcctgttaggtggaagaggcccagttccagaaatgttccagcccacccctgagaattcctcctgtttagttgtgtgggaagccctcgtcttccaggctgtccttgcgccttgaacctggagaagtgagctcactgttctcaatacttcacaaatgtaaaactttctttcgtctgcatgtgctcagccatctaaattgagcaaatgatctggtgagcactgggttagaatcaggaatggtggaatacaatctgaacctctcagagcccagaacagagggttcctgacactgtgacactgtctcctggaactaagtatctcttgaatcatgacttggttttagatcagtcaagagagacccaggttttgccaggaatcgaatccctaaataacatgtttttttctcacttagctcatgaatttgcatagtagacagtagttctgaattagattttgaaaacctaatttcagggctcattttttcctgtggccctaaatccattctatcaaattgtgtgatactgacatgcagtcatctgaggaactcagcgtagatacttgagcagctcctcgcctcttttctaactcaagtttgactaaaatacatacactccgtacagaaggtagggggttatgtaagaaaggaaaacctaatctatggaatcaggagttgtcaccaccgagcttcctctggaagtctgcccatcagcttgcttgttctctgttaagaggaagggctaggacaaggatttgggcttgaatatgtggaaaggaattttcatagttgttgctgcaggacctacaaaagtttaaaattagattggatgtgactcaatgacaagtcccatctgtgtaattgttaaggggacctgattgactcctgtggtttgattgagcaaccaggtaaatagagacctctctccagctttggcaaaacccatcagaggctgctgcagaactcagacagagggatctgcccttgggtttgcttccatcctgttccattgctaagcccttgtgacttggatcctaggactgaaaagtttttagctgcctcagctttcccctgaccttactggcagaggttctgcagatgtttcctttggaagatctcttgccaagaatagcattcctttggaggaggggggttctagttggaatgttgcttttcttggttagtgtaaatgtattgctagtgagacagctgccggcgctggaaaaggctcgtctcacagggagagtgctggtccccagaatgtgtgctgttcccacgctgctgcctttcttgagcttgttagaggaaagccagaaaggcattcagatgggatcagtctggctttcaaattttttttaattcctaagttctgttttattttttaattttttaaaaaaaattttattagagacagtctctctctcttgcctagctgggagtgcagtggagtgatcatagctcactgaggcttgaactcctgggctcgagcaatccacctcagcctccagagtaggggagactacagatgtgtgccaccatactcagctaatttttaaacttttgtagagacagggtctccctgtgttgcccaggctggcctcgaactcctgacctcaaaaaatcttcctgccttggcctcccaaagcactgggattataggtgtgagccattgcgcctggtcataaattcttgtttttttgtttgtttgtttattagagatggaatctctctctcttgaccaggctagagggctgtggtgcgatctcagcccactgcaacctctatctcctgagctcaagcgatcctccttagcttcccaaatagctggaactacaggcatgtgccatcacgtccagctaatttttgtatttttagtagagaaggttttaccatgttggacagggtggtctcgaactcctggcctaaagtggtccacctagctcagcctaccaaagtgctgtgattacaggcgtgagccaccatgcccagcctctaaattctgttttctattcaaagtaaaaatgacatgtgtttgagtcatccacttgctcatttgcatatggaatattgtatgtgaatattttattacacccttaaaattaattttcaagggcta

SEQ ID NO: 29887 - DNA, 984 bp, Homo sapiens
  source 1..984: mol_type = unassigned DNA
cgccagtatgttggagttggtggtggcttaagttttgaagggaggtagcatccgttggatatccacaccatccttctcgctgcaggctttcttggactccgtactgttggtgtaaccaaggcctggaggtctgggtggctcaggtttcctgcagccatgtttctgtacaacttaaccttgcagagagccactggcatcagctttgccattcatggaaacttttctggaaccaaacaacaagaaattgttgtttcccgtgggaagatcttggagctgcttcgcccagaccccaacactggcaaagtacataccctactcactgtggaagtattcggtgttatccggtcactcatggcctttaggctgacaggtggcaccaaagactacattgtagttggcagtgactctggtcgaattgttattttggaataccagccatctaagaatatgtttgagaagattcaccaagaaacctttggcaagagtggatgccgtcgcatcgttcctggccagttcttagctgtggatcccaaagggcgagccgttatgattagtgccattgagaaacagaaattggtgtatattttgaacagagatgctgcagcccgacttaccatttcatctcccctggaagcccacaaagcaaacactttagtgtatcatgtagttggagtagatgtcggatttgaaaatccaatgtttgcttgtctggaaatggattatgaggaagcagacaatgatccaacaggggaagcagcagctaatacccagcagacacttactttctatgagctagaccttggtttaaatcatgtggtccgaaaatacagtgaacctttggaggaacacggcaacttccttattacagttccaggagggtcagatggtccaagtggagtactgaacctgagtcccccattccccaaagccatccctgcattgatatgtcttgactctcctgtctacttttgcacacacccttaa

SEQ ID NO: 29888 - DNA, 2085 bp, Homo sapiens
  source 1..2085: mol_type = unassigned DNA
atgcaattaggacgaggtgagcgcagacgtcactctaagctcagacatttcgcagtctcctcccctgagggaaaaccaaatacctccagcccaaatcagggttgtgaggccaaatctgcaagaaggctgcaggcgagagggaaggctccctctgcgcctgaaagcccccaagtcctcgggttggggggaactcttcagcacatccttctctggacaacagaagaagaatcactgtccacaaaatatattaaaactgaaatttttgttcttttagctttcgaatttacacttttgagagcagtgtgattctttcaagtctagcagtgcattaagagggcctgagcgtttccgttccgccctcctcgctaagacaactagcagcggcacctcaggacgcgagccgaggactctaccgcccgacccaggttaagtttcggaggctcctaagatggctgcagccgcttccaggcacctcctcttccgcggccccgcccaccgctacgtccgtcttcgccccggaagtggaagtcgtgctgaggtcagaaggcggaaccgctgctgggagacggcgggatctctttcgccatggctgccgggccgatctccgagcggaatcaggatgccactgtgtacgtggggggcctggatgagaaggttagtgaaccgctgctgtgggaactgtttctccaggctggaccagtagtcaacacccacatgccaaaggatagagtcactggccagcaccaaggctatggctttgtggaattcttgagtgaggaagatgctgactatgccattaagatcatgaacatgatcaaactctatgggaagccaatacgggtgaacaaagcatcagctcacaacaaaaacctggatgtaggggccaacattttcattgggaacctggaccctgagattgatgagaagttgctttatgatactttcagcgcctttggggtcatcttacaaacccccaaaattatgcgggaccctgacacaggcaactccaaaggttatgcctttattaattttgcttcatttgatgcttcggatgcagcaattgaagccatgaatgggcagtacctctgtaaccgtcctatcaccgtatcttatgccttcaagaaggactccaagggtgagcgccatggctcagcagccgaacgacttctggcagctcagaacccgctctcccaggctgatcgccctcatcagctgtttgcagatgcacctcctccaccctctgctcccaatcctgtggtatcatcattggggtctgggcttcctccaccaggcatgcctcctcctggctccttcccacccccagtgccacctcctggagccctcccacctgggatacccccagccatgcccccaccacctatgcctcctggggctgcaggacatggccccccatcggcaggaaccccaggggcaggacatcctggtcatggacactcacatcctcacccattcccaccgggtgggatgccccatccagggatgtctcagatgcagcttgcacaccatggccctcatggcttaggacatccccacgctggacccccaggctctgggggccagccaccgccccgaccaccacctggaatgcctcatcctggacctcctccaatgggcatgcccccccgagggcctccattcggatctcccatgggtcacccaggtcctatgcctccgcatggtatgcgtggacctcctccactgatgcccccccatggatacactggccctccacgacccccaccctatggctaccagcgggggcctctccctccacccagacccactccccggccaccagttccccctcgaggcccacttcgaggccctctccctcagtaaattcacattttccttcctcctgttacattttcccaatatcttttctattccttggaccaatcagagatgctgtagctccttggggcaaaggtactaatccctttcagcacccccactccattcccctttttaatgtaactttttccacaggaggtatttcttttttatgttggtcctgagtattttgcaaatgcacagagaaaataaaactaaactccttgttta

SEQ ID NO: 29889 - DNA, 826 bp, Homo sapiens
  source 1..826: mol_type = unassigned DNA
ttgggggcggggtggccgggtgctggctgaggcctctgggtgtgatacttaagtccggtcccctgctgacttctcactcaaaaaatcaaaaaaacccactcacaatactaaattagacttcagaggattcccgaagtcctgggaagagagaagtttaaggatgccactgtgtacgtggggggcctggatgagaaggttagtgaaccgctgctgtgggaactgtttctccaggctggaccagtagtcaacacccacatgccaaaggatagagtcactggccagcaccaaggctatggctttgtggaattcttgagtgaggaagatgctgactatgccattaagatcatgaacatgatcaaactctatgggaagccaatacgggtgaacaaagcatcagctcacaacaaaaacctggatgtaggggccaacattttcattgggaacctggaccctgagattgatgagaagttgctttatgatactttcagcgcctttggggtcatcttacaaacccccaaaattatgcgggaccctgacacaggcaactccaaaggttatgcctttattaattttgcttcatttgatgcttcggatgcagcaattgaagccatgaatgggcagtacctctgtaaccgtcctatcaccgtatcttatgccttcaagaaggactccaagggtgagcgccatggctcagcagccgaacgacttctggcagctcagaacccgctctcccaggctgatcgccctcatcagctgtttgcagatgcacctcctccaccctctgctcccaatcctgtggtatcatcattggggtctgggcttcctc

SEQ ID NO: 29890 - DNA, 3747 bp, Homo sapiens
  source 1..3747: mol_type = unassigned DNA
gccgcctgtgtcatccgccattttgtgagaagcaaggtggcctccacgtttcctgagcgtcttcttcgcttttgcctcgaccgccccttgaccacagacatgtctcgggatcggttccggagtcgtggcggtggcggtggtggcttccacaggcgtggaggaggcggcggccgcggcggcctccacgacttccgttctccgccgcccggcatgggcctcaatcagaatcgcggccccatgggtcctggcccgggccagagcggccctaagcctccgatcccgccaccgcctccacaccaacagcagcaacagccaccaccgcagcagccaccgccgcagcagccgccaccgcatcagccgccgccgcatccacagccgcatcagcagcagcagccgccgccaccgccgcaggactcttccaagcccgtcgttgctcagggacccggccccgctcccggagtaggcagcgcaccaccagcctccagctcggccccgcccgccactccaccaacctcgggggccccgccagggtccgggccaggcccgactccgaccccgccgcctgcagtcacctcggcccctcccggggcgccgccacccaccccgccaagcagcggggtccctaccacacctcctcaggccggaggcccgccgcctccgcccgcggcagtcccgggcccgggtccagggcctaagcagggcccaggtccgggtggtcccaaaggcggcaaaatgcctggcgggccgaagccaggtggcggcccgggcctaagtacgcctggcggccaccccaagccgccgcatcgaggcggcggggagccccgcgggggccgccagcaccacccgccctaccaccagcagcatcaccaggggcccccgcccggcgggcccggcggccgcagcgaggagaagatctcggactcggaggggtttaaagccaatttgtctctcttgaggaggcctggagagaaaacttacacacagcgatgtcggttgtttgttgggaatctacctgctgatatcacggaggatgaattcaaaagactatttgctaaatatggagaaccaggagaagtttttatcaacaaaggcaaaggattcggatttattaagcttgaatctagagctttggctgaaattgccaaagccgaactggatgatacacccatgagaggtagacagcttcgagttcgctttgccacacatgctgctgccctttctgttcgtaatctttcaccttatgtttccaatgaactgttggaagaagcctttagccaatttggtcctattgaaagggctgttgtaatagtggatgatcgtggaagatctacagggaaaggcattgttgaatttgcttctaagccagcagcaagaaaggcatttgaacgatgcagtgaaggtgttttcttactgacgacaactcctcgtccagtcattgtggaaccacttgaacaactagatgatgaagatggtcttcctgaaaaacttgcccagaagaatccaatgtatcaaaaggagagagaaacccctcctcgttttgcccagcatggcacgtttgagtacgaatattctcagcgatggaagtctttggatgaaatggaaaaacagcaaagggaacaagttgaaaaaaacatgaaagatgcaaaagacaaattggaaagtgaaatggaagatgcctatcatgaacatcaggcaaatcttttgcgccaagatctgatgagacgacaggaagaattaagacgcatggaagaacttcacaatcaagaaatgcagaaacgtaaagaaatgcaattgaggcaagaggaggaacgacgtagaagagaggaagagatgatgattcgtcaacgtgagatggaagaacaaatgaggcgccaaagagaggaaagttacagccgaatgggctacatggatccacgggaaagagacatgcgaatgggtggcggaggagcaatgaacatgggagatccctatggttcaggaggccagaaatttccacctctaggaggtggtggtggcataggttatgaagctaatcctggcgttccaccagcaaccatgagtggttccatgatgggaagtgacatgcgtactgagcgctttgggcagggaggtgcggggcctgtgggtggacagggtcctagaggaatggggcctggaactccagcaggatatggtagagggagagaagagtacgaaggcccaaacaaaaaaccccgattttagatgtgatatttaggctttcattccagtttgttttgtttttttgtttagataccaatcttttaaattcttgcattttagtaagaaagctatctttttatggatgttagcagtttattgacctaatatttgtaaatggtctgtttgggcaggtaaaattatgtaatgcagtgtttggaacaggagaatttttttttcctttttatttctttattttttcttttttactgtataatgtccctcaagtttatggcagtgtaccttgtgccactgaatttccaaagtgtaccaatttttttttttttactgtgcttcaaataaatagaaaaatagttataatattgatcttcaactttgccattcatgcttctatgcatattaggctacgtattccacattgaaagcatgagagtgtctaggcctttgaatggcatatgccatttctgggaaatgcatctggaggctaagtattgctttctacaaataattgccccctttgttttaaaaagaagaaatgcatattgaagtagtttgatgatttgtttggcatataggaagcacgctggtgctaagtattttttaaatggttatgtaagcaaagctgaactgtaaatcttcaggaatatgtattaagattgtggaatgggtgtaagacaattggtagggggtgaaagtgggtttgattaaatggatcttttatggccctatgatctatcctttacttgaaagcttttgaaaagtggaaaggtcattttgttgcatttccccatttcttgtttttaaaagaccaacaaatctcaagccctataaatggcttgtattgaacttttacatttgaattaaagatgttaaacatgaagtcttttcatgtattcaagtgatttataaagatggggtgtagtctaaaaaacaaaacttgaaagtaagaaggtttagtaactgggccgggcgcggtggctcacgcctgtaatcccagcactttgggaggctgaggtgggcaaatcatgagatcaggagttcaagaccagcctggccaacatggtgaaaccccgtctctactaaaaatacaaaaaattagctgggcgtggtggcaggcgcctgtaatcccagctactcgggaggctgagccaggagaattgcttgaacctggagatggaggttgcagtgagctgagactgccactgcactccagcctggacaacagagcgagactctgtctcaaaaaaaaaaaaaggtttagtactgaagtaggtttagttatatatacatttgtactctgtaacttttacatctccttgtgctacttctgttgggcaaaatctataggactataaaaatctattggttctcttctaagagctagtggtgattgttaacaaatagggttgcagataatcattcttattgtaaatttaacttgttttcacatagtttcgttttcatgtagcactaaatctggagaaagttgctcatgctacacagtacaaatatcccttcctcccaccataaaggcttggaatgtttcca

SEQ ID NO: 29891 - DNA, 6781 bp, Homo sapiens
  source 1..6781: mol_type = unassigned DNA
gggagcaggggagttgtgaaatgggcggctagatctgcccggcgctgtgaattcgccagcgggagcgcgctcgcggccgcgcgttctccgctttcccggctccgtcgctgacgcgtcgtagacgttggggagcgggaaggcaacggcagcgggatcgggatgaacagcggcggcggcttcggtttgggcttaggcttcggcctcacccccacgtcggtgattcaggtgacgaatctgtcgtcggcggtgaccagcgagcagatgcggacgcttttttccttcctaggagaaatcgaggagctgcggctctaccccccggacaacgcacctcttgctttttcctccaaagtatgttatgttaagtttcgtgatccatcaagtgttggcgtggcccagcatctaactaacacggtttttattgacagagctctgatagttgttccttgtgcagaaggtaaaatcccagaggaatccaaagccctctctttattggctcctgctccaaccatgacaagtctgatgcctggtgcaggattgcttccaataccgaccccaaatcctttgactactcttggtgtttcacttagcagtttgggagctataccagcagcagcactagaccccaacattgcaacacttggagagataccacagccaccacttatgggaaacgtggatccttccaaaatagatgaaattaggagaacggtttatgttggaaatctgaattcccagacaacgacagctgatcaactacttgaattttttaaacaagttggagaagtgaagtttgtgcggatggcaggtgatgagactcagccaactcggtttgcttttgtggaatttgcagaccaaaattctgtaccaagggcccttgcttttaatggagttatgtttggagacaggccactgaaaataaatcactccaacaatgcaatagtaaaaccccctgagatgacacctcaggctgcagctaaggagttagaagaagtaatgaagcgagtacgagaagctcagtcatttatctcagcagctattgaaccagagtctggaaagagcaatgaaagaaaaggcggtcgatctcgttcccatactcgctcaaaatccaggtctagctcaaaatcccattctagaaggaaaagatcacaatcaaaacacaggagtagatcccataatagatcacgttcaagacagaaagacagacgtagatctaagagcccacataaaaaacgctctaaatcaagggagagacggaagtcaaggagtcgttcgcattcacgggacaagagaaaagacactcgagaaaagatcaaggaaaaggaaagagtgaaagagaaagacagggaaaaggagagagagagggaaaaggaacgtgaaaaagaaaaggaacggggtaaaaacaaagaccgggacaaggaacgggaaaaggaccgggaaaaagacaaggaaaaggacagagagagagaacgggaaaaagagcatgagaaggatcgagacaaagagaaggaaaaggaacaggacaaagaaaaggaacgagaaaaagacagatccaaagagatagatgaaaaaagaaagaaggataaaaaatccagaacaccacccaggagttacaatgcatcgcgaagatctcgtagttccagcagggaaaggcgtaggaggaggagcaggagttcttccagatcgccaagaacatcaaaaaccataaaaaggaaatcttctagatctccgtcccccaggagcagaaataagaaggataaaaagagagaaaaagaaagggaccacatcagtgaaagaagagagagagaacgttcaacgtctatgagaaagagttctaatgatagagatgggaaggagaagttggagaagaacagtacttcacttaaagagaaagagcacaataaagaaccagattcaagtgtgagcaaagaagtagatgacaaggatgcaccaaggactgaggaaaacaaaatacagcacaatgggaattgtcagctgaatgaagaaaacctctctaccaaaacagaagcagtataggaccgacaagtgtacctctgcactcaatgctggaatcaaatccaaagcttttaattctctcaacaagatgtaaacaggaaagaaatctagttgagcatgaagataggatctaacagcttttccagttgttagatgactttgtggccatcttgttattgagtaagaaaataaagcatggacatcatgaaaataacagatgttacccaaactcatcttctaaaatctgtgcatttccatggtggctgacacacttgtcatgtggtctgttagtgtttgccaagaaccattgcaaataaattgaacatcaaagatccaagtttgtactatccctaaagactggagataagcattggaggctcttttaaaaaatgctagttactgaattttgtattgttttacttttttttttatttcaatatatacagtttgatgatgtgcttgaaattggtgcaaatatatacacacccttgtaagtgcaaagtatgtaagaagttttaacatttacttcacaggacttgtgattgtgttaaattctcactattgtgttttcttttgctcactgtttaggacaatttttctttaaaatagttttgcagattaaaattgcttaaataagtggattaaaaaactgacaatgcatgctactgttctctttcaaaaggaagagcaaccgtgttgaatactaataatgatgaattagtattcagtgtttagaatcattgggactacccacaaagtgagcatttctttttaaattttcttgacatttccaagcttattatgaataatattgcagtgtgtcttgtcagctgtaggtggcaaaggtgcccttataaaaaaggaaactggcttttcaaaatgggctatgggagcacaagctgaagctttagtgccttctacaatgtggtatactgttttctagaattttatatgtgctagtcattctcaattcatatggaatctagatggatatttcatgcatacccatagagaagtgtgtaagtgatatgtcagaagagcttcttactgatttcacctaaaatgagaaggaagtcctgttttcaagaatgacattagagtcatgcagctttgggaccatcagttttatactgtgataattgaaaatgaaacatgttcttattttccttaaattgaagaaaaccctttagttgtctacattggatggccttattacctctcaatcatcttttcataaatgatgtgcagaaattgtacttaaggacttaggagtatatgggaggttattggttttatgtttaaggatacgtttacttgagtttaagatacaggtcatccatcattcttaggctcactttttacagaaagtatgcaaatagtaaagtgacagcactgctaatgtttttccccagtactataacttgtggtttctgaactcattattgttgtatttccaaaaaagtaataccttttaattagtgtattaaaagttaagtataattattttaatgcaatctaatacaatcagattactcagttgccttacctcatgggaagagttacttttttagatctaaaaagctgaatagcatgttagttacttggtttcaacttgagttttcttttaatgttaataagattgaaactttagtatttagtggggaatggaaagagttgcccttgttgcaagtaatgaagcctgatttgattatgaagctgcttaatcactcttcatgtgttcagaattactgttttttttgtttgtttttcctttttgtcactgtgtacattaaaattttggaagatgctttactatgtaaagtatagatggtcattttaatcattcagccacatacggttggctggtaaacagcttattctgatacaagaatgcttgggtgcatatggaaagattgtgaaagagtgtgtcttgcatcaacagctgtcttatttatgatatataagtagaaatagagcaaatgttggaatctgttatttttagtaccatgtctttaataaagctaagtattttagaggaaaatgtttgtttatgcatttcaaaaaagcattttagttttatcctgctcattttagttgtcatagagattgttgtgacgtggagagtgcatgtttgtgtggtgtctataaaacaagtcatttaaagtatgagtgttttcttgtactctggacctattacatgtttctttatgttggtaattaacatttaatttggttcttgctgctaattattttctctgctgatatttattaagctttaaaataatcgtactataatcttgaaacactgatttgtaaaaactaagaatgagtaggaatacaagagatctggaggaacaaatcagattgttattagggtttgactttttttttacatgggcttatggaagcaaggcattctagggtctagagggatgtgtgtgtgtgcttgtgtgtccatgtgtgcgcatgcgcacgtgtgtatctgtttgagacatactttctctgttcacttaaaagagctcatgttttcatttgtttattcttttctttcagggtattttgtttttttctttaagacttctttttttaaatcccaggtagatgttgtcagataaacttgaggtaaggccaagaagacagacattttatgcttcatactttctgtaattatcttttgtagcttgattacatagagtaccctctcttccttaagttgtagttgctatttatcattgtagacaaattctgttgcctttcagcaacgtatgctgaactagtatcataagatggtgcatcagttcataagctagtgcataagttttgtgtcaaaacttttaaatcctgaagttctgcagttatcatcttagttattttctatctaattagcttataattgcaaacactagtcagcttgtgatctctgtgtttcaagttcttttcttcacgaggttcagtacctgctatgttgatctttggcagtgccagaggcttaaattttgacctgctcaattaaaaataaacactggcgtttataatgaaaaggtttttttgtcgggggggggggggtcaagagaatttattttgtgatagtaataattttcaagaccttcagtcattcctatgtctatgttgctatctttattttaaaacttagaaccctgatctaactcccttctcaagtgaagatactgtgtagattcaagaattataatgtagagtaataggcctttaagtttttttttaatctgttagaaataaagagcatgatttaattattgttgaattaacaattaaaatgaatccctttggagggatggcattgaataacttataatttcagtgaatcatttacgttttcattggaagacagtatctgatttcaactggtgcgttacgaagtagagccattcccacaaagtaaatgtgcagtgcccatgtttcttgtgtttaaatattttttattttcactacatatatattattttctcatgtttatttactaatgtaattttcacttaaaattagatgtttattttcaaattttaaaagctagtgctcttaaaagagctaaattatatttctggaagcaggagtttagtataaatgtaataaaattttaaaataaaattgacttccctacttaatcttgggtttgtgggtgagtttgtttttagtacactcttattggtggttttgcctgaagagtaatacattattattattacttttctttttgagacagggtctcactctgtcactcaggctggagtgcagtgacacgatcatggctcactgcaatcttgacctttctcggcatggatgatcctctcacctcagcctcttgaatagctgggaccacagacatgtgccaccaagcccagttaattttagaattttttttgtagagacaggatcttgccatgttgcctagactggtctcaaactcctgggctcaaacaatctgtctgcctcagccttctaaagtgctgagattacaggtgtgaggtactgcacctggcaatacgttattttaaaagtaaacgctaagccatttatgactttggttatattcagtcagttggatttagtaactaataactagctttcttccattctaaggtacttttatagtttctagcaattagtttgttacaattagcttatatcagatataacagttcttaatataatgtttataaaaggttttaagtctgttgcctgatttttaaatttatatctagttaacattttaattttaaaattgccaacttttgggagatttcacatattttacctctatattttatttttccaggattggtatggaggagtagtaccttctattcttggtttatttttatttgctagacataatttcttaactacatatgtaagtataaattcataaaaatcacactgaaagaataggttgatttcaaccattttgagggtactggtaggtaacacactgttggggaataaactaaagaatttctgatttctacaatagatttaagtatgaaatttgagtatactgtgtagctgtgtagatcaacttaatgcttaaaaaattacctccttaatgattagattaatagaacagtgttagattatcaagggaagagtttggaatgtaaacataaacatgctgcataggtggtggttatttgtgagtaggactacttttaaatggtactagtaaagatttatcaaacaatgctgctattatgttgctatatttttaataaaatgaaaatcttaaaatctt

SEQ ID NO: 29892 - DNA, 2433 bp, Homo sapiens
  source 1..2433: mol_type = unassigned DNA
ttatttccccccgaacttaagatggccgcaggtgggcccggaacagccctcatggcaaacgtctcagagcgtttttccactctgaaaatcgcggagaccgcgcctgagccacagtccagtttttaaggccttggtgtcaggccgttttgctgacgagaaagcctgctgctggtgacaagatggaactggggctgtgtttgtttcccaggacggtcgcacaaacttagcattttggtttatctaaccgagcgcatccatgttcccaaagatcatgtctgttagcccttttgacagcagattaaattttcctcctgaaaggtcacactgtcccaaagctttcagaaaaagtcaacgcacctcttgctttttcctccaaagtatgttatgttaagtttcgtgatccatcaagtgttggcgtggcccagcatctaactaacacggtttttattgacagagctctgatagttgttccttgtgcagaagtgatgcagccaacacgaacggttgtcatgtgtaacacaactttcgatcaccgcgaaaacaccgtcctgggaaagcgtccatgcttgatatcgtttggttcatgaacattaagtttccagtacaggtaaaatcccagaggaatccaaagccctctctttattggctcctgctccaaccatgacaagtctgatgcctggtgcaggattgcttccaataccgaccccaaatcctttgactactcttggtgtttcacttagcagtttgggagctataccagcagcagcactagaccccaacattgcaacacttggagagataccacagccaccacttatgggaaacgtggatccttccaaaatagatgaaattaggagaacggtttatgttggaaatctgaattcccagacaacgacagctgatcaactacttgaattttttaaacaagttggagaagtgaagtttgtgcggatggcaggtgatgagactcagccaactcggtttgcttttgtggaatttgcagaccaaaattctgtaccaagggcccttgcttttaatggagttatgtttggagacaggccactgaaaataaatcactccaacaatgcaatagtaaaaccccctgagatgacacctcaggctgcagctaaggagttagaagaagtaatgaagcgagtacgagaagctcagtcatttatctcagcagctattgaaccagagtctggaaagagcaatgaaagaaaaggcggtcgatctcgttcccatactcgctcaaaatccaggtctagctcaaaatcccattctagaaggaaaagatcacaatcaaaacacaggagtagatcccataatagatcacgttcaagacagaaagacagacgtagatctaagagcccacataaaaaacgctctaaatcaagggagagacggaagtcaaggagtcgttcgcattcacgggacaagagaaaagacactcgagaaaagatcaaggaaaaggaaagagtgaaagagaaagacagggaaaaggagagagagagggaaaaggaacgtgaaaaagaaaaggaacggggtaaaaacaaagaccgggacaaggaacgggaaaaggaccgggaaaaagacaaggaaaaggacagagagagagaacgggaaaaagagcatgagaaggatcgagacaaagagaaggaaaaggaacaggacaaagaaaaggaacgagaaaaagacagatccaaagagatagatgaaaaaagaaagaaggataaaaaatccagaacaccacccaggagttacaatgcatcgcgaagatctcgtagttccagcagggaaaggcgtaggaggaggagcaggagttcttccagatcgccaagaacatcaaaaaccataaaaaggaaatcttctagatctccgtcccccaggagcagaaataagaaggataaaaagagagaaaaagaaagggaccacatcagtgaaagaagagagagagaacgttcaacgtctatgagaaagagttctaatgatagagatgggaaggagaagttggagaagaacagtacttcacttaaagagaaagagcacaataaagaaccagattcaagtgtgagcaaagaagtagatgacaaggatgcaccaaggactgaggaaaacaaaatacagcacaatgggaattgtcagctgaatgaagaaaacctctctaccaaaacagaagcagtataggaccgacaagtgtacctctgcactcaatgctggaatcaaatccaaagcttttaattctctcaacaagatgtaaacaggaaagaaatctagttgagcatgaagataggatctaacagcttttccagttgttagatgactttgtggccatcttgttattgagtaagaaaataaagcatggacatcatgaaaataacagatgttacccaaactcatcttctaaaatctgtgcatttccatggtggctga

SEQ ID NO: 29893 - DNA, 580 bp, Homo sapiens
  source 1..580: mol_type = unassigned DNA
agaactgctctctccaaagtcacctcctggttctcagtctacaacgcacctcttgctttttcctccaaagtatgttatgttaagtttcgtgatccatcaagtgttggcgtggcccagcatctaactaacacggtttttattgacagagctctgatagttgttccttgtgcagaagtgatgcagccaacacgaacggttgtcatgtgtaacacaactttcgatcaccgcgaaaacaccgtcctgggaaagcgtccatgcttgatatcgtttggttcatgaacattaagtttccagtacaggtaaaatcccagaggaatccaaagccctctctttattggctcctgctccaaccatgacaagtctgatgcctggtgcaggattgcttccaataccgaccccaaatcctttgactactcttggtgtttcacttagcagtttgggagctataccagcagcagcactagaccccaacattgcaacacttggagagataccacagccaccacttatgggaaacgtggatccttccaaaatagatgaaattaggagaacggtttatgttggaaatctgaattcccag

SEQ ID NO: 29894 - DNA, 2222 bp, Homo sapiens
  source 1..2222: mol_type = unassigned DNA
gtagacgttggggagcgggaaggcaacggcagcgggatcgggatgaacagcggcggcggcttcggtttgggcttaggcttcggcctcacccccacgtcggtgattcaggtgacgaatctgtcgtcggcggtgaccagcgagcagatgcggacgcttttttccttcctaggagaaatcgaggagctgcggctctaccccccggacaacgcacctcttgctttttcctccaaagtatgttatgttaagtttcgtgatccatcaagtgttggcgtggcccagcatctaactaacacggtttttattgacagagctctgatagttgttccttgtgcagaaggtaaaatcccagaggaatccaaagccctctctttattggctcctgctccaaccatgacaagtctgatgcctggtgcaggattgcttccaataccgaccccaaatcctttgactactcttggtgtttcacttagcagtttgggagctataccagcagcagcactagaccccaacattgcaacacttggagagataccacagccaccacttatgggaaacgtggatccttccaaaatagatgaaattaggagaacggtttatgttggaaatctgaattcccagacaacgacagctgatcaactacttgaattttttaaacaagttggagaagtgaagtttgtgcggatggcaggtgatgagactcagccaactcggtttgcttttgtggaatttgcagaccaaaattctgtaccaagggcccttgcttttaatggagttatgtttggagacaggccactgaaaataaatcactccaacaatgcaatagtaaaaccccctgagatgacacctcaggctgcagctaaggagttagaagaagtaatgaagcgagtacgagaagctcagtcatttatctcagcagctattgaaccagagtctggaaagagcaatgaaagaaaaggcggtcgatctcgttcccatactcgctcaaaatccaggtctagctcaaaatcccattctagaaggaaaagatcacaatcaaaacacaggagtagatcccataatagatcacgttcaagacagaaagacagacgtagatctaagagcccacataaaaaacgctctaaatcaagggagagacggaagtcaaggagtcgttcgcattcacgggacaagagaaaagacactcgagaaaagatcaaggaaaaggaaagagtgaaagagaaagacagggaaaaggagagagagagggaaaaggaacgtgaaaaagaaaaggaacggggtaaaaacaaagaccgggacaaggaacgggaaaaggaccgggaaaaagacaaggaaaaggacagagagagagaacgggaaaaagagcatgagaaggatcgagacaaagagaaggaaaaggaacaggacaaagaaaaggaacgagaaaaagacagatccaaagagatagatgaaaaaagaaagaaggataaaaatccagaacaccacccaggagttacaatgcatcgcgaagatctcgtagttccagcagggaaaggcgtaggaggaggagcaggagttcttccagatcgccaagaacatcaaaaaccataaaaaggaaatcttctagatctccgtcccccaggagcagaaataagaaggataaaaagagagaaaaagaaagggaccacatcagtgaaagaagagagagagaacgttcaacgtctatgagaaagagttctaatgatagagatgggaaggagaagttggagaagaacagtacttcacttaaagagaaagagcacaataaagaaccagattcaagtgtgagcaaagaagtagatgacaaggatgcaccaaggactgaggaaaacaaaatacagcacaatgggaattgtcagctgaatgaagaaaacctctctaccaaaacagaagcagtataggaccgacaagtgtacctctgcactcaatgctggaatcaaatccaaagcttttaattctctcaacaagatgtaaacaggaaagaaatctagttgagcatgaagataggatctaacagcttttccagttgttagatgactttgtggccatcttgttattgagtaagaaaataaagcatggacatcatgaaaataacagatgttacccaaactcatcttctaaaatctgtgcatttccatggtggctgacacacttgtcatgtggtctgttagtgtttgccaagaaccattgcaaataaattgaacatc

SEQ ID NO: 29895 - DNA, 807 bp, Homo sapiens
  source 1..807: mol_type = unassigned DNA
attctttccccaagtctctatggtagcgtcagcgtcggaggcggtagtgacggtggcgtttccttgaggaagagtgagggttccaacttttctgcttatctgggaggtgttgggcgcggacagtcgagatgtcagagaaaaagcagccggtagacttaggtctgttagaggaagacgacgagtttgaagagttccctgccgaagactgggctggcttagatgaagatgaagatgcacatgtctgggaggataattgggatgatgacaatgtagaggatgacttctctaatcagttacgagctgaactagagaaacatggttataagatggagacttcatagcatccagaagaagtgttgaagtaacctaaacttgacctgcttaatacattctagggcagagaacccaggatgggacactaaaaaaatgtgtttatttcattatctgcttggatttatttgtgtttttgtaacacaaaaaataaatgttttgatataatcttggtttggttcagaagtcttaatcttttgcttctaatcaattttcttgtcatgattttccaaaaccttattatatatagatagtaaaatttcatattatgaaattttcttttttttttttaatgttaactgagtgaggctcaggttaaatgatctggagtagatttcacctgattcccaattcagtacttttcttaaaccacatcaattaattgttacttctattttataaggaatttcttttacatcacattgaaccttaatctcttctgtattttgatagcttaggcaacatttgctgacattt

SEQ ID NO: 29896 - DNA, 1666 bp, Homo sapiens
  source 1..1666: mol_type = unassigned DNA
caagggcgcagcctaggacaggggcttctggagcttctggcagccgtctgccctcatggcctttgcacctatggggcccgaggcctcgttcttcgacgttttggaccgacacagggagtccctgctggctgccctgaggagaggtggcagggagcccccaactgggggaagccgcctggcctccaggtttgaagattctgtgggtcttcagatggtatcccattgcaccaccagaaagatcaaaagtgattcaccaaaatcagctcaaaaattttctctaatccttaaaatattgtccatgatttataaattagtacagagcaacacttatgcaaccaaaagggacatatattacactgacagtcaactctttggtaaccagactgtcgtcgacaatattatcaatgacatttcttgcatgttaaaagtgtcaaggaggagtctacatatattatctacatcaaaaggtttaattgctggcaacttaagatacatcgaggaagatggcaccaaagtgaattgtacctgtggtgcaacggctgttgctgtgccatcgaatattcaaggaattcggaatttagttacagatgcaaagtttgtattaattgtagaaaaagatgcaacatttcagcggctcctagatgacaacttttgcaacaaattgtctccttgcatcatgattacgggaaagggagttcctgatctaaacacaagacttttagtcaagaaactgtgggatacatttcatgttcctgttttcactcttgtagatgctgatccacatggcatagaaataatgtgcatctataagtatggatctatgtctatgtcttttgaagctcatcatctcacagttccagctattagatggcttggtcttctcccttctgatcttaaaagattaaatgtacctaaagatagtttgattccactgacaaaaagggaccaaatgaaacttgacagtatcctgaggagaccttatgttacctgccaaccattttggagaaaagaaatggaaataatggcagactctaaaatgaaggcagaaattcaagctttgactttcctatcatcagattatctttccagagtgtacttacctaacaaattaaaatttggaggatggatataaaaataaatcagaagaacttctgattgccagaggcttttcattagttttgttttgattggcaaatactattgtggaaagaacatatattatattcttaattctgtaaaagtgaaataaaataactttccgttaattatatatttttgtcaaaacaaatgctgtactccaattttctttgcaaggccttattcttgcctctatagagacagatttctgtcctatcttctaaagcaaattataaaagaatatgttattttgacctttaaattatttttgaaaaaataatattttatacatgtcatcaaagtctacaaaatatttaccttctacgatacaactaatgttaacgcataaagtatcttactggtaacaaaaatcataatgatctgaatttgagatgttgcaaatgaattgtggtgtccggtagtttcttcttacattttcctttgcctttatactttaggggtcttactccattaattcatttgttacattagtaaaattcagtatgaataaatatttggattgatgtag

SEQ ID NO: 29897 - DNA, 1608 bp, Homo sapiens
  source 1..1608: mol_type = unassigned DNA
tctgccctcatggcctttgcacctatggggcccgaggcctcgttcttcgacgttttggaccgacacagggagtccctgctggctgccctgaggagaggtggcagggagcccccaactgggggaagccgcctggcctccaggtttgaagattctgtgggtcttcagatggtatcccattgcaccaccagaaagatcaaaagtgattcaccaaaatcagctcaaaaattttctctaatccttaaaatattgtccatgatttataaattagtacagagcaacacttatgcaaccaaaagggacatatattacactgacagtcaactctttggtaaccagactgtcgtcgacaatattatcaatgacatttcttgcatgttaaaagtgtcaaggaggagtctacatatattatctacatcaaaaggtttaattgctggcaacttaagatacatcgaggaagatggcaccaaagtgaattgtacctgtggtgcaacggctgttgctgtgccatcgaatattcaaggaattcggaatgcaaagtttgtattaattgtagaaaaagatgcaacatttcagcggctcctagatgacaacttttgcaacaaattgtctccttgcatcatgattacgggaaagggagttcctgatctaaacacaagacttttagtcaagaaactgtgggatacatttcatgttcctgttttcactcttgtagatgctgatccacatggcatagaaataatgtgcatctataagtatggatctatgtctatgtcttttgaagctcatcatctcacagttccagctattagatggcttggtcttctcccttctgatcttaaaagattaaatgtacctaaagatagtttgattccactgacaaaaagggaccaaatgaaacttgacagtatcctgaggagaccttatgttacctgccaaccattttggagaaaagaaatggaaataatggcagactctaaaatgaaggcagaaattcaagctttgactttcctatcatcagattatctttccagagtgtacttacctaacaaattaaaatttggaggatggatataaaaataaatcagaagaacttctgattgccagaggcttttcattagttttgttttgattggcaaatactattgtggaaagaacatatattatattcttaattctgtaaaagtgaaataaaataactttccgttaattatatatttttgtcaaaacaaatgctgtactccaattttctttgcaaggccttattcttgcctctatagagacagatttctgtcctatcttctaaagcaaattataaaagaatatgttattttgacctttaaattatttttgaaaaaataatattttatacatgtcatcaaagtctacaaaatatttaccttctacgatacaactaatgttaacgcataaagtatcttactggtaacaaaaatcataatgatctgaatttgagatgttgcaaatgaattgtggtgtccggtagtttcttcttacattttcctttgcctttatactttaggggtcttactccattaattcatttgttacattagtaaaattcagtatgaataaatatttggattgatgtag

SEQ ID NO: 29898 - DNA, 1834 bp, Homo sapiens
  source 1..1834: mol_type = unassigned DNA
ggcgtgggcacgccggccgctcagaaagcgcgggaaaggcacgcagccacgccccaagggcgcagcctaggacaggggcttctggagcttctggcagccgtctgccctcatggcctttgcacctatggggcccgaggcctcgttcttcgacgttttggaccgacacagggagtccctgctggctgccctgaggagaggtggcagggagcccccaactgggggaagccgcctggcctccagttctgaggttcttgcatctatagaaaatattatccaagacataatcacaagcttggcaagaaatgaagcacctgcattcacgatagacaacagatcaagctgggaaaacataaagtttgaagattctgtgggtcttcagatggtatcccattgcaccaccagaaagatcaaaagtgattcaccaaaatcagctcaaaaattttctctaatccttaaaatattgtccatgatttataaattagtacagagcaacacttatgcaaccaaaagggacatatattacactgacagtcaactctttggtaaccagactgtcgtcgacaatattatcaatgacatttcttgcatgttaaaagtgtcaaggaggagtctacatatattatctacatcaaaaggtttaattgctggcaacttaagatacatcgaggaagatggcaccaaagtgaattgtacctgtggtgcaacggctgttgctgtgccatcgaatattcaaggaattcggaatttagttacagatgcaaagtttgtattaattgtagaaaaagatgcaacatttcagcggctcctagatgacaacttttgcaacaaattgtctccttgcatcatgattacgggaaagggagttcctgatctaaacacaagacttttagtcaagaaactgtgggatacatttcatgttcctgttttcactcttgtagatgctgatccacatggcatagaaataatgtgcatctataagtatggatctatgtctatgtcttttgaagctcatcatctcacagttccagctattagatggcttggtcttctcccttctgatcttaaaagattaaatgtacctaaagatagtttgattccactgacaaaaagggaccaaatgaaacttgacagtatcctgaggagaccttatgttacctgccaaccattttggagaaaagaaatggaaataatggcagactctaaaatgaaggcagaaattcaagctttgactttcctatcatcagattatctttccagagtgtacttacctaacaaattaaaatttggaggatggatataaaaataaatcagaagaacttctgattgccagaggcttttcattagttttgttttgattggcaaatactattgtggaaagaacatatattatattcttaattctgtaaaagtgaaataaaataactttccgttaattatatatttttgtcaaaacaaatgctgtactccaattttctttgcaaggccttattcttgcctctatagagacagatttctgtcctatcttctaaagcaaattataaaagaatatgttattttgacctttaaattatttttgaaaaaataatattttatacatgtcatcaaagtctacaaaatatttaccttctacgatacaactaatgttaacgcataaagtatcttactggtaacaaaaatcataatgatctgaatttgagatgttgcaaatgaattgtggtgtccggtagtttcttcttacattttcctttgcctttatactttaggggtcttactccattaattcatttgttacattagtaaaattcagtatgaataaatatttggattgatgtag

SEQ ID NO: 29899 - DNA, 810 bp, Homo sapiens
  source 1..810: mol_type = unassigned DNA
ctgctggctgccctgaggagaggtggcagggagcccccaactgggggaagccgcctggcctccagttctgaggttcttgcatctatagaaaatattatccaagacataatcacaagcttggcaagaaatgaagcacctgcattcacgatagacaacagatcaagctgggaaaacataaagtttgaagattctgtgggtcttcagatggtatcccattgcaccaccagaaagatcaaaagtgattcaccaaaatcagctcaaaaattttctctaatccttaaaatattgtccatgatttataaattagtacagagcaacacttatgcaaccaaaagggacatatattacactgacagtcaactctttggtaaccagactgtcgtcgacaatattatcaatgacatttcttgcatgttaaaagtgtcaaggaggagtctacatatattatctacatcaaaaggtttaattgctggcaacttaagatacatcgaggaagatggcaccaaagtgaattgtacctgtggtgcaacggctgttgctgtgccatcgaatattcaaggaattcggattacagatgcaaagtttgtattaattgtagaaaaagatgcaacatttcagcggctcctagatgacaacttttgcaacaaattgtctccttgcatcatgattacgggaaagggagttcctgatctaaacacaagacttttagtcaagaaactgtgggatacatttcatgttcctgttttcactcttgtagatgctgatccacatggcatagaaataatgtgcatctataagtatggatctatg

SEQ ID NO: 29900 - DNA, 1869 bp, Homo sapiens
  source 1..1869: mol_type = unassigned DNA
gacagggaggggaggggagggataggacagacagacaaagaaaggggtgcggcagcactgccaggggaagagggtgatccgacccggggaaggtcgctgggcagggcgagttgggaaagcggcagcccccgccgcccccgcagccccttctcctcctttctcccacgtcctatctgcctctcgctggaggccaggccgtgcagcatcgaagacaggaggaactggagcctcattggccggcccggggcgccggcctcgggcttaaataggagctccgggctctggctgggacccgaccgctgccggccgcgctcccgctgctcctgccgggtgatggaaaaccccagcccggccgccgccctgggcaaggccctctgcgctctcctcctggccactctcggcgccgccggccagcctcttgggggagagtccatctgttccgccagagccctggccaaatacagcatcaccttcacgggcaagtggagccagacggccttccccaagcagtaccccctgttccgcccccctgcgcagtggtcttcgctgctgggggccgcgcatagctccgactacagcatgtggaggaagaaccagtacgtcagtaacgggctgcgcgactttgcggagcgcggcgaggcctgggcgctgatgaaggagatcgaggcggcgggggaggcgctgcagagcgtgcacgcggtgttttcggcgcccgccgtccccagcggcaccgggcagacgtcggcggagctggaggtgcagcgcaggcactcgctggtctcgtttgtggtgcgcatcgtgcccagccccgactggttcgtgggcgtggacagcctggacctgtgcgacggggaccgttggcgggaacaggcggcgctggacctgtacccctacgacgccgggacggacagcggcttcaccttctcctcccccaacttcgccaccatcccgcaggacacggtgaccgagataacgtcctcctctcccagccacccggccaactccttctactacccgcggctgaaggccctgcctcccatcgccagggtgacactggtgcggctgcgacagagccccagggccttcatccctcccgccccagtcctgcccagcagggacaatgagattgtagacagcgcctcagttccagaaacgccgctggactgcgaggtctccctgtggtcgtcctggggactgtgcggaggccactgtgggaggctcgggaccaagagcaggactcgctacgtccgggtccagcccgccaacaacgggagcccctgccccgagctcgaagaagaggctgagtgcgtccctgataactgcgtctaagaccagagccccgcagcccctggggccccccggagccatggggtgtcgggggctcctgtgcaggctcatgctgcaggcggccgagggcacagggggtttcgcgctgctcctgaccgcggtgaggccgcgccgaccatctctgcactgaagggccctctggtggccggcacgggcattgggaaacagcctcctcctttcccaaccttgcttcttaggggcccccgtgtcccgtctgctctcagcctcctcctcctgcaggataaagtcatccccaaggctccagctactctaaattatgtctccttataagttattgctgctccaggagattgtccttcatcgtccaggggcctggctcccacgtggttgcagatacctcagacctggtgctctaggctgtgctgagcccactctcccgagggcgcatccaagcgggggccacttgagaagtgaataaatggggcggtttcggaagcgtcagtgtttccatgttatggatctctctgcgtttgaataaagactatctctgttgctcacaaa

SEQ ID NO: 29901 - DNA, 1783 bp, Homo sapiens
  source 1..1783: mol_type = unassigned DNA
aggagcttccccagccacttccagcatgtagactgaagtcaggccacgcacagggctctccaggtcacaccctgcgcaagaaggtgtagcacgctggctctaatttcgagaaggccgtgcagcatcgaagacaggaggaactggagcctcattggccggcccggggcgccggcctcgggcttaaataggagctccgggctctggctgggacccgaccgctgccggccgcgctcccgctgctcctgccgggtgatggaaaaccccagcccggccgccgccctgggcaaggccctctgcgctctcctcctggccactctcggcgccgccggccagcctcttgggggagagtccatctgttccgccagagccctggccaaatacagcatcaccttcacgggcaagtggagccagacggccttccccaagcagtaccccctgttccgcccccctgcgcagtggtcttcgctgctgggggccgcgcatagctccgactacagcatgtggaggaagaaccagtacgtcagtaacgggctgcgcgactttgcggagcgcggcgaggcctgggcgctgatgaaggagatcgaggcggcgggggaggcgctgcagagcgtgcacgcggtgttttcggcgcccgccgtccccagcggcaccgggcagacgtcggcggagctggaggtgcagcgcaggcactcgctggtctcgtttgtggtgcgcatcgtgcccagccccgactggttcgtgggcgtggacagcctggacctgtgcgacggggaccgttggcgggaacaggcggcgctggacctgtacccctacgacgccgggacggacagcggcttcaccttctcctcccccaacttcgccaccatcccgcaggacacggtgaccgagataacgtcctcctctcccagccacccggccaactccttctactacccgcggctgaaggccctgcctcccatcgccagggtgacactggtgcggctgcgacagagccccagggccttcatccctcccgccccagtcctgcccagcagggacaatgagattgtagacagcgcctcagttccagaaacgccgctggactgcgaggtctccctgtggtcgtcctggggactgtgcggaggccactgtgggaggctcgggaccaagagcaggactcgctacgtccgggtccagcccgccaacaacgggagcccctgccccgagctcgaagaagaggctgagtgcgtccctgataactgcgtctaagaccagagccccgcagcccctggggccccccggagccatggggtgtcgggggctcctgtgcaggctcatgctgcaggcggccgagggcacagggggtttcgcgctgctcctgaccgcggtgaggccgcgccgaccatctctgcactgaagggccctctggtggccggcacgggcattgggaaacagcctcctcctttcccaaccttgcttcttaggggcccccgtgtcccgtctgctctcagcctcctcctcctgcaggataaagtcatccccaaggctccagctactctaaattatgtctccttataagttattgctgctccaggagattgtccttcatcgtccaggggcctggctcccacgtggttgcagatacctcagacctggtgctctaggctgtgctgagcccactctcccgagggcgcatccaagcgggggccacttgagaagtgaataaatggggcggtttcggaagcgtcagtgtttccatgttatggatctctctgcgtttgaataaagactatctctgttgctc

SEQ ID NO: 29902 - DNA, 571 bp, Homo sapiens
  source 1..571: mol_type = unassigned DNA
gagccctgagccgccggctgcggggttggagccgccggctgcggggttggagccgccggctgcggggttggagacgccggctgcggggttggagccgccggctgcggggttggagccgccggctgcggggttggaaccgccggctgtgagtttcctcactgcttggaggaagatgagaattctcagaggtccttatgctgccctttttgctgcagtcttgacatcttaacgtggatagaaaaaggccaggccgtgcagcatcgaagacaggaggaactggagcctcattggccggcccggggcgccggcctcgggcttaaataggagctccgggctctggctgggacccgaccgctgccggccgcgctcccgctgctcctgccgggtgatggaaaaccccagcccggccgccgccctgggcaaggccctctgcgctctcctcctggccactctcggcgccgccggccagcctcttgggggagagtccatctgttccgccagagccctggccaaatacagcatcaccttcacgggcaagtggagccagacggccttccccaagcagtacccc

SEQ ID NO: 29903 - DNA, 597 bp, Homo sapiens
  source 1..597: mol_type = unassigned DNA
gatgcctgcgccgggagccaggagcttccccagccacttccagcatgtagactgaagtcaggccacgcacagggctctccaggtcacaccctgcgcaagaaggtgtagcacgctggctctaatttcgagaaggccgtgcagcatcgaagacaggaggaactggagcctcattggccggcccggggcgccggcctcgggcttaaataggagctccgggctctggctgggacccgaccgctgccggccgcgctcccgctgctcctgccgggtgatggaaaaccccagcccggccgccgccctgggcaaggccctctgcgctctcctcctggccactctcggcgccgccggccagcctcttgggggagagtccatctgttccgccagagccctggccaaatacagcatcaccttcacgggcaagtggagccagacggccttccccaagcagtaccccctgttccgcccccctgcgcagtggtcttcgctgctgggggccgcgcatagctccgactacagcatgtggaggaagaaccagtacgtcagtaacgggctgcgcgactttgcggagcgcggcgaggcctgggcgctgatgaagga

SEQ ID NO: 29904 - DNA, 549 bp, Homo sapiens
  source 1..549: mol_type = unassigned DNA
agagaaacccaagagcagctgcatgagccctcccaggcctacccccgcagccggcactccctgcagcaaagaaaaccatctggccactgggccctgagcccggcgcccggaggaggacctctgccccgctgagcagctctgctccccaggctggccctgggcctctcgcggcctgacccgctccccttggcatcaagcaccaggagggacggggtggcccggccagggcgtgggtgttccccggcccctctgagcaccagcacctgtttcctcactgcttggaggaagatgagaattctcagaggtccttatgctgccctttttgctgcagtcttgacatcttaacgtggatagaaaaaggccgtgcagcatcgaagacaggaggaactggagcctcattggccggcccggggcgccggcctcgggcttaaataggagctccgggctctggctgggacccgaccgctgccggccgcgctcccgctgctcctgccgggtgatggaaaaccccagcccggccgccgccctgggcaaggccctctgcgctct

SEQ ID NO: 29905 - DNA, 557 bp, Homo sapiens
  source 1..557: mol_type = unassigned DNA
aagagccccgggaagagctgcatgcacacggctggagagaggctctgcacccgagcacagcctgctgcgactcctcatagacccggaaaactgattagaaggcagagggcctcctccctccctgcgtggtttgggggctgttcctgatagcacagatgccctgatcacaaacacctgcctgcattgctgaccacaggcctggcctggagaaacccacagcctcttcagggaagcgagcaaggggcttggaagtgcctgaagccagtgggctggggactcacggccgggacactcagggcagtttcctcactgcttggaggaagatgagaattctcagaggtccttatgctgccctttttgctgcagtcttgacatcttaacgtggatagaaaaaggccgtgcagcatcgaagacaggaggaactggagcctcattggccggcccggggcgccggcctcgggcttaaataggagctccgggctctggctgggacccgaccgctgccggccgcgctcccgctgctcctgccgggtgatggaaaaccccagcccggccgc

SEQ ID NO: 29906 - DNA, 556 bp, Homo sapiens
  source 1..556: mol_type = unassigned DNA
gtgtgtttgtgaactggcgatgtgatcgagggcacgggtgctgggcttccccctcatgggtaaaaccagagctactgtatgccagccgtggaggcatggacggcccctgagctcggacagcagacggacagaccgttgacgcgttggcaccgtggccagagtccgttcaagaaaggtcggcagagagggctgagaacgcggcaggcacatcctccaagggccctgctggaacccctggagcaggaggaagcggtgattctccaggccttggtttcctcactgcttggaggaagatgagaattctcagaggtccttatgctgccctttttgctgcagtcttgacatcttaacgtggatagaaaaaggccaggccgtgcagcatcgaagacaggaggaactggagcctcattggccggcccggggcgccggcctcgggcttaaataggagctccgggctctggctgggacccgaccgctgccggccgcgctcccgctgctcctgccgggtgatggaaaaccccagcccggccgccgccctgggcaaggccctctgcgc

SEQ ID NO: 29907 - DNA, 307 bp, Homo sapiens
  source 1..307: mol_type = unassigned DNA
agcatgtagactgaagtcaggccacgcacagggctctccaggtcacaccctgcgcaagaaggtgtagcacgctggctctaatttcgagaaggccaggccgtgcagcatcgaagacaggaggaactggagcctcattggccggcccggggcgccggcctcgggcttaaataggagctccgggctctggctgggacccgaccgctgccggccgcgctcccgctgctcctgccgggtgatggaaaaccccagcccggccgccgccctgggcaaggccctctgcgctctcctcctggccactctcggcgcc

SEQ ID NO: 29908 - DNA, 571 bp, Homo sapiens
  source 1..571: mol_type = unassigned DNA
ctgagccgccggctgcggggttggagccgccggctgcggggttggagccgccggctgcggggttggagacgccggctgcggggttggagccgccggctgcggggttggagccgccggctgcggggttggaaccgccggctgtgagtttcctcactgcttggaggaagatgagaattctcagaggtccttatgctgccctttttgctgcagtcttgacatcttaacgtggatagaaaaaggccgtgcagcatcgaagacaggaggaactggagcctcattggccggcccggggcgccggcctcgggcttaaataggagctccgggctctggctgggacccgaccgctgccggccgcgctcccgctgctcctgccgggtgatggaaaaccccagcccggccgccgccctgggcaaggccctctgcgctctcctcctggccactctcggcgccgccggccagcctcttgggggagagtccatctgttccgccagagccctggccaaatacagcatcaccttcacgggcaagtggagccagacggccttccccaagcagtaccccctgttccgcc

SEQ ID NO: 29909 - DNA, 2348 bp, Homo sapiens
  source 1..2348: mol_type = unassigned DNA
ggagtgagaccgctctgcaaaccactgcgtgctttgcagagtgattatcagcacagttccctgccctggataaggaacagctacagtcgctgttaaatgtgcctgaaaagcaatttgcaatctttgcattaggatttcagatgcatgccaggtttccactgattgccagaactcgagatcactacacatggatccccaaaatcaacatggcagtggcagttcgttagttgtgatccagcagccttctttggatagccgtcagagattagactatgagagagagattcagcctactgctattttgtccttagaccagatcaaggccataagaggcagcaatgaatacacagaagggccttcggtggtgaaaagacctgctcctcggacagcaccaagacaagaaaagcatgaaaggactcatgaaatcataccaattaatgtgaataataactacgagcacagacacacaagccacctgggacatgcagtactcccaagtaatgccaggggccccattttgagcagatcaaccagcactggaagtgcagccagctctgggagcaacagcagtgcctcttctgaacagggactgttaggaaggtcaccaccaaccagaccagtccctggtcataggtctgaaagggcaatccggacccagcccaagcaactgattgtggatgacttgaagggttccttgaaagaggacctgacacagcacaagttcatttgtgaacagtgtgggaagtgcaagtgtggagaatgcactgctcccaggaccctaccatcctgtttggcctgtaaccggcagtgcctttgctctgctgagagcatggtggaatatggaacctgcatgtgcttagtcaagggcatcttctaccactgctccaatgacgacgaaggggattcctattcagataatccttgctcctgttcacaatcacactgctgctctagatacctgtgtatgggagccatgtctttatttttaccttgcttactctgttatcctcctgctaaaggatgcctgaagctgtgcaggaggtgttatgactggatccatcgcccagggtgcagatgtaagaactccaacactgtctattgtaagctggagagctgcccctcccggggtcagggtaaaccatcatgatttttggaggtgggttgtacctcctgaacttttagctttcaagttgtggctgttttttgtttttgtttttgtttttgttttctttagaatttttccctgtttcccaccttctcttcccctgttgccaaggtctaactcatggatttttctctttcctcatggatgatcttcagcaagagtggactgggaagctgcacctggctcccactttcaacaagagcctctgccatccacttgagggtattgagagccagtgggcttttgtgtagcctttttgttctgcaagcaactttctaaagttgtgtacatgaacatacacccacatccagactacagtgatttagagttgttttgattgggtaccgtgggagcagggaaattggttttttaaaaagcaactgtttaattgcttaaataagctatgtattaaatctgtctccagttagggctatcttcctagcataggccccttaagtagcatgggggatatattttttgctataacgtaaaaattttcctttaaccactgccctctccttctttctccttcaaggttctttccccctcagttttgttgttgtcttactctggagatgccaagtgtattttttctttctatgtaattttagattcgccttacaatgtaaatcttcacattggagataatattggttggaccttgcccatcttcactctagccttcgtatttgtgaaggactcagccaccttccttcttcaccccatgcttctcaccaaatttttgttgtcattgagggcacttggataactcaagttgatatttatagctgatcaatctatatgtgtcacagaactatgctgcctaaagtgatcttggctccttaatggtccttttggccccttggatagttaacagctgagtaattctaatctcttctgtgttttccttgccttaaccacaaattgtggtgctttttgtatattttatgtataaatcacaaagttgaattctgactatttttaagacaaaagtctgttaaacttttttattgtaaagaatatttattatgcgaatctctattattttatggtatttattgcaaaagactgttgaaatgtactcatgtttgaatataacaaaatatcaatacttaacggaaaataaggtgacacgaagaaagtacatatgttaactataatgcagaaaatatattaattaatg

SEQ ID NO: 29910 - DNA, 2504 bp, Homo sapiens
  source 1..2504: mol_type = unassigned DNA
tatttattcagtgcggattgcagagggcgcagctccaccgtggtaacttgcaatgtggccgcccctgcgctggcttctttctcctcggccctcggtgaacccagcttttcctttaaagcatagacaaatccttgcttagggtcagccagaccgtgggcttgctttgggctcccgcgtggacgctgaaggctcttcatgatttctcagaaaccttggtgggccacccaaaaagtgtgttggaaatccacggtgatccttaatatggtgatgggattgtccgaaaaggatttcagatgcatgccaggtttccactgattgccagaactcgagatcactacacatggatccccaaaatcaacatggcagtggcagttcgttagttgtgatccagcagccttctttggatagccgtcagagattagactatgagagagagattcagcctactgctattttgtccttagaccagatcaaggccataagaggcagcaatgaatacacagaagggccttcggtggtgaaaagacctgctcctcggacagcaccaagacaagaaaagcatgaaaggactcatgaaatcataccaattaatgtgaataataactacgagcacagacacacaagccacctgggacatgcagtactcccaagtaatgccaggggccccattttgagcagatcaaccagcactggaagtgcagccagctctgggagcaacagcagtgcctcttctgaacagggactgttaggaaggtcaccaccaaccagaccagtccctggtcataggtctgaaagggcaatccggacccagcccaagcaactgattgtggatgacttgaagggttccttgaaagaggacctgacacagcacaagttcatttgtgaacagtgtgggaagtgcaagtgtggagaatgcactgctcccaggaccctaccatcctgtttggcctgtaaccggcagtgcctttgctctgctgagagcatggtggaatatggaacctgcatgtgcttagtcaagggcatcttctaccactgctccaatgacgacgaaggggattcctattcagataatccttgctcctgttcacaatcacactgctgctctagatacctgtgtatgggagccatgtctttatttttaccttgcttactctgttatcctcctgctaaaggatgcctgaagctgtgcaggaggtgttatgactggatccatcgcccagggtgcagatgtaagaactccaacactgtctattgtaagctggagagctgcccctcccggggtcagggtaaaccatcatgatttttggaggtgggttgtacctcctgaacttttagctttcaagttgtggctgttttttgtttttgtttttgtttttgttttctttagaatttttccctgtttcccaccttctcttcccctgttgccaaggtctaactcatggatttttctctttcctcatggatgatcttcagcaagagtggactgggaagctgcacctggctcccactttcaacaagagcctctgccatccacttgagggtattgagagccagtgggcttttgtgtagcctttttgttctgcaagcaactttctaaagttgtgtacatgaacatacacccacatccagactacagtgatttagagttgttttgattgggtaccgtgggagcagggaaattggttttttaaaaagcaactgtttaattgcttaaataagctatgtattaaatctgtctccagttagggctatcttcctagcataggccccttaagtagcatgggggatatattttttgctataacgtaaaaattttcctttaaccactgccctctccttctttctccttcaaggttctttccccctcagttttgttgttgtcttactctggagatgccaagtgtattttttctttctatgtaattttagattcgccttacaatgtaaatcttcacattggagataatattggttggaccttgcccatcttcactctagccttcgtatttgtgaaggactcagccaccttccttcttcaccccatgcttctcaccaaatttttgttgtcattgagggcacttggataactcaagttgatatttatagctgatcaatctatatgtgtcacagaactatgctgcctaaagtgatcttggctccttaatggtccttttggccccttggatagttaacagctgagtaattctaatctcttctgtgttttccttgccttaaccacaaattgtggtgctttttgtatattttatgtataaatcacaaagttgaattctgactatttttaagacaaaagtctgttaaacttttttattgtaaagaatatttattatgcgaatctctattattttatggtatttattgcaaaagactgttgaaatgtactcatgtttgaatataacaaaatatcaatacttaacggaaaataaggtgacacgaagaaagtacatatgttaactataatgcagaaaatatattaattaatgaaa

SEQ ID NO: 29911 - DNA, 641 bp, Homo sapiens
  source 1..641: mol_type = unassigned DNA
gtagccggagtgagaccgctctgcaaaccactgcgtgctttgcagagtgattatcagcacagttccctgccctggataaggaacagctacagtcgctgttaaatgtgcctgaaaagcaatttgcaatctttgcattaggcatttcggccgtggaaccccaggctcggaggactgggtgtgagcgctgcccgggagaggctgacctgccgggaccggagtgcccggggacgctgtgcccccacttgcccaacgtgcggaatcggctaagcgcgtcggcctgcgcggggcacaagggacgacgcccgcctttctctctccgagaaggatccccaaacctcactctcttcactcctccccgctaaaaaaaaaaaaaaaaagaaaagggatttcagatgcatgccaggtttccactgattgccagaactcgagatcactacacatggatccccaaaatcaacatggcagtggcagttcgttagttgtgatccagcagccttctttggatagccgtcagagattagactatgagagagagattcagcctactgctattttgtccttagaccagatcaaggccataagaggcagcaatgaatacacagaagggccttcggtggtgaaaagacctgctcctcggacag

SEQ ID NO: 29912 - DNA, 1012 bp, Homo sapiens
  source 1..1012: mol_type = unassigned DNA
ttgtaaaaactggttcttggaaaggggctgcagaagacctcccgaggtggatgttactgagccgcccggcgagcaccagccgtgacaggtccgggcccggccgcgcggagccgcgggagaactgccctccgcagccggaagggggccgcggggagcgctcctggccggtggcggcgggggcgggggaggccgcgagccgaggcgctccaactccggcgatgccgcctcgccctccccgccgcggttgatgcggcacgtgcacgccgccgcccgcaccaggacctgggccgggtcgcacggcttggcccccggccaccgcttcggcctaggatttcagatgcatgccaggtttccactgattgccagaactcgagatcactacacatggatccccaaaatcaacatggcagtggcagttcgttagttgtgatccagcagccttctttggatagccgtcagagattagactatgagagagagattcagcctactgctattttgtccttagaccagatcaaggccataagaggcagcaatgaatacacagaagggccttcggtggtgaaaagacctgctcctcggacagcaccaagacaagaaaagcatgaaaggactcatgaaatcataccaattaatgtgaataataactacgagcacagacacacaagccacctgggacatgcagtactcccaagtaatgccaggggccccattttgagcagatcaaccagcactggaagtgcagccagctctgggagcaacagcagtgcctcttctgaacagggactgttaggaaggtcaccaccaaccagaccagtccctggtcataggtctgaaagggcaatccggacccagcccaagcaactgattgtggatgacttgaagggttccttgaaagaggacctgacacagcacaagttcatttgtgaacagtgtgggaagtgcaagtgtggagaatgcactgctcccaggaccctaccatcctgtttggcctgtaaccggcagtgccttt

SEQ ID NO: 29913 - DNA, 573 bp, Homo sapiens
  source 1..573: mol_type = unassigned DNA
agtatgaagtttgttacaactatcattggaaatgcaaattgaagttgtgcctggtgttatgggttacactattcaaatcctctgcggttttgtgaatctggcttagtacttttagctaccttttgctttgaaagcactgagttaagaagttcttgaagaagaggaataattgtgcaggagtcaggattagatgttgaggactccgagactaaatccccgcaggttatgaatgtgttactcctcatgcgcaaagaaggtagaataaagtagaaactcgagagagctgagttgtgaaaacgagggggagctccaagaagttaacatgtaagacatagtttagagacattagtttaggaaatataggaaatggacttctttctgcgttgttccttaaaccatgttttttgcctcaggatttcagatgcatgccaggtttccactgattgccagaactcgagatcactacacatggatccccaaaatcaacatggcagtggcagttcgttagttgtgatccagcagccttctttggatagccgtcagagattagactatgagagagagattcagcct

SEQ ID NO: 29914 - DNA, 2708 bp, Homo sapiens
  source 1..2708: mol_type = unassigned DNA
ggggggactgggaaagagaagaggggcggaggtagggagtccagctttgaagaaggaggccagggatcggatcggcagaaatcacttaaaaaataaaaacaaaaaagcccccttttatttcaaagatgctactttgactgcaagcaaatctgcaccgaaagtttacagctccgggagctgggtcctgcgcgcccggagtgagcagtgggaccctggaaaatgccctttttttaaaaagccatttttctttcactttaagaaatatgatatcttttttttttctctcgacccaaaaggagataggcgtgtgcagattacaggcaatgcccccttcggtcagtgcagcgtggagtcgccgtgtgtgcgtgggttggacttgtgcgtcctggctgcgtgtctcaggcagggctttcgtgctcgcagtgtcggggtgggaaacctgtgccggatgtccgaggggctttgcagaaagcctggcagtgggcggcgtgacctctgcctgggggcggagtggctccttggggctggaaggcagttctcttgagttgggggagatcttagctggggagagggaggcgggggaagtgtgctcctgcatttcgtgacacgtacccttcggaggcgcccgcggcccccgcctgtctgagtctggggatcgtaagcaggggggcagcctggcccatggacagcgtcagtccgcctggagaaactcccctggggatcggctgtgtcccacctgctggggacggtgttggggcacagagaggcgataaactaagtgaaagcaaagagcagcgttgtcttctgccattcttttggaggtgaggagatccggtttccagcactgccttgctccgaattgggagacgtttgtcacctgccttgttcgctgtggcctctattctaaagagcggagatcggataaaggagttcagatgtgttctaagcctgctggagtgaccacacttccaagacctgatggaggccagagctcagagtggcaacgggtcgcagcccttgctgcagacgccccgtgacggtggcagacagcgtggggagcccgaccccagagacgccctcacccagcaggtacatgtcttgtctctggatcagatcagagccatccgaaacaccaatgagtacacagaggggcctactgtcgtcccaagacctgggctcaagcctgctcctcgcccctccactcagcacaaacacgagagactccacggtctgcctgagcaccgccagcctcctaggctccagcactcgcaggtccattcttctgcacgagcccctctgtccagatccataagcacggtcagctcagggtcgcggagcagtacgaggacaagtaccagcagcagctcctctgaacagagactgctaggatcatccttctcctccgggcctgttgctgatggcataatccgggtgcaacccaaatctgagctcaagccaggtgagcttaagccactgagcaaggaagatttgggcctgcacgcctacaggtgtgaggactgtggcaagtgcaaatgtaaggagtgcacctacccaaggcctctgccatcagactggatctgcgacaagcagtgcctttgctcggcccagaacgtgattgactatgggacttgtgtatgctgtgtgaaaggtctcttctatcactgttctaatgatgatgaggacaactgtgctgacaacccatgttcttgcagccagtctcactgttgtacacgatggtcagccatgggtgtcatgtccctctttttgccttgtttatggtgttaccttccagccaagggttgccttaaattgtgccaggggtgttatgaccgggttaacaggcctggttgccgctgtaaaaactcaaacacagtttgctgcaaagttcccactgtcccccctaggaactttgaaaaaccaacatagcatcattaatcaggaatattacagtaatgaggattttttctttctttttttaatacacatatgcaaccaactaaacagttataatcttggcactgttaatagaaaggtgggatagtctttgctgtttgcggtgaaatgctttttgtccatgtgccgttttaactgatatgcttgttagaactcagctaatggagctcaaagtatgagatacagaacttggtgacccatgtattgcataagctaaagcaacacagacactcctaggcaaagtttttgtttgtgaatagtacttgcaaaacttgtaaattagcagatgacttttttccattgttttctccagagagaatgtgctatatttttgtatatacaataatatttgcaactgtgaaaaacaagttgtgccatactacatggcacagacacaaaatattatactaatatgttgtacattcggaagaatgtgaatcaatcagtatgtttttagattgtattttgccttacagaaagcctttattgtaagactctgatttccctttggacttcatgtatattgtacagttacagtaaaattcaacctttattttctaattttttcaacatattgtttagtgtaaagaatatttatttgaagttttattattttataaaaaagaatatttattttaagaggcatcttacaaattttgccccttttatgaggatgtgatagttgctgcaaatgaggggttacagatgcatatgtccaatataaaatagaaaatatattaacgtttgaaattaaa

SEQ ID NO: 29915 - DNA, 2111 bp, Homo sapiens
  source 1..2111: mol_type = unassigned DNA
gtaaggccgttttcttttcccattcgctcatctgccaggaaaagggacttgccgttggcgcttcggcctcttgttcattgagaaaaaagaggaaatactccgcgtgcgcttgtagaaggggagtcgtctccagctccgaaccccggagtgttcatcagcggggaatctggctccgaattctctttttttctcccgccgattgctcggaagttggtctaaagcagaggttggaaagaaaggaaaaaagtttgcatcgagactggatttatttgcacatcgcagaaagaagagaatccaagggagaggggttggtgcaaagccgcgatcacggagttcagatgtgttctaagcctgctggagtgaccacacttccaagacctgatggaggccagagctcagagtggcaacgggtcgcagcccttgctgcagacgccccgtgacggtggcagacagcgtggggagcccgaccccagagacgccctcacccagcaggtacatgtcttgtctctggatcagatcagagccatccgaaacaccaatgagtacacagaggggcctactgtcgtcccaagacctgggctcaagcctgctcctcgcccctccactcagcacaaacacgagagactccacggtctgcctgagcaccgccagcctcctaggctccagcactcgcaggtccattcttctgcacgagcccctctgtccagatccataagcacggtcagctcagggtcgcggagcagtacgaggacaagtaccagcagcagctcctctgaacagagactgctaggatcatccttctcctccgggcctgttgctgatggcataatccgggtgcaacccaaatctgagctcaagccaggtgagcttaagccactgagcaaggaagatttgggcctgcacgcctacaggtgtgaggactgtggcaagtgcaaatgtaaggagtgcacctacccaaggcctctgccatcagactggatctgcgacaagcagtgcctttgctcggcccagaacgtgattgactatgggacttgtgtatgctgtgtgaaaggtctcttctatcactgttctaatgatgatgaggacaactgtgctgacaacccatgttcttgcagccagtctcactgttgtacacgatggtcagccatgggtgtcatgtccctctttttgccttgtttatggtgttaccttccagccaagggttgccttaaattgtgccaggggtgttatgaccgggttaacaggcctggttgccgctgtaaaaactcaaacacagtttgctgcaaagttcccactgtcccccctaggaactttgaaaaaccaacatagcatcattaatcaggaatattacagtaatgaggattttttctttctttttttaatacacatatgcaaccaactaaacagttataatcttggcactgttaatagaaaggtgggatagtctttgctgtttgcggtgaaatgctttttgtccatgtgccgttttaactgatatgcttgttagaactcagctaatggagctcaaagtatgagatacagaacttggtgacccatgtattgcataagctaaagcaacacagacactcctaggcaaagtttttgtttgtgaatagtacttgcaaaacttgtaaattagcagatgacttttttccattgttttctccagagagaatgtgctatatttttgtatatacaataatatttgcaactgtgaaaaacaagttgtgccatactacatggcacagacacaaaatattatactaatatgttgtacattcggaagaatgtgaatcaatcagtatgtttttagattgtattttgccttacagaaagcctttattgtaagactctgatttccctttggacttcatgtatattgtacagttacagtaaaattcaacctttattttctaattttttcaacatattgtttagtgtaaagaatatttatttgaagttttattattttataaaaaagaatatttattttaagaggcatcttacaaattttgccccttttatgaggatgtgatagttgctgcaaatgaggggttacagatgcatatgtccaatataaaatagaaaatatattaacgtttgaaattaaa

SEQ ID NO: 29916 - DNA, 1250 bp, Homo sapiens
  source 1..1250: mol_type = unassigned DNA
agggtgagaaaaaggcagggtgccgggtggagggagtgcccgcctctgctccgtgtggacagtctagcccggagcgggtgggagcgtcgccctgcctggcgccgggtctctgcggttcggaagtgcagctctctctcttccgttcttcgtggtcagcctgggtcacacttattttatttttggaagctcgggctgacccagcgcaggaagaaagtcatcaagcggtcgcgatcattttccattacctgaaagagttcagatgtgttctaagcctgctggagtgaccacacttccaagacctgatggaggccagagctcagagtggcaacgggtcgcagcccttgctgcagacgccccgtgacggtggcagacagcgtggggagcccgaccccagagacgccctcacccagcaggtacatgtcttgtctctggatcagatcagagccatccgaaacaccaatgagtacacagaggggcctactgtcgtcccaagacctgggctcaagcctgctcctcgcccctccactcagcacaaacacgagagactccacggtctgcctgagcaccgccagcctcctaggctccagcactcgcaggtccattcttctgcacgagcccctctgtccagatccataagcacggtcagctcagggtcgcggagcagtacgaggacaagtaccagcagcagctcctctgaacagagactgctaggatcatccttctcctccgggcctgttgctgatggcataatccgggtgcaacccaaatctgagctcaagccaggtgagcttaagccactgagcaaggaagatttgggcctgcacgcctacaggtgtgaggactgtggcaagtgcaaatgtaaggagtgcacctacccaaggcctctgccatcagactggatctgcgacaagcagtgcctttgctcggcccagaacgtgattgactatgggacttgtgtatgctgtgtgaaaggtctcttctatcactgttctaatgatgatgaggacaactgtgctgacaacccatgttcttgcagccagtctcactgttgtacacgatggtcagccatgggtgtcatgtccctctttttgccttgtttatggtgttaccttccagccaagggttgccttaaattgtgccaggggtgttatgaccgggttaacaggcctggttgccgctgtaaaaactcaaacacagtttgctgcaaagttcccactgtcccccctaggaactttgaaaaaccaacatag

SEQ ID NO: 29917 - DNA, 1689 bp, Homo sapiens
  source 1..1689: mol_type = unassigned DNA
tgaggagatccggtttccagcactgccttgctccgaattgggagacgtttgtcacctgccttgttcgctgtggcctctattctaaagagcggagatcggataaaggagttcagatgtgttctaagcctgctggagtgaccacacttccaagacctgatggaggccagagctcagagtggcaacgggtcgcagcccttgctgcagacgccccgtgacggtggcagacagcgtggggagcccgaccccagagacgccctcacccagcaggtacatgtcttgtctctggatcagatcagagccatccgaaacaccaatgagtacacagaggggcctactgtcgtcccaagacctgggctcaagcctgctcctcgcccctccactcagcacaaacacgagagactccacggtctgcctgagcaccgccagcctcctaggctccagcactcgcaggtccattcttctgcacgagcccctctgtccagatccataagcacggtcagctcagggtcgcggagcagtacgaggacaagtaccagcagcagctcctctgaacagagactgctaggatcatccttctcctccgggcctgttgctgatggcataatccgggtgcaacccaaatctgagctcaagccaggtgagcttaagccactgagcaaggaagatttgggcctgcacgcctacaggtgtgaggactgtggcaagtgcaaatgtaaggagtgcacctacccaaggcctctgccatcagactggatctgcgacaagcagtgcctttgctcggcccagaacgtgattgactatgggacttgtgtatgctgtgtgaaaggtctcttctatcactgttctaatgatgatgaggacaactgtgctgacaacccatgttcttgcagccagtctcactgttgtacacgatggtcagccatgggtgtcatgtccctctttttgccttgtttatggtgttaccttccagccaagggttgccttaaattgtgccaggggtgttatgaccgggttaacaggcctggttgccgctgtaaaaactcaaacacagtttgctgcaaagttcccactgtcccccctaggactttgaaaaaccaacatagcatcattaatcaggaatattacagtaatgaggattttttctttctttttttaatacacatatgcaaccaactaaacagttataatcttggcactgttaatagaaaggtgggatagtctttgctgtttgcggtgaaatgctttttgtccatgtgccgttttaactgatatgcttgttagaactcagctaatggagctcaaagtatgagatacagaacttggtgacccatgtattgcataagctaaagcaacacagacactcctaggcaaagtttttgtttgtgaatagtacttgcaaaacttgtaaattagcagatgacttttttccattgttttctccagagagaatgtgctatatttttgtatatacaataatatttgcaactgtgaaaaacaagttgtgccatactacatggcacagacacaaaatattatactaatatgttgtacattcggaagaatgtgaatcaatcagtatgtttttagattgtattttgccttacagaaagcctttattgtaagactctgatttccctttggacttcatgtatattgtacagttacagtaaaattcaacctttattttct

SEQ ID NO: 29918 - DNA, 9019 bp, Homo sapiens
  source 1..9019: mol_type = unassigned DNA
tttgggaaatacgtccatcaagatttagatctgcctgtaaaatctatacaaagtatatgccactacaggtttgactcgccccctcccccgtttttttgttttgttttgttttgttttgttttgttttgtgttttctctgctgtgtcaaagaacaagacagaactatctctgtttctggctccactgcctgccagtgaaggagttttcattcagactttccgaagagaggtggagaaacctaaagactgaggagaagagatcctttgagccagatggggcattagttcttctgcttttctcagcatggataaaccatttcctcaaggattttctcatgtgccctgaaatccatgtaactacaagggctcctctttatcaccataagtgccaccctgacttaaaaccactcagagctaaaaaatcaaggcaaaatggatgctgcggtgacagatgattttcaacaaattctgcctattgaacagctgcgctctactcatgctagcaatgactacgtggaacggcctccagccccctgtaaacaggccctctccagcccttcccttattgtgcaaacccacaagtctgattggtctctggctaccatgcctacttctctcccccgcagtctcagccagtgccatcaactgcagcccttgcctcagcatctgagccaatctagcattgccagctcaatgtcccatagcaccactgcctctgatcaaaggctcttggccagcattacaccctcaccttcaggccaatccatcatccgaacccaacctggagcaggggtccacccaaaggctgatggtgctctgaagggagaagctgagcaatctgcagggcaccctagtgagcacctcttcatctgtgaggaatgtgggcgctgcaagtgcgtcccctgcacagcagctcgccctctcccctcctgctggctgtgcaaccagcgctgcctttgctctgctgagagcctcctcgattatggcacttgtctctgctgtgtcaagggcctcttctaccactgctccactgatgatgaagacaactgtgctgatgagccctgctcttgtgggcctagttcttgctttgtccgctgggcagccatgagcctcatctccctcttcctaccctgcctgtgctgctacctgcctacccgtggatgcctccatctgtgccaacagggctatgatagcctccggcgaccaggctgccgctgcaagaggcacaccaacactgtgtgcagaaagatctcttctggtagtgcacccttccccaaggcccaggaaaagtctgtatgaccttccaacaaggtggatccagagcttttctccttcgagtccccaacagcaaagcataggcctcatctttggagagggggaggagtgataaactagccaaagttagggcctctcttttgttcctgcagtgtcaggggaatgaccaagtacatcctggtgcaggatgccttgttctttctcacagtatctatcccactcctcttcagtctttacaccctgccagctcagcctttatggttgtcatggcaaattcaggtgatatatgggtatgaggtttgaacactgaggactgacagggccagcaacgtggaggtttaggggctccccaatgtaatacctctcgatgcaggctctgatcgtcactctgttttctgctgtgcctttggaagctttcttctaagatggttttcacaggtacatgtggaacagcgttcaaccttccagggaatacgaccccttctccctgttactgcccttctcttctttattcctctctcctctttcattattctgttctgtattcctttccccttcattctcaccctgtctgcttttactttttctctttcttcctccctttctccttctcccctccttctttttcagactgatcctttctctgcctgtatttctatctcatttgatctatatttgtctctctctacctgtccctttttctctaacatgtccaaaagtgctgtttttccatagatgtttccttagatgccaaactttgctatgctatactatttactaatttttattaagggaaatggattactgtaatgaactgatcactagcaatagtgtgtatcccgatgtgtgtgtgtgctcacaaccactctcacctgttcgtgagcgcatgaggcgaagttatcttatatttccaggtttaactagttggagtttttctccctttctcaataatcaacttatagtgctgacagattccactagcatgctgagtaggatagtaaatcaggatgctcataactttgtatgtctgacccaagtgccaaaggcagacgtgctttatagctaaatgaacaaagcaaaggatacagaggtatgttctctcttagaagctaacttccctgagactgcatggctcaggcgttaataatggacataaaaagtcataaaacgttagagctggaaggaatcttaactattaatctagttcaatgcccttattttacagatgggaaaactgaggcctggaggtaggaagggacttgcccccaaggccgcacactgagttaacagcagaattgagactggaatataggccttctgactcctagttcagtattcttacccctgtaccacattgagtcatgggactttttcctagggctctattaacagtgacagaaagccattcccattcaattacttttcaggaaccatgcctagttagtgtggtggtctttctccagtgcatggtgggtagctaattaactatcaggtgttgaggctgcccccagtggacatcacctttggctctgtcaccttgtagaagctcaagtgtggaaaagaaaagcttaaagaagccctaaccaagctgtatcttcgccattgcatctactctttgctgcacacactgtgcttgctcctggctttgtctgcaatggcagctgcctgagaacctaaatttcagcaacagtgaaaaactgagatgaaagatgtataatgtagagaactgacttctctcttaaaaagtacagagagcctgtgctgtgaacccccttcaatgggaaaaagctgcagtggtgatggcaggctcctaaagactgctgctaaaagacacaagaattatacagtttccctctataagtgaatccaaaattcactgacgaattcagagattgagggcacttgcttgaaatcaaggtgctccaacttagtttaagacctccagactctaactttatagatcatctcttctagagtgtgcatggatgtgtgttgcagggtggagaagtggggagaagtgtatagtagtacacggggggaagaggggacctccatgtccctttgttggatacatattacagaaatatgtgccactcactttttgttggttctgaatcttcctgaagtgtactgacatttgggctgcacagagccccacaccttcacttacacctcctcttctagaattgctttgctctatttttgtatatataaatatgttatgatgattattaataatgttaatgatattgctgcaaatggtgccatatataaggttaggcttcttggaacatttataaacccaaaccaatacctgtaacctcttatgttgctttcagatccttcaattttaagtaactttttaatcttacaagtctgcttgattgtactttacacttatctaccctgaaaagctctgcccagttctctgggtcaagctggatggtgatgagtagcaacacacacttctctgcttctgcctgaaatgtgcttagagctcagttatctaaggattctctgacactagtgcattgttcctggagctaaattattctatggatgtttgcttattagtttcaggccccaaaataacacgagcccctccaccttgatagctccttgatatcccaatcttgcagtcctaactcaggcaaattgtgcactgccagaggggccctgggttctgccatatacccagaggagcctttctcagtgtgtttctaaatggccttacacttggtagaagaaattgaagggttactcaaatacagttgcaatctgcaatctgctgttgagtcagggctttcacttgtgtccaagttggcctgatatggactgcatctgctttacgtatagatgggtcctgttgggatatgcgcatggacgtgtgagtgagtgtgcgtatgtatcccttctgtgattatatatattcacacatctctatatattttaatgtattgcacatgtatatttaaaatatatacgaaagaactctaaatcctgcagggaggctctgttttcattatttttctactttgtgtcatgtcctgtataaacaggaatatttagagggtgtttcctgcttagcatttttttgcagttaaatcatctgttagcccctaactctactgccttccacatattggttccttgatacatttcatatgatatcagccaagagttttcctgtggttccagcccatcttccctaatcacaatagcaataataaatatagtgaatacttacatagtgcttactatatgctaagcactatttttagcatgttatttatattagctcattcattcctcacaattctacaacataggtatcattccaacctctattttacagatgagaaaactgaagcacagagaagttaagtgacttgccaaaaggtaacaattgtaaatggtagagctaagatttgaacccagggtgtctgactcccaggtccatgctccagagtcagatatagaaggctggagcacagtgtaaaccattctggagtaacaagcctcaaatggtgaataattctttccctaactctggtccacctgcaacctaggagttaaaataagtatcttgctatgttaagagtaaagcaatagttacaggcatcatatattagctgtcttgctcccaaaatggtgacattacaaacttttccactattccctttgaaaacatgcttgcagccagttaccatttcttagcttatgatgtagagctattaagggagtattttcacttgtgccaaagagggtaagcgtttattagccttatctttattggccagggaaaactaattcaatttttttttgaacaaagtataactgagactatttttggagcttaagatttgttagagctgttaacattcaaccttattgattatattgagagcgctcttctgattcaaatgtaagcaaaccactgatgaccactggtccgtataacacattttaccaacagctccttcacactgaatcctttaacttggccaaaggacccttaaagaacatctagtccaatgtcaacattttatagctggagaaagggatgcacagagagggaaaataacctgtccaaagtcacacagttctgaaaattgagtggaattatgactttataccagagttcctaatttccaggtatcttagcctcagtttcttaaaaaatagagtttgaagcaaaagctatgtgcgatccagggtagtatgagtaaggaaagggttaatgagggagggaagaaagaagaacaaataaaaagcatgtcactgagttggccacggtctgttccttggcaagctaatttcgcaattttttgtgacagaccatataaaactactacatctccatacagcccacgtggtggaggaaaggaggtgaattcatctgctagctctcatctcattagtcaaattcttccccatgtgatatttacccttctacatttttgggtagtgcgtgatgggcacttaaatatgtaccttggcatttcatgcttcagcaataatgggaaggattgtggctccactataaacagtaaggcaagtatatgaatatagggagattaaatttaaagtgctacactagggtggtgcttttaccttatgtctttaatcacattccttcgaagtaagttagagataacctaccacctttaaagtaaataaagctttattgtggctcttagaactgtactatgtttgccttcctgagcctatttattctctagcttgctttaaagggcttcttttttatatggaaattaattccctgttcaattaaaggagtaacaaactctcaaaatatctttcttcttaatataaaaaggaatttcacattattgaactcctcaaaaagcatgtgtaagtcaaaatatgtatgtgaaggcacatatgttcttttaggttccatgagcataatagcaggaaaactggttaagtcaataaatgctggggaaaaaatggctaaacaaggtattctgtaacatgaaaataaagcaatgagttggttggctggctttttaaaaaatatttcagccactaattatgacacagacacattataagaattatgctaccttttattcacatatacaatagttccctgtgtcctatagatcattgtcacataaagcaaaagcattagtgccccatttggacctttggccgaaggtttgataagattttgtaggactgaaattcttggtccctttatcctagtttaggcccatatccttattttcactctcaaagataagatcatgacactaccagtgttgctgctgttaaaggccaggatggacaagataaggaaaggcattttgggaatgacactgactaatgttaggaatcttgctgtcattacaatccaagttatatatgtttgctcccatatgtatttgttggccaatctcctgaaaaagaagaaggtaattctaacccacacattgtcattcccaaactaacctggcaatccttttgaccataccaggtaatagtcatccctctgatggtaaaagacagagatgtcaaggctctggaagctcccaggtccttgaagaactaactaaactgctgaacacagaagtggtaatgtaggcaagccacaggtatgttctcttgtaacaagatggggttgaccatatgtgaaccctgaagagtcattttgaacctgtgtcctaaggcctagagtactttaatcctcatcttcaaagtcttaccactctgataacaaaaagaaacactacaaagaaactgcaaggaaagggacagtcattttttttaatatctaccaattatttagttattcatatatgcatttctttatatagaaaagtatttatatgaagtttccaaaagactctgatattcagctttatagtcttggatagaaaatcatgtgtccttggatggggattcgcacaccaaggcttaacagaattagtttggggaatactcatttttactctagagattagttggcttaaacaactttactcgtgaatttttttcttaatggaggtgaagacctcccaaagaggagaaggccccaggcctttcttaatatataaaccatattgaaagaaagaaagaaaaaagtaatgggaagtaatagtaaatgtggatccagaaagaaaaacaaaggttaagaaaatgatgtatgtgaaagaaaaaaagctctataatcagtgtgtttctctcacctaaaacaccatttactaactacttggttcagttgtaccctttaactctattttgtccttgacttatatcaacactcttcttttccaaactcctatagctctccatctggaatgattctatggggtggggggtcgggggaggagaaagggagacagcagaagaaagaaagagagagaaagatagagagagagagagagatgggtggagacttggcctctctcctagaggttcaaagttagaatatgccactaacactatctgcctttcaaactcccttctaggacatgctccatagtacttagatcttatatcaaatgacaaggtttctctccttcagagagaaataccagactggatttgtggtttccctggattggttttttctgagtcaaagtggtgttgtagaaatcacagtaccctgagaccaattaagtcagaatctttggaggtgttgaggaatggatttttaaagttcccagatgattataatatgcaaacagatttgagaaaattgaatcactttattccataaatgcagatagtgaggctaagagagggaaagtgacttactcataaccacaccgtgagttagtgaccaagtcaggataagaatccaggtctgctgactcctaggccagaattcttgtctttatactacactgcttctatctctaccctattccccctctgagcctttgcttttctcatctgtaaaatgacgataataaagcctagagagtgtatgagaatcattaaagcagaagcatttttcttaatgtacaaggttctatacaaatgcaagggaattaatgtataacatatatgtggggctaagtctctaaaacaacataataaaagttgtttttattttagtcaatcttttaggtattgtgtctacctgatagcatgtaacaagattgaacacttgtgtaggtcgtatgtgcctttaatctgaggttggcctcagtgacaatcaaaattagcagttgaggaaaaaggtcatacatttttctcttgcccttgctggaatagggatcaagaggaatataaaagcagtgggatatctggatttcttatactcagtcaaccacaacatggccttagtactgaactagcccagggtttcaatggaactcgtagatctcattcccaaggctggtcctggttgaagggagaaggtcaaaaaaggacgtgtcttctgaaaggcattacccatggaaagccaagggggagggttgcccactaggaggagcttcttttgtagaagccagaatggaggaaaggggctttctgacttggagcatctgaggaaatagattatttgaggatctagtactcccagaataatctgtaaccacaagaaacacatttcttgaactccagcgccccagaacaggatatccatatccaatcccatcgtatccatcctggatgttatgaatttccagagagggccacttctacccccctaggagtcatacatctggctacttatttgttaaaaataaaattctgtaccatttataaaa

SEQ ID NO: 29919 - DNA, 3302 bp, Homo sapiens
  source 1..3302: mol_type = unassigned DNA
tttgggaaatacgtccatcaagatttagatctgcctgtaaaatctatacaaagtatatgccactacaggtttgactcgccccctcccccgtttttttgttttgttttgttttgttttgttttgttttgtgttttctctgctgtgtcaaagaacaagacagaactatctctgtttctggctccactgcctgccagtgaaggagttttcattcagactttccgaagagaggtggagaaacctaaagactgaggagaagagatcctttgagccagatggggcattagttcttctgcttttctcagcatggataaaccatttcctcaaggattttctcatgtgccctgaaatccatgtaactacaagggctcctctttatcaccataagtgccaccctgacttaaaaccactcagagctaaaaaatcaaggcaaaatggatgctgcggtgacagatgattttcaacaaattctgcctattgaacagctgcgctctactcatgctagcaatgactacgtggaacggcctccagccccctgtaaacaggccctctccagcccttcccttattgtgcaaacccacaagtctgattggtctctggctaccatgcctacttctctcccccgcagtctcagccagtgccatcaactgcagcccttgcctcagcatctgagccaatctagcattgccagctcaatgtcccatagcaccactgcctcttctaccactgctccactgatgatgaagacaactgtgctgatgagccctgctcttgtgggcctagttcttgctttgtccgctgggcagccatgagcctcatctccctcttcctaccctgcctgtgctgctacctgcctacccgtggatgcctccatctgtgccaacagggctatgatagcctccggcgaccaggctgccgctgcaagaggcacaccaacactgtgtgcagaaagatctcttctggtagtgcacccttccccaaggcccaggaaaagtctgtatgaccttccaacaaggtggatccagagcttttctccttcgagtccccaacagcaaagcataggcctcatctttggagagggggaggagtgataaactagccaaagttagggcctctcttttgttcctgcagtgtcaggggaatgaccaagtacatcctggtgcaggatgccttgttctttctcacagtatctatcccactcctcttcagtctttacaccctgccagctcagcctttatggttgtcatggcaaattcaggtgatatatgggtatgaggtttgaacactgaggactgacagggccagcaacgtggaggtttaggggctccccaatgtaatacctctcgatgcaggctctgatcgtcactctgttttctgctgtgcctttggaagctttcttctaagatggttttcacaggtacatgtggaacagcgttcaaccttccagggaatacgaccccttctccctgttactgcccttctcttctttattcctctctcctctttcattattctgttctgtattcctttccccttcattctcaccctgtctgcttttactttttctctttcttcctccctttctccttctcccctccttctttttcagactgatcctttctctgcctgtatttctatctcatttgatctatatttgtctctctctacctgtccctttttctctaacatgtccaaaagtgctgtttttccatagatgtttccttagatgccaaactttgctatgctatactatttactaatttttattaagggaaatggattactgtaatgaactgatcactagcaatagtgtgtatcccgatgtgtgtgtgtgctcacaaccactctcacctgttcgtgagcgcatgaggcgaagttatcttatatttccaggtttaactagttggagtttttctccctttctcaataatcaacttatagtgctgacagattccactagcatgctgagtaggatagtaaatcaggatgctcataactttgtatgtctgacccaagtgccaaaggcagacgtgctttatagctaaatgaacaaagcaaaggatacagaggtatgttctctcttagaagctaacttccctgagactgcatggctcaggcgttaataatggacataaaaagtcataaaacgttagagctggaaggaatcttaactattaatctagttcaatgcccttattttacagatgggaaaactgaggcctggaggtaggaagggacttgcccccaaggccgcacactgagttaacagcagaattgagactggaatataggccttctgactcctagttcagtattcttacccctgtaccacattgagtcatgggactttttcctagggctctattaacagtgacagaaagccattcccattcaattacttttcaggaaccatgcctagttagtgtggtggtctttctccagtgcatggtgggtagctaattaactatcaggtgttgaggctgcccccagtggacatcacctttggctctgtcaccttgtagaagctcaagtgtggaaaagaaaagcttaaagaagccctaaccaagctgtatcttcgccattgcatctactctttgctgcacacactgtgcttgctcctggctttgtctgcaatggcagctgcctgagaacctaaatttcagcaacagtgaaaaactgagatgaaagatgtataatgtagagaactgacttctctcttaaaaagtacagagagcctgtgctgtgaacccccttcaatgggaaaaagctgcagtggtgatggcaggctcctaaagactgctgctaaaagacacaagaattatacagtttccctctataagtgaatccaaaattcactgacgaattcagagattgagggcacttgcttgaaatcaaggtgctccaacttagtttaagacctccagactctaactttatagatcatctcttctagagtgtgcatggatgtgtgttgcagggtggagaagtggggagaagtgtatagtagtacacggggggaagaggggacctccatgtccctttgttggatacatattacagaaatatgtgccactcactttttgttggttctgaatcttcctgaagtgtactgacatttgggctgcacagagccccacaccttcacttacacctcctcttctagaattgctttgctctatttttgtatatataaatatgttatgatgattattaataatgttaatgatattgctgcaaatggtgccatatataaggttaggcttcttggaacatttataaacccaaaccaatacctgtaacctctt

SEQ ID NO: 29920 - DNA, 4938 bp, Homo sapiens
  source 1..4938: mol_type = unassigned DNA
gcgagctgagctgacagcgcggagctggcgctgtggagcgcagggagccttgccggttcctccgaccggcgtctgcgagtacagcggcggctaacctgccccggcttcaggatttacacagacgtggggcgatgcttgtgaccctgcagctcctcaaaccagcctgtattgagcggtttgcagcctgatgctcagccccctccccacagggcccctagaagcctgtttctccgtacagtccaggacctccagccccatggagcccccgatcccacagagcgcccccttgactcccaactcagtcatggtccagccccttcttgacagccggatgtcccacagccggctccagcacccactcaccatcctacccattgaccaggtgaagaccagccatgtggagaatgactacatagacaaccctagcctggccctgaccaccggcccaaagcggacccggggcggggccccagagctggccccgacgcccgcccgctgtgaccaggatgtcacccaccattggatctccttcagcgggcgccccagctctgtgagcagcagcagcagcacatcctctgaccaacggctcttagaccacatggcaccaccacccgtggctgaccaggcctcaccaagggctgtgcgcatccagcccaaggtggtccactgccagccgctggacctcaagggcccggcggtcccacccgagctggacaagcacttcttgctgtgcgaggcctgtgggaagtgtaaatgcaaggagtgtgcatccccccggacgttgccttcctgctgggtctgcaaccaggagtgcctgtgctcagcccagactctggtcaactatggcacgtgcatgtgtttggtgcagggcatcttctaccactgcacgaatgaggacgatgagggctcctgcgctgaccacccctgctcctgctcccgctccaactgctgcgcccgctggtccttcatgggtgctctctccgtggtgctgccctgcctgctctgctacctgcctgccaccggctgcgtgaagctggcccagcgtggctacgaccgtctgcgccgccctggttgccgctgcaagcacacgaacagcgtcatctgcaaagcagccagcggggatgccaagaccagcaggcccgacaagcctttctgacagtttgtgtcgaagccccagtgctctgcctggaaacctggttctcttctgacatctaagaagactgcagcaaggtcagaggttttagcctcctgaggctgaccttgctagtctgcccactccctacccccagcttcggaaaatacagagaccaccaccacgtaccctgtattccccaaggtgatgaagaagcactttggggctttttttcagggtcctgaaactttgtgtcaaacagacaatgcaggggcagggtgtggtttggggggaaatttttctttttcagaagacagaacacagatgtggacacatatccggaaactgcagctgcttgaatgccttcccagcccctccttctccctccctccctccgcccccccccccttcctcttttccattgtctttggctctcacaggagctagctgcctgggaggaattgttaactgagtaccagggtacctttaaagaagacccttggagtcttctataccttcttctccttccccatctcactccaccccactttgtccctgatgtcttggggaaggtgtagaacaccctagcagttcctattgtatatacttgggagccactgagaacagaggacggccagtgagtccaagcctcgttcctccttctgcctccccggagccacaggatggatttaggagccactgctcagtgcacttctcccttccaactgcatcaactaactctcgggggtgttctgctcaccacaccgtccttcggttcttactgagtcacagactcgcctgcccactacgtgtcctgggttctctctactcagatcccttccagaaactttatatgggtagaggaagccagggcggcaaatgcgagaccaaatatcattttgccaatgagtctgaggctgtggtctctggatccagtcattatgtttttatagaataattaaaccggatgctaacggtgttttaaaaaataataataaaacaacttgtttccttttggccacccccaggaagggctgatttcaaaatctgggggcgagcaacctcaaggaacacaatttccctccctatcaacaagaggattttaacagcaaagaagagaggcagcacctcccattggcagaatgaccgctgagccaggctgggtttgggtttcttctcttctgattctgctgctcactgtcatagccttttgtgtatagtgatgtgtctgtatctttaatgtaaatagagagatgatgaaaaaagagtctattttagtgttaggaagccccagcaggggagtcggaagagcttggaagagctggggagagggtaggggaaaggtttttccaggggccactgggtttgagccctgcttctgtgcacagccacaccaccctctcccgacagccctcaaagacgtagcaactctttctctcaaggtgctaaaggactcagaaggtgcagcacgtccagtgggtaggtacttgttgcatgcaaaagctgtagtgtatctggtccttcctccccagcttttgtgtggggttcttgctttgtgtggtattttgttttcccctctaatgagagggcatggcctgagtcagaagagctaccccaggtgaaactggaagtgcatgaggcagagcgtccgtagcatttccagtttgttctgtataggaacagaggtgcctccgggaaggaggcagcgaggtaggtagctatgataggcacctaatgcttctcaaggacttattttttccttcttgaagactagtagtaacatcttatgatttagagtaagttgattgtaaccataggtatttattgattggaggaagggagggtcatattattttcggctttatttatgtaacatttgctagcttgtaaaaggcgaatgtgaaatattgcatctgcattttccaaggctgattcgtgtagctacccttgccacagttgtgacggatgtatggatgttcttgaacatttcagaaggagtggtagaaaaaaacacacattcagccaaccacttatatgaattgaatgtatcagaagtgtactgaagggactggagatggttttcctcagatgagggggccccaaaattgatagtgcacatctgcacgctttctgcgaggcctcagaacttcccagggcccctccctcaaattgtctccatgggaaacttgacccagtggcaagttgcactttggtgatcttggtggtctacacacccgttctgtggagagtcgatttacataagctgtgtatacacacacacacacacacacacacacccctaccccacactgactgtctaccgacaaagaccctatttcctggcaaacggcctcctgaaccctgactttttgtgtacatacttgtaaacacggatttttctgggttttggtttgctttttccttttttccccctgcccctgttctagcttgttcttcttggtttgctttcaacctgcttgatggatgtctgcagagtgctctctaagagtccacctcagtgcctcgtgtgctcagtggtcatgggaaaggagcgaaggaaccatccttggttctcccagcttggttgtgtagcaatccctcagcattgtttttctcagcttcttggcaaaaattaaaacaacaacaacaacaacaacaacaacaacaaacagaaggataaactggcttgcctgtggaccctccccggctctggggccagtcgagagccactgagggacccagcactcagagacacaacacacatgtgtagctgcttctggctgagtgtgtttcctgtcaccaatggcctgtttggctggacgatgcctcggcttgaccttttttgaaaagtgctggttagttcccgcccctggtaaacctggggtaggtgggggttctgtcttaactcgaggggcacctgggatccaggacgcttctagggggctctggctgcccgtgttaatgaaggacagcgcttccgcgagcaccctgggaactgggtcttgggtagcaaagccctcccagagaaaagattgggcacaactaaggctttcctgagcaggaagggggtgaagaccaatcccttcctttggtcctttggtacgcaccccctcagagctgagatggaagacatggctagttcttttcagccttgtggagcctgtcagtcgccatcatacctcgagtgaggcccagctagataatgacttgtccaagatggcacacgtggaaagttgatctgcaccagaacccggatgactgtcaccttgaagcatcctgttctccttctgtgctgtcccaggaagtgtctggcgggcgtgggcagcacagctctacactgtacgattcactagggcatcctgcgagcctcactagccttctggttcatgcctttgacaagcatttttgtgccccctctgcttactgtgacagtcgatgatgaatcttgcgttgccattttctgctgtgggtaactgcgtgcagtgtcttgccttgctttctcttcttactgtcccacagcttggtttcatgttacaaacagaaaagctcgaggctcccaccccgccacatcccaacttcatttccccctcactgtagcccatttccaccccaccacaaagttgccacaggttttctttgtatagaatatttattttgaagctctattttaatagtatttattttagaaagtctactattgtaagagttcttctgtttgtgaagaaaaaaacaagttaaaaactgaatgtactgatttagaaaatatatataaatatatattgttaaatatacacgggactgccgtt

SEQ ID NO: 29921 - DNA, 321 bp, Homo sapiens
  source 1..321: mol_type = unassigned DNA
atggagcccccgatcccacagagcgcccccttgactcccaactcagtcatggtccagccccttcttgacagccggatgtcccacagccggctccagcacccactcaccatcctacccattgaccaggtgaagaccagccatgtggagaatgactacatagacaaccctagcctggccctgaccaccggcccaaagcggacccggggcggggccccagagctggccccgacgcccgcccgctgtgaccaggatgtcacccaccattggatctccttcagcgggcgcccctgctctgctacctgcctgccaccggctgcgtga

SEQ ID NO: 29922 - DNA, 2379 bp, Homo sapiens
  source 1..2379: mol_type = unassigned DNA
attttcccaggcagtggttgcaacatcgccgcggaggtagcgagctgagctgacagcgcggagctggcgctgtggagcgcagggagccttgccggttcctccgaccggcgtctgcgagtacagcggcggctaacctgccccggcttcaggatttacacagacgtggggcgatgcttgtgaccctgcagctcctcaaaggcccctagaagcctgtttctccgtacagtccaggacctccagccccatggagcccccgatcccacagagcgcccccttgactcccaactcagtcatggtccagccccttcttgacagccggatgtcccacagccggctccagcacccactcaccatcctacccattgaccaggtgaagaccagccatgtggagaatgactacatagacaaccctagcctggccctgaccaccggcccaaagcggacccggggcggggccccagagctggccccgacgcccgcccgctgtgaccaggatgtcacccaccattggatctccttcagcgggcgccccagctctgtgagcagcagcagcagcacatcctctgaccaacggctcttagaccacatggcaccaccacccgtggctgaccaggcctcaccaagggctgtgcgcatccagcccaaggtggtccactgccagccgctggacctcaagggcccggcggtcccacccgagctggacaagcacttcttgctgtgcgaggcctgtgggaagtgtaaatgcaaggagtgtgcatccccccggacgttgccttcctgctgggtctgcaaccaggagtgcctgtgctcagcccagactctggtcaactatggcacgtgcatgtgtttggtgcagggcatcttctaccactgcacgaatgaggacgatgagggctcctgcgctgaccacccctgctcctgctcccgctccaactgctgcgcccgctggtccttcatgggtgctctctccgtggtgctgccctgcctgctctgctacctgcctgccaccggctgcgtgaagctggcccagcgtggctacgaccgtctgcgccgccctggttgccgctgcaagcacacgaacagcgtcatctgcaaagcagccagcggggatgccaagaccagcaggcccgacaagcctttctgacagtttgtgtcgaagccccagtgctctgcctggaaacctggttctcttctgacatctaagaagactgcagcaaggtcagaggttttagcctcctgaggctgaccttgctagtctgcccactccctacccccagcttcggaaaatacagagaccaccaccacgtaccctgtattccccaaggtgatgaagaagcactttggggctttttttcagggtcctgaaactttgtgtcaaacagacaatgcaggggcagggtgtggtttggggggaaatttttctttttcagaagacagaacacagatgtggacacatatccggaaactgcagctgcttgaatgccttcccagcccctccttctccctccctccctccgcccccccccccttcctcttttccattgtctttggctctcacaggagctagctgcctgggaggaattgttaactgagtaccagggtacctttaaagaagacccttggagtcttctataccttcttctccttccccatctcactccaccccactttgtccctgatgtcttggggaaggtgtagaacaccctagcagttcctattgtatatacttgggagccactgagaacagaggacggccagtgagtccaagcctcgttcctccttctgcctccccggagccacaggatggatttaggagccactgctcagtgcacttctcccttccaactgcatcaactaactctcgggggtgttctgctcaccacaccgtccttcggttcttactgagtcacagactcgcctgcccactacgtgtcctgggttctctctactcagatcccttccagaaactttatatgggtagaggaagccagggcggcaaatgcgagaccaaatatcattttgccaatgagtctgaggctgtggtctctggatccagtcattatgtttttatagaataattaaaccggatgctaacggtgttttaaaaaataataataaaacaacttgtttccttttggccacccccaggaagggctgatttcaaaatctgggggcgagcaacctcaaggaacacaatttccctccctatcaacaagaggattttaacagcaaagaagagaggcagcacctcccattggcagaatgaccgctgagccaggctgggtttgggtttcttctcttctgattctgctgctcactgtcatagccttttgtgtatagtgatgtgtctgtatctttaatgtaaatagagagatgatg

SEQ ID NO: 29923 - DNA, 553 bp, Homo sapiens
  source 1..553: mol_type = unassigned DNA
ttttatgctatgcaactgccttgcagttgactttttcttgcctggcctctgtaaggcctgaggctcctcggccaccctgtacctccctatcctcgggcaccgagctgtgccaggccccggagcccccaggccgcgctagggctgcggtgggggttgaaggtgcgtttacataacaccaggcgtgtgggagctggaggaagaggttgcgaatgtaggagagataaggctcctgctttccctccttccttcttggtggtaccaggcttgacatcacagagaagaggatagagacgccagcctgtattgagcggtttgcagcctgatgctcagccccctccccacaggtacaaatgcaggcccctagaagcctgtttctccgtacagtccaggacctccagccccatggagcccccgatcccacagagcgcccccttgactcccaactcagtcatggtccagccccttcttgacagccggatgtcccacagccggctccagcacccactcaccatcctacccattgaccaggtgaagaccagccatgtggagaatg

SEQ ID NO: 29924 - DNA, 7780 bp, Homo sapiens
  source 1..7780: mol_type = unassigned DNA
ctctcgggcgtgaggagctggcccgctgagctgctggtgggcactggctggcggggaacctgcagccgctcttgtcctctcccgccgcttctcgggatcctgccccccggacccgggcccgcccgctcttctccggccgggtgggaacgatcggtttgcctgcccctcgcctcacacgctccccgccgccccctccacccccctgaggaggagtcccggctggagcgtgtctggaggaatccgccgccgcggggcccctagccctgctctgccggcgcctgaggaccgacccagacgccgccgggggttgaggggcagccggcggcgaggcgggagatggtggggtgggctccggcaggaccgcgccgccgctgcccggagcctgggctcggcacccccccgccggcccccaccgagcggagctctgcttcctcctcgccgcatccctgagggaagcgccgcctctgctcccgggttctccgcccgccgactccttcctggccggaccccgctgcgctccaccccagtggctggaggagcagctctccagtcagcctttgcagcccctctctttttccctttccaccgggcctcctcggatcccttggctgggcactgaggcgggggaagaggctggggtcgccacggcggaggttgctgccgccacccccctgcgggggtggccggggttcccggctgggggggtaccgttctgggtgaggcatccaccatggtgaggcccctgtgccgctgcccccgcgcccccccggccgccgctgcctcctgcccctcggtgctgctgttgctcccccgcctgctgttgctcctccatctccagatcggatcacggtgagggaaagatgagcgaggagacggcgacttctgacaacgataatagttatgcacgagtgcgagctgtggtgatgacccgagatgactcaagtggtggatggttaccacttggagggagtggactaagcagcgtcactgtcttcaaagtccctcatcaggaagagaatggctgtgctgacttttttatccgtggagagcgactcagggacaaaatggtggttttggaatgtatgcttaaaaaagacctcatttataataaggtcactccaacatttcaccactggaagattgatgacaagaagtttggtcttacgtttcaaagtcctgctgatgctagggcttttgatagaggtatccgaagagctatagaggatatttctcaaggatgccccgaatcaaaaaatgaagctgaaggggcagatgacttacaagcaaatgaagaggattcttccagttctctagtgaaggatcacctttttcagcaagagacagttgttaccagtgagccttatagaagctcaaatataagaccttctccctttgaagatctgaatgccagaagagtctacatgcaaagccaagccaatcagataacatttggtcagccaggcttggacattcagagcagaagtatggaatacgtacagcggcaaatatccaaggaatgtggaagcctaaagtcccaaaatagggtccctttgaaatcaatcagacatgtcagctttcaagatgaggatgagattgtcagaataaaccctcgagatatcttaatacgtcgctatgcagactacagacatcctgacatgtggaaaaatgacttggaaagagatgatgctgattccagtattcagttttctaaaccagacagtaaaaaatcagactatctgtactcttgtggggatgagactaagttaagttcacccaaagactctgtggtatttaagacgcagccttcctcattaaaaattaagaagtcaaaacgaagaaaagaggatggtgaacgttctcgctgcgtatactgccaggaaaggtttaatcatgaagaaaatgttaggggaaaatgtcaggatgctccagaccctattaaaagatgcatatatcaagttagttgcatgctctgtgcagagagcatgttgtatcattgtatgtcagactcagagggagatttttctgatccctgttcgtgtgacactagcgacgacaagttctgcttgcgatggttagccctggtagctttgtctttcattgtaccatgtatgtgctgctacgtccctttgagaatgtgccatcgctgtggtgaggcatgtggttgctgtggtgggaaacataaagctgctggatgaaatggtccagtgccaaaatgagcttaaaatctttgtttccaggaattagctaacttggatttgtggaagcttttggcaagcaatatggaatcttgcctggtatcattgagcccacacatggaggaagcagaactcatcagttcttggcgtttcacgccatgcctaacttttcccttgagtgcatggcatgttttgttacaggttgtagagtatttgcagaaggaaaccatttctggttatttggctataaaaagtcagcataaaatatgatccaactaaaagggattaatttttggcatttttgtatatttatgcattaggtgatgggacttttaaaggtttgaatttattaggacacgaactaaaaataaaagtgcactaggggacagttgatttcaatctaagaaaagttaacacttgggaattacaagaagtaaaacaagtgcaactaaatcatttattagttgttttttgaaagcagttttatgtataaataacaaatgtttatatttaactaaatgtaaggtacgaattattacatattaaacttttcttccccttcctagttctgaagtagatatatatatatatatatctactgtcacattccatatattttgaatatttaactcatctagttaataatgtttttattccatgcgaatgatttgatattttcatccttatttctctttggctacaatttatattgagttatatctgtacattctggtaatctaaaatccttaaaaatactctaatagccttgagtgaccaactttttttttaaagcacagatgtaattgtctaatgttctgatgggaacgtaacacttatttttatataaaaagagactgagtaaacaaacattatagaaaaaaagtgaagttttttagttgttttttgtggtattcaaccagcaagttgttttctttcagagtttcctccttcaaaaagttatattgcatttacaaatgttttacaaggcagaaagtttgactggatagttagtgtaaaagcttcatgttgagatcttcacgtatcattctgctaaaccagaatatgttcagctgtgttactaatttttcagcttaatcctcagtgcttattatttacataacaataactttttatcagttacattttatttttatttaaactggccaaaagcaaaattattttatgttaaaatgtgtgctaaactatcccaggaaagtatttaatccaacattgtaaatgaagtatcttgtacatataaatttatttcttttgcagagcattatattactggatgtttaatttacaaaatagttgggtaaatgttccaacaaactttaaagtaccttgaagtcaaattgtctgtttttgttttgttgttgttgttgttgttttcttaagtgttacattaaaactctaaccaaggaaagggttctttaagaacattcccttagagggataaagttgagaagtgtgccttttttttaatggcttgaagtttcagaggtgataaaaattaaaatcacactactatttgaagctcattttctatgcaggtttttaaacgtcatttatgtatcattctttttatatatcacacttaagcttgtgttagcttttttcttttgccccagatcaaactgaacaatgtatataacactatctgtctgtaaaatactttttttaagaaagcatttatatttatatgacagcttgaactgacaacattgtgtatatagatcatcttgaagtattatttcacattgaaaagaagaaaatatattgataactatagatgttatgaagaagagggtatttctagttttgtactaaaaatcaattggatgaactaaatccaaaacatgacactgtaggcagcagttttaagtcttatttttactgtttatatatttgaatgctgctacaacagatgatcttcatccctgaagttttcagctaaacttggtttcctagaatagactgttaactttcaaaatttttattggtgaaatggaaatactgtttttccttgtgaatgaattttcatatttgtaagtgctaagtttataattcaggtttgatcaaggtgtgaataactgaagaaaataacttgctggctatataggaaaatgctgtggaaatgaactgtgtatatacttctgggaggaacaaatttaatcatttcttctgttaagcactaatcagtatagtgcaactcctggttctgtactgtattttatatgcaacatatatgctttaatattttaatgtttgtgcattaatattttcaatttgtttaaccactttgctgctaagattttgccgtcccattcccattttttcctttacaattttaaacaagtttcttcattaaaaactatggtgatgaaatggtttttattttaccttggatctttatagttaacatacccagtttcttaatcagtctacaagactaactgatgatataatgttctctgaatccctatatggaaattttcttttgagtaaatgagaattcctttgtgaaagcaaatgggtagtttaaatcactgattcttaaacatgtgtataggcaccttcaggaacattttctcattctctgtacagattcggcactgccaattggcttttcctctaaaacttttctttgtttttatctgatataagcagatggctcaagacaactgcttgagtaatagtattgaaaatggaatcatctagacggcatgacaagcaagactggtctgatgaacttgttcagaattgataattcttaaatatttctcttggcttcaaaagggacatcatttgatttctgaagaagtatgtcgtgtggagcttcagcaccacctactggatgatttccaggccagagacatgagatggcaatagggatctgacagggttcatcactactaccattaaagggctatttatgtggtgaccacctctaccagggaaaccaggaataagaactgtctcaaaggaattgtaaaatggttatttacctaatgtgtcttgttggcttgctgaaagattttaagcacttttttcttacatatcctgttttaaaatatttgttgatatttgggactggcaatcaaacttaatggatgtactgaggcatttatagaaccagttgctttaactctcaaaagccattaccaaaatggtatttttttcctccttccgccagtcagggagaatttttaaaaataataatcaaaacatgaaaaaacataatcacacctgtattttatcatgacagcttcagagagtgtgtgtgtacgtttttctctcttttatttgagacggagtttcactcttgttgcccaggctggagtgcaatggtgcgatctcagctcactgcaacctccgcctcctgggttcaagcgattctcctgcctcagcctcccaagtagctgggattacaggcacccaccaccatgcccagctaagttttggtattttagtagagatggggtttcaccatgttggccaggctggtcttgaactcctgaccttaggtgatccacccacctcggcctcccaaagtgctgggattacaggcatgagctactgcgcccagccgtgtgtatgtttctgaaatgatgatggggtggggttaaaatctaaagggaaaaacttgaaactacctattttcattggttattcagcagtgcctaaaatgagcttttgaagtaatgtaaatgcactttcaattcatgtgtatagtgccatctgatatcttgggtaagtcttgctttttcttttctttttcctctcccctgcccccttaattaaatggcacggaaatgtttcttaatatgcacgtgagtctccagagtacaggaaatgtgctttcctctaaatggtcaatgtaaagaatcttaaggatatttcttgtgttgaaatttacattcgattttgtgattacacttggaagtatgtgttaaattgggtttttaattgtagcccaaaggtgcattaagcaagtgtaacattttttccacataaaacttagaaaactttagttacctgaaaagcaaggattctttactaattattatgctcattcttgatttgacttccatgttcacacttcaaagtgtaagaggaagcactagaaactggcattattgttgcactaaaaaagtctataaatcataatagcaccatgaggtgttttgcaatgagacaaacatgaagaatgaatttctttaagagagaaacacaaccggaggtgatttatataaaccaaaagaaaaaaaaaggctttaaggtattaggtactgtttgcctagcagccaggtggttataaaagattcatatgctttggtacactgataaatgttagccattattcctgaaagcttcttaaattgcatcagttgttttgaaattttttcaagaataaactagttgaaaagtctttgtattaaaaatacacatagatttttgtgaacatttccagtgtgtagtgtcgtttgctttctatttctgacctcaaaagtgcctcacttgtatattatttccattaaaagcttgactgcattctttctaatgaacaatgaaaaactgtttaactcatgtcataatgtgtctcctcagatatagttaactagcttgatagttttgagtatataatgtaaataatacattataagtttgtaaccatttctgttacttcatacccgtgtaattggacatagcagatgattatcataagaatttgttttaatggtttttttccctcctggaattacctgattaaacctgtcatgaattataaaaggactttttcttattctcctagagcttatcaaattatcacataagagataattactggaggagaaagtaaaaatggaagcttttgataattagctctgttctttaaaagtatacttttaaactgaaagttcacatatagttcatcttaataacatatttattcatccttaattgtattcagatttttttttaagtctctaagctaataatgttatatttattggtttggtaacatgttgcagctaagctaatgaccttaagtggcaattgtttaacccaggactactgatttttttatattcaagtcagtttcatcgttttacttaactcgccatataaccaaaaataacgaataatctaaaggaaaggttattaggacagtaataaaaaattatagtgtatctcaacactagaataagttggattactatattatagtttatttgaaaaatcaaggagtaactgtatctttaccattaattatgaaatgtagtctcatgtgcttatttacaggtttttcagaatttgctttacattcttcacatcaagttaatacccacaagtaagtagaatagcttttataacaaggaaattgaaactagggttctagcttggctatcaatataagtgtcatgcacatagtgctccttaaagaaaaagacatcgacatcaatggtatgaaagctgtagtcactctttaaattgaactgctctaagatttgcagttttagtgagatctgaaatgatggttcaaaaaatacattcataataaaagtcttaacaaaatcaca

SEQ ID NO: 29925 - DNA, 4097 bp, Homo sapiens
  source 1..4097: mol_type = unassigned DNA
tgcaccccttcccccaaaccctatcccgcgccctgcttccccttctgctgcggcgccctcttcatctctagccgccccccctccccaaatcaggcgatctccggagatgtgaagaaggggggcgagcggacaggaagatgaagggagcaaagctgcccgccgcgggacaggcgtctaggtgaacaagaaaatgaccgaagaaacacacccagacgatgacagctatattgtgcgtgtcaaggctgtggttatgaccagagatgactccagcgggggatggttcccacaggaaggaggcgggatcagtcgcgtcggggtctgtaaggtcatgcaccccgaaggcaatggacgaagcggctttctcatccatggtgaacgacagaaagacaaactggtggtattggaatgctatgtaagaaaggacttggtctacaccaaagccaatccaacgtttcatcactggaaggtcgataataggaagtttggacttactttccaaagccctgctgatgcccgagcctttgacaggggagtaaggaaagcaatcgaagaccttatagaaggttcaacaacgtcatcttccaccatccataatgaagctgagcttggcgatgatgacgtttttacaacagctacagacagttcttctaattcctctcagaagagagagcaacctactcggacaatctcctctcccacatcctgtgagcaccggaggatttataccctgggccacctccacgactcataccccacagaccactatcacctcgatcagccgatgccaaggccctaccgccaggtgagcttcccggacgacgacgaggagatcgtgcgcatcaacccccgggagaagatctggatgacggggtacgaggattaccggcacgcacccgtcaggggcaagtacccggacccctcggaggacgcggactcctcctacgtgcgcttcgccaagggcgaggtccccaagcatgactacaactacccctacgtggactcctcagactttggcctaggcgaggaccccaaaggccgcgggggcagcgtgatcaagacgcagccctcccggggcaagtcgcggcggcggaaggaggacggagagcgctcgcggtgcgtgtactgcagggacatgttcaaccacgaggagaaccgccggggccactgccaggacgcgcccgactccgtgagaacttgcatccgccgggtgagctgcatgtggtgcgcggacagcatgctctatcactgtatgtcggaccccgagggagactatacagacccttgctcgtgcgatactagcgacgagaagttttgcctccggtggatggctcttattgccttgtctttcctggccccctgtatgtgctgttacctgccccttcgggcctgctaccactgcggagtgatgtgcaggtgctgtggcgggaagcacaaagcggccgcgtgactcagtttccctcccttctccctccatccgcagccacaggggaactcgtctcttacatactctcatcttctcccccgctcccttccactccaaggagcgaggagggcaagcggcctcccagctccctggtacctcgaggcaccattccagccagggacgctgccgggtagactctccactccccctgccgcccacactgcagcagccacatccatacacacacgctcgcacagtgttctgaggaaggaaccttcgccacagactcctgtactattaacaatctgtaaccaagctaactgtctcatccatgtgttgatttcctgtttcctcctcccccgcctcttccagttcaaaggagtctgcaattggaactgctgattttcggtgggttttgtagttgatttttccaagagcgtcgaagactctctttctcttggttcaccttgcctgtcgctagcaagcatctggttcagcggaaatgggatgtgagaatgatgaaacccgacagaagtatctcagcctgcagtcagttattatgtataggaggtgagctagttaacaaacttgtaccacaaaacaatatcgctttaacttttctaaagccaaatttcccatgtaagctgcagtttctatctttagcccatcatcattttctgcccccccaaaatctgttgaaatgattcactgatgcaaaacattcacccgtaatagactgagaattgagccttaacttcagattaacttgtgagaatcaggaaaattccttcaactgcattgcatcctcttggaccagggctagaatggggatttcaggtttctatgagcctccccattacccctaaagtagaacattttttaaattgtgttgccaccacttctaaaaatttagcaatattagaataggatactagtgaagtaagaaattttgcttgttgttttgcaaaccaaatagtttcctcaaacacaaatcagtgttcccacgaacaagttccagttgagaaacactaaggttatggtgaataaaaccatagggagcttcttccccccaacccctggctattttatattaatggggagaggggatttttaaatgtcataaatttgaagagtggtgggttgcattttcttcatgggtttatgttttcgtttcattttggactcaatttcacatcaccaaattcctcatttatacttggggaaaaaacaaggccatatgtaaaaacccttccaatgcctaagtgtctttctcctgcaactccaaacccagactcgccactttgggtgcacaggtggttaggtcagccaactggttctgcctgtcgccttgccacggaggaggcttctaattagctggaaaagagtatttttctaatacgttgcaaggattagccaaatcttcttattgaagaaagaagaaaagtgaagagtggttacctatacctagcatagtacaatcagaacctcgtggagaccaccggggacaggcttgcggacgccggctgttcttcccgccacgatctttctgtggtagcggccagcagaagacatggcctgctccccactccctttccccactccttctttattgcacacaggacaccagtcttcaaggaaagggacttttttccagtctgccaatcatattgggaaagtgctagctgtgctcaccttcatggggctgtttccagctcgtccacaagctcatcgattttctttagtagattaccggtgtaaatacccagtgtgcttatgagtcagttagtagacgtcttcattcattggagtaactggtttaggctttccagtttggaaaaggagcagagagctgtccatctggattgatggaagaaaagagaacctcatccatgcctggagaacatctagaaaaccttcagccagcctccagtgctgtcgagagaccaccttcccccgacccggaggcacttccttggggtctttctctagggtctcttctctacaaagcacaacactaatgttcgtttccttagacctcagttcaagtgcccctatttatttcaataagaacgcacatatcccagctgttttttgtttgtcacctctatttagttgttacctgtttctctcttctttcaccccttgtccttttccacccttttaagagttacgctagcagatcttactccacgtatactttttggtttgtgaaggcatcggttaagggcacaaagacagccatggggacatttatgtaaatacgtctctaattgccacactgcagctgaacagtgtgtagtattttcccagtcagctttgccatactgacgtcaatcatttgagagaaattattcagattttatttttgtatctgtggtaacaaaacattaaccaaaagattttctgtccagaagcctccccgaccccccaagctatttgctcacattaacaaattaaagtgcctgaagcataattcattctttacctgtatactaaaaaccctgttgtattgatttttttataataagcctttttacctctgtgtaaaaaatatatatacaagtgtatgatgtacattttagttcttaacttttttttatggtttctaatatgtatgaccaatgtagccattgctttaaaatgtaccgtgtaaatataaacacatcctatcaga

SEQ ID NO: 29926 - DNA, 555 bp, Homo sapiens
  source 1..555: mol_type = unassigned DNA
cttctccctttttttcggtcgcaagtaggaagctttttgcactccaccacctctggccgctgggaagacgtcatcgcttccgccctacttcctcctcctgttggcggcggcgatctccggagatgtgaagaaggggggcgagcggacaggaagatgaagggagcaaagctgcccgccgcgggacaggcgtctaggtgaacaagaaaatgaccgaagaaacacacccagacgatgacagctatattgtgcgtgtcaaggctgtggttatgaccagagatgactccagcgggggatggttcccacaggaaggaggcgggatcagtcgcgtcggggtctgtaaggtcatgcaccccgaaggcaatggacgaagcggctttctcatccatggtgaacgacagaaagacaaactggtggtattggaatgctatgtaagaaaggacttggtctacaccaaagccaatccaacgtttcatcactggaaggtcgataataggaagtttggacttactttccaaagccctgctgatgcccgagcctttgacaggggagtaagga

SEQ ID NO: 29927 - DNA, 1800 bp, Homo sapiens
  source 1..1800: mol_type = unassigned DNA
aataatgctaatacccagcactcgggctccacaatgtagaggaaatggcatcgcctggcagtgacagctatattgtgcgtgtcaaggctgtggttatgaccagagatgactccagcgggggatggttcccacaggaaggaggcgggatcagtcgcgtcggggtctgtaaggtcatgcaccccgaaggcaatggacgaagcggctttctcatccatggtgaacgacagaaagacaaactggtggtattggaatgctatgtaagaaaggacttggtctacaccaaagccaatccaacgtttcatcactggaaggtcgataataggaagtttggacttactttccaaagccctgctgatgcccgagcctttgacaggggagtaaggaaagcaatcgaagaccttatagaaggttcaacaacgtcatcttccaccatccataatgaagctgagcttggcgatgatgacgtttttacaacagctacagacagttcttctaattcctctcagaagagagagcaacctactcggacaatctcctctcccacatcctgtgagcaccggaggatttataccctgggccacctccacgactcataccccacagaccactatcacctcgatcagccgatgccaaggccctaccgccaggtgagcttcccggacgacgacgaggagatcgtgcgcatcaacccccgggagaagatctggatgacggggtacgaggattaccggcacgcacccgtcaggggcaagtacccggacccctcggaggacgcggactcctcctacgtgcgcttcgccaagggcgaggtccccaagcatgactacaactacccctacgtggactcctcagactttggcctaggcgaggaccccaaaggccgcgggggcagcgtgatcaagacgcagccctcccggggcaagtcgcggcggcggaaggaggacggagagcgctcgcggtgcgtgtactgcagggacatgttcaaccacgaggagaaccgccggggccactgccaggacgcgcccgactccgtgagaacttgcatccgccgggtgagctgcatgtggtgcgcggacagcatgctctatcactgtatgtcggaccccgagggagactatacagacccttgctcgtgcgatactagcgacgagaagttttgcctccggtggatggctcttattgccttgtctttcctggccccctgtatgtgctgttacctgccccttcgggcctgctaccactgcggagtgatgtgcaggtgctgtggcgggaagcacaaagcggccgcgtgactcagtttccctcccttctccctccatccgcagccacaggggaactcgtctcttacatactctcatcttctcccccgctcccttccactccaaggagcgaggagggcaagcggcctcccagctccctggtacctcgaggcaccattccagccagggacgctgccgggtagactctccactccccctgccgcccacactgcagcagccacatccatacacacacgctcgcacagtgttctgaggaaggaaccttcgccacagactcctgtactattaacaatctgtaaccaagctaactgtctcatccatgtgttgatttcctgtttcctcctcccccgcctcttccagttcaaaggagtctgcaattggaactgctgattttcggtgggttttgtagttgatttttccaagagcgtcgaagactctctttctcttggttcaccttgcctgtcgctagcaagcatctggttcagcggaaatgggatgtgagaatgatgaaacccgacag

SEQ ID NO: 29928 - DNA, 1419 bp, Homo sapiens
  source 1..1419: mol_type = unassigned DNA
aagttggaggggagatgagggttgagggaacattccatgggagagcagggtttgagctcatgactgtgttgtccctgtccttccccccacctcctgcaggtacatggtgcgggtccgagctgtggtgatggcccgagatgactccagtgggggctggctgcctgtggggggcgggggcctcagccaggtgagcgtgtgtcgggtccgaggggccaggcccgaggggggggcccgccaggggcactacgtcatccacggggaacgcctccgggaccagaaaacaaccttggagtgtacactgaagccaggcttggtttacaacaaggtgaatcccatctttcaccactggagcctgggtgactgcaagtttggactgacgtttcagagccctgcagaggctgatgagttccagaagagcctgctggctgcgctggccgcactgggtcgaggctcactcaccccctcctcctcctcctcctcctcctctccttcccaggatactgcagagaccccctgccctctgacgtcccacgtggacagcgactcctcctccagtcacagccgccaggagactcctcccagcgccgctgcggcccccatcatcacgatggagtcagcttcaggcttcgggccgaccacgcccccccagcgccgccgctcctccgctcagagctaccctccgcttctaccgttcacggggattccggaaccctcagagcccctggcaggggcagggggcctggggtggggcggccgcggctacgaggattaccggcgctccgggccacccgcgcccctcgccctgtccacctgcgtcgtgcgcttcgccaagaccggcgcgttgaggggcgctgccctgggtcccccagcggcactacctgcccctttgaccgaggctgcgcccccagcgccccccgctcgcccaccccccggcccgggcccatcctctgcgcctgccaaggcctccccggaagcggaggaggcagcgcgctgcgtgcattgccgcgcgctcttccgtcgcagagcagacgggcgtggcggccgctgcgcagaggccccggacccgggtcgcctcctggtgcgccgtctaagctgcctgtggtgcgccgagagcttgctctaccactgcctgtcggacgccgagggcgacttctcggacccgtgcgcctgcgagccgggccacccgcgccccgccgcgcgctgggccgcgctggccgcgctctccctggcagtgccctgcctctgctgctacgcgcccctgcgcgcgtgccactgggtcgcagcgcgatgcggctgcgccggctgcgggggtcgccacgaggaggctgcgcggtgaggacggcctggtgggtcccctagccggcccgaggacccaaaattgagggtccaggaccccggactccgttcggacctaaaacc

SEQ ID NO: 29929 - DNA, 543 bp, Homo sapiens
  source 1..543: mol_type = unassigned DNA
gtacatggtgcgggtccgagctgtggtgatggcccgagatgactccagtgggggctggctgcctgtggggggcgggggcctcagccaggtgagcgtgtgtcgggtccgaggggccaggcccgaggggggggcccgccaggggcactacgtcatccacggggaacgcctccgggaccagaaaacaaccttggagtgtacactgaagccaggcttggtttacaacaaggtgaatcccatctttcaccactggagcctgggtgactgcaagtttggactgacgtttcagagccctgcagaggctgatgagttccagaagagcctgctggctgcgctggccgcactgggtcgaggctcactcaccccctcctcctcctcctcctcctcctctccttcccaggatactgcagagaccccctgccctctgacgctctcccagtacttcaggcatatgctgtgcccttgacagtggccctaaccgcatccttatgaataggtactcttaggatccccgttttacagaggaggaaactgaggctcaaagag

SEQ ID NO: 29930 - DNA, 2961 bp, Homo sapiens
  source 1..2961: mol_type = unassigned DNA
agacgcgtggagcctggcggcgagtgggggcgtgcgacggttactctggttactggggccgcgccgcgctggcgagagccgccgcccgcgagggatgctggtgaggaagccgtcgggagccgccgccgccatctgagggaggtaccctggaaaccaccttttatcggtggggaagtgcagtcgcggtgggcggctctgggggccagcgaaacgggaggcctctaaatctttaggttggggctgcattgccctggagccgcactcttgagtccgaggccatcttttgttggagaaggcgtcggcgttggcgttttcccgaggttgggctgtacagtgtctccgtccgcggaaaaagaagcctctgaacccgcgccggcccgcagcccccgtgccttccggccgctgctcgccgtcgccagaggctaggccacgtttcccccagtgccgaggtgtttctgtgaccctccctccactcccattcccttctgaaagggcacctgctcttggtgagaaaagaaattatagcacgaagagccagtatcagaagagtatccatcacccgcagcaaccgctcagggaacaccatcaaaaaagaaaaaaagggaatatctggatttcctgggcgaggaggagcgagtctgctcgggagctgttccagcaggcgatttttaaatactgctttctacgccctatacaacttggcttcacatacttttacactaactttatatgatttttaaaaactggtctgatcggacttctcgtcctgggacactgtttactggagtctggccggctctccgtgctcctcttggtacctcattttggggagaaccttaaacccactcgagcagataatctccgccttgaccggtgccaccaaagaagccttggaaccatgtggacttttctgggcattgccactttcacctatttttataagaagttcggggacttcatcactttggccaacagggaggtcctgttgtgcgtgctggtgttcctctcgctgggcctggtgctctcctaccgctgtcgccaccgaaacgggggtctcctcgggcgccagcagagcggctcccagttcgccctcttctcggatattctctcaggcctgcctttcattggcttcttctgggccaaatccccccctgaatcagaaaataaggagcagctcgaggccaggaggcgcagaaaaggaaccaatatttcagaaacaagcttaataggaacagctgcctgtacatcaacatcttctcagaatgacccagaagttatcatcgtgggagctggcgtgcttggctctgctttggcagctgtgctttccagagatggaagaaaggtgacagtcattgagagagacttaaaagagcctgacagaatagttggagaattcctgcagccgggtggttatcatgttctcaaagaccttggtcttggagatacagtggaaggtcttgatgcccaggttgtaaatggttacatgattcatgatcaggaaagcaaatcagaggttcagattccttaccctctgtcagaaaacaatcaagtgcagagtggaagagctttccatcacggaagattcatcatgagtctccggaaagcagctatggcagagcccaatgcaaagtttattgaaggtgttgtgttacagttattagaggaagatgatgttgtgatgggagttcagtacaaggataaagagactggagatatcaaggaactccatgctccactgactgttgttgcagatgggcttttctccaagttcaggaaaagcctggtctccaataaagtttctgtatcatctcattttgttggctttcttatgaagaatgcaccacagtttaaagcaaatcatgctgaacttattttagctaacccgagtccagttctcatctaccagatttcatccagtgaaactcgagtacttgttgacattagaggagaaatgccaaggaatttaagagaatacatggttgaaaaaatttacccacaaatacctgatcacctgaaagaaccattcttagaagccactgacaattctcatctgaggtccatgccagcaagcttccttcctccttcatcagtgaagaaacgaggtgttcttcttttgggagacgcatataatatgaggcatccacttactggtggaggaatgactgttgcttttaaagatataaaactatggagaaaactgctaaagggtatccctgacctttatgatgatgcagctattttcgaggccaaaaaatcattttactgggcaagaaaaacatctcattcctttgtcgtgaatatccttgctcaggctctttatgaattattttctgccacagatgattccctgcatcaactaagaaaagcctgttttctttatttcaaacttggtggcgaatgtgttgcgggtcctgttgggctgctttctgtattgtctcctaaccctctagttttaattggacacttctttgctgttgcaatctatgccgtgtatttttgctttaagtcagaaccttggattacaaaacctcgagcccttctcagtagtggtgctgtattgtacaaagcgtgttctgtaatatttcctctaatttactcagaaatgaagtatatggttcattaagcttaaaggggaaccatttgtgaatgaatatttggaacttaccaagtcctaagagacttttggaagaggatatatatagcatagtaccataccacttataaagtggaaactcttggaccaagatttggattaatttgtttttgaagttttttgtatataaatatgtaaatacatgctttaatttgcaatttaaaatgaaggggttaaataagttagacatttaaaagaaatgattgttaccataaattagtgctaatgctgaggagaactacagtttttcttttgaatttagtatttgagatgagttgttgggacatgcaaataaaatgaagaatgaa

SEQ ID NO: 29931 - DNA, 1879 bp, Homo sapiens
  source 1..1879: mol_type = unassigned DNA
agctggctgagacgcgtggagcctggcggcgagtgggggcgtgcgacggttactctggttactggggccgcgccgcgctggcgagagccgccgcccgcgagggatgctgcgcagaaaaggaaccaatatttcagaaacaagcttaataggaacagctgcctgtacatcaacatcttctcagaatgacccagaagttatcatcgtgggagctggcgtgcttggctctgctttggcagctgtgctttccagagatggaagaaaggtgacagtcattgagagagacttaaaagagcctgacagaatagttggagaattcctgcagccgggtggttatcatgttctcaaagaccttggtcttggagatacagtggaaggtcttgatgcccaggttgtaaatggttacatgattcatgatcaggaaagcaaatcagaggttcagattccttaccctctgtcagaaaacaatcaagtgcagagtggaagagctttccatcacggaagattcatcatgagtctccggaaagcagctatggcagagcccaatgcaaagtttattgaaggtgttgtgttacagttattagaggaagatgatgttgtgatgggagttcagtacaaggataaagagactggagatatcaaggaactccatgctccactgactgttgttgcagatgggcttttctccaagttcaggaaaagcctggtctccaataaagtttctgtatcatctcattttgttggctttcttatgaagaatgcaccacagtttaaagcaaatcatgctgaacttattttagctaacccgagtccagttctcatctaccagatttcatccagtgaaactcgagtacttgttgacattagaggagaaatgccaaggaatttaagagaatacatggttgaaaaaatttacccacaaatacctgatcacctgaaagaaccattcttagaagccactgacaattctcatctgaggtccatgccagcaagcttccttcctccttcatcagtgaagaaacgaggtgttcttcttttgggagacgcatataatatgaggcatccacttactggtggaggaatgactgttgcttttaaagatataaaactatggagaaaactgctaaagggtatccctgacctttatgatgatgcagctattttcgaggccaaaaaatcattttactgggcaagaaaaacatctcattcctttgtcgtgaatatccttgctcaggctctttatgaattattttctgccacagatgattccctgcatcaactaagaaaagcctgttttctttatttcaaacttggtggcgaatgtgttgcgggtcctgttgggctgctttctgtattgtctcctaaccctctagttttaattggacacttctttgctgttgcaatctatgccgtgtatttttgctttaagtcagaaccttggattacaaaacctcgagcccttctcagtagtggtgctgtattgtacaaagcgtgttctgtaatatttcctctaatttactcagaaatgaagtatatggttcattaagcttaaaggggaaccatttgtgaatgaatatttggaacttaccaagtcctaagagacttttggaagaggatatatatagcatagtaccataccacttataaagtggaaactcttggaccaagatttggattaatttgtttttgaagttttttgtatataaatatgtaaatacatgctttaatttgcaatttaaaatgaaggggttaaataagttagacatttaaaagaaatgattgttaccataaattagtgctaatgctgaggagaactacagtttttcttttgaatttagtatttgagatgagttgttgggacatgcaaataaaatgaagaatg

SEQ ID NO: 29932 - DNA, 1799 bp, Homo sapiens
  source 1..1799: mol_type = unassigned DNA
gataatctccgccttgaccggtgccaccaaagaagccttggaaccatgtggacttttctgggcattgccactttcacctatttttataagaagttcggggacttcatcactttggccaacagggaggtcctgttgtgcgtgctggtgttcctctcgctgggcctggtgctctcctaccgctgtcgccaccgaaacgggggtctcctcgggcgccagcagagcggctcccagttcgccctcttctcggaatgacccagagatggaagaaaggtgacagtcattgagagagacttaaaagagcctgacagaatagttggagaattcctgcagccgggtggttatcatgttctcaaagaccttggtcttggagatacagtggaaggtcttgatgcccaggttgtaaatggttacatgattcatgatcaggaaagcaaatcagaggttcagattccttaccctctgtcagaaaacaatcaagtgcagagtggaagagctttccatcacggaagattcatcatgagtctccggaaagcagctatggcagagcccaatgcaaagtttattgaaggtgttgtgttacagttattagaggaagatgatgttgtgatgggagttcagtacaaggataaagagactggagatatcaaggaactccatgctccactgactgttgttgcagatgggcttttctccaagttcaggaaaagcctggtctccaataaagtttctgtatcatctcattttgttggctttcttatgaagaatgcaccacagtttaaagcaaatcatgctgaacttattttagctaacccgagtccagttctcatctaccagatttcatccagtgaaactcgagtacttgttgacattagaggagaaatgccaaggaatttaagagaatacatggttgaaaaaatttacccacaaatacctgatcacctgaaagaaccattcttagaagccactgacaattctcatctgaggtccatgccagcaagcttccttcctccttcatcagtgaagaaacgaggtgttcttcttttgggagacgcatataatatgaggcatccacttactggtggaggaatgactgttgcttttaaagatataaaactatggagaaaactgctaaagggtatccctgacctttatgatgatgcagctattttcgaggccaaaaaatcattttactgggcaagaaaaacatctcattcctttgtcgtgaatatccttgctcaggctctttatgaattattttctgccacagatgattccctgcatcaactaagaaaagcctgttttctttatttcaaacttggtggcgaatgtgttgcgggtcctgttgggctgctttctgtattgtctcctaaccctctagttttaattggacacttctttgctgttgcaatctatgccgtgtatttttgctttaagtcagaaccttggattacaaaacctcgagcccttctcagtagtggtgctgtattgtacaaagcgtgttctgtaatatttcctctaatttactcagaaatgaagtatatggttcattaagcttaaaggggaaccatttgtgaatgaatatttggaacttaccaagtcctaagagacttttggaagaggatatatatagcatagtaccataccacttataaagtggaaactcttggaccaagatttggattaatttgtttttgaagttttttgtatataaatatgtaaatacatgctttaatttgcaatttaaaatgaaggggttaaataagttagacatttaaaagaaatgattgttaccataaatt

SEQ ID NO: 29933 - DNA, 4004 bp, Homo sapiens
  source 1..4004: mol_type = unassigned DNA
agttgtgacggaacgcatgccattataatgagtttttatatctggtgggagcttttacagggtataaaataatgtgaatttagtgtatgtggagattttcctgttatctaagttcccagtttctctttcaatggcaagaaaacgggtttttgataaggcgcgcgccgcgggcagcttctgcctcagcgggtcttcggcggccgcgggaagacccgagagtcattagaagcgcaagatggcgactgcggccgaaacctcggcttcagaacccgaggctgagtccaaggctgggcccaaggctgacggagaggaggatgaggttaaggcggctaggacaaggaggaaggtgttatcgcgggctgtggccgctgcgacatacaagaccatggggccagcgtgggatcagcaggaggaaggcgtgagcgagagcgatggggatgagtacgccatggcttcctccgcggagagctcccccggggagtacgagtgggaatatgacgaagaggaggagaaaaaccagctggagattgagagactggaggagcagttgtctatcaacgtctatgactacaactgccatgtggacttgatcagactgctcaggctggaaggggagcttaccaaggtgaggatggcccgccagaagatgagtgaaatctttcccttgactgaagagctctggctggagtggctgcatgacgagatcagcatggcccaggatggcctggacagagagcacgtgtatgacctctttgagaaagccgtgaaggattacatttgtcctaacatttggctagagtatggccagtactcagttggtgggattggtcagaaaggtggccttgagaaagttcgctccgtgtttgaaagggctctctcgtctgttggtttacatatgaccaaaggactcgccctctgggaggcttaccgagagtttgaaagtgcgattgtggaagctgctcggcttgagaaagtccacagtcttttccggcgacagttggcgatcccactctatgatatggaggccacatttgcagagtatgaagaatggtcagaagacccaataccagagtcagtaattcagaactataacaaagcactacagcagctggagaaatataaaccctatgaagaagcactgttgcaggcagaggcaccaaggctggcagaatatcaagcatatatcgattttgagatgaaaattggcgatcctgctcgcattcagttgatctttgagcgcgccctggtcgagaactgccttgtcccagacttatggatccgttacagtcagtacctagatcgacaactgaaagtaaaggatttggttttatctgtacataaccgcgctattagaaactgcccctggacagttgccttatggagtcggtacctcttggccatggagagacatggagttgatcatcaagtaatttctgtaaccttcgagaaagctttgaatgccggcttcatccaggccactgattatgtggagatttggcaggcataccttgattacctgaggagaagggttgatttcaaacaagactccagtaaagagctggaggagttgagggccgcctttactcgtgccttggagtatctgaagcaggaggtggaagagcgtttcaatgagagtggtgatccaagctgcgtgattatgcagaactgggctaggattgaggctcgactgtgcaataacatgcagaaagctcgggaactctgggatagcatcatgaccagaggaaatgccaagtacgccaacatgtggctagagtattacaacctggaaagagctcatggtgacacccagcactgccggaaggctctgcaccgggccgtccagtgcaccagtgactacccagagcacgtctgcgaagtgttactcaccatggagaggacagaaggttctttagaagattgggatatagctgttcagaaaactgaaacccgattagctcgtgtcaatgagcagagaatgaaggctgcagagaaggaagcagcccttgtgcagcaagaagaagaaaaggctgaacaacggaaaagagctcgggctgagaagaaagcgttaaaaaagaagaaaaagatcagaggcccagagaagcgcggagcagatgaggatgatgagaaagagtggggcgatgatgaagaagagcagccttccaaacgcagaagggtcgagaacagcatccctgcagctggagaaacacaaaatgtagaagtagcagcagggcccgctgggaaatgtgctgccgtagatgtggagcccccttcgaagcagaaggagaaggcagcctccctgaagagggacatgcccaaggtgctgcacgacagcagcaaggacagcatcaccgtctttgtcagcaacctgccctacagcatgcaggagccggacacgaagctcaggccactcttcgaggcctgtggggaggtggtccagatccgacccatcttcagcaaccgtggggatttccgaggttactgctacgtggagtttaaagaagagaaatcagcccttcaggcactggagatggaccggaaaagtgtagaagggaggccaatgtttgtttccccctgtgtggataagagcaaaaaccccgattttaaggtgttcaggtacagcacttccctagagaaacacaagctgttcatctcaggcctgcctttctcctgtactaaagaggaactagaagaaatctgtaaggctcatggcaccgtgaaggacctcaggctggtcaccaaccgggctggcaaaccaaagggcctggcctacgtggagtatgaaaatgaatcccaggcgtcgcaggctgtgatgaagatggacggcatgactatcaaagagaacatcatcaaagtggcaatcagcaaccctcctcagaggaaagttccagagaagccggagaccaggaaggcaccaggtggccccatgcttttgccgcagacatacggagcgagggggaagggaaggacgcagctgtctctactgcctcgtgccctgcagcgcccaagtgctgcagctcctcaggctgagaacggccctgccgcggctcctgcagttgccgccccagcagccaccgaggcacccaagatgtccaatgccgattttgccaagctgtttctgagaaagtgaacgggacgctgggagacaggaaatgccttacttcactctggcccggcggacctcccaccacccagcagtgcactggggatggacaggcctggtgtgctgcgtgctcgcaaccacagatggctcctcggctttagacagaaaggggaaggggttctaagtcaagagcctttcagtgctccctcatattgagggcagtggcagaaaagtgaccactctgcaggctgggcccaggatgtggtgtcctgagatagttttgtatcttaaagactgaggcacagaagcgaaacgagaacacactgtttttgagacacagttgtccaaatgtttctggccagctccggcccctttttgtatgacacttctcttccaccctgcacagcacatgtgcccgtcattcttttaattttaaaagatgaaatggcagatgctagtaattcacagaatggcctcttgtgggggtgggtctgagggaagtcagctataaaacatttgctggagttttgttcaatggggctgtgcatttttatattatgtgtttgtaaatgacatgtcagccattgtttcatgtttcctaaaagcagaatatttgcaacatttgttttgtataggaattatttgtgccacctgctgtggactgttttctttgcctagtgactagtgacctgtgttgtctaaacatgagtttcagccctttggttttgtttaataccatgtcaaatgcaaacttcaattctccccatttagctttattaaactgacgttctcttcaaaacttcttgctgaatggtactcagatgtgcattcacatacagatgtgttttgaagtgggtgtaccttgctttacctaatagatgtgtaaatagaacttttgtaagtc

SEQ ID NO: 29934 - DNA, 2252 bp, Homo sapiens
  source 1..2252: mol_type = unassigned DNA
attagaagcgcaagatggcgactgcggccgaaacctcggcttcagaacccgaggctgagtccaaggctgggcccaaggctgacggagaggaggatgaggttaaggcggctaggacaaggaggaaggtgttatcgcgggctgtggccgctgcgacatacaagaccatggagctcccccggggagtacgagtgggaatatgacgaagaggaggagaaaaaccagctggagattgagagactggaggagcagttgtctatcaacgtctatgactacaactgccatgtggacttgatcagactgctcaggctggaaggggagcttaccaaggtgaggatggcccgccagaagatgagtgaaatctttcccttgactgaagagctctggctggagtggctgcatgacgagatcagcatggcccaggatggcctggacagagagcacgtgtatgacctctttgagaaagccgtgaaggattacatttgtcctaacatttggctagagtatggccagtactcagttggtgggattggtcagaaaggtggccttgagaaagttcgctccgtgtttgaaagggctctctcgtctgttggtttacatatgaccaaaggactcgccctctgggaggcttaccgagagtttgaaagtgcgattgtggaagctgctcggcttgagaaagtccacagtcttttccggcgacagttggcgatcccactctatgatatggaggccacatttgcagagtatgaagaatggtcagaagacccaataccagagtcagtaattcagaactataacaaagcactacagcagctggagaaatataaaccctatgaagaagcactgttgcaggcagaggcaccaaggctggcagaatatcaagcatatatcgattttgagatgaaaattggcgatcctgctcgcattcagttgatctttgagcgcgccctggtcgagaactgccttgtcccagacttatggatccgttacagtcagtacctagatcgacaactgaaagtaaaggatttggttttatctgtacataaccgcgctattagaaactgcccctggacagttgccttatggagtcggtacctcttggccatggagagacatggagttgatcatcaagtaatttctgtaaccttcgagaaagctttgaatgccggcttcatccaggccactgattatgtggagatttggcaggcataccttgattacctgaggagaagggttgatttcaaacaagactccagtaaagagctggaggagttgagggccgcctttactcgtgccttggagtatctgaagcaggaggtggaagagcgtttcaatgagagtggtgatccaagctgcgtgattatgcagaactgggctaggattgaggctcgactgtgcaataacatgcagaaagctcgggaactctgggatagcatcatgaccagaggaaatgccaagtacgccaacatgtggctagagtattacaacctggaaagagctcatggtgacacccagcactgccggaaggctctgcaccgggccgtccagtgcaccagtgactacccagagcacgtctgcgaagtgttactcaccatggagaggacagaaggttctttagaagattgggatatagctgttcagaaaactgaaacccgattagctcgtgtcaatgagcagagaatgaaggctgcagagaaggaagcagcccttgtgcagcaagaagaagaaaaggctgaacaacggaaaagagctcgggctgagaagaaagcgttaaaaaagaagaaaaagatcagaggcccagagaagcgcggagcagatgaggatgatgagaaagagtggggcgatgatgaagaagccttccaaacgcagaagggtcgagaacagcatccctgcagctggagaaacacaaaatgtagaagtagcagcagggcccgctgggaaatgtgctgccgtagatgtggagcccccttcgaagcagaaggagaaggcagcctccctgaagagggacatgcccaaggtgctgcacgacagcagcaaggacagcatcaccgtctttgtcagcaacctgccctacagcatgcaggagccggacacgaagctcaggccactcttcgaggcctgtggggaggtggtccagatccgacccatcttcagcaaccgtggggatttccgaggttactgctacgtggagtttaaagaagagaaatcagcccttcaggcactggagatggaccggaaaagtgtagaagggaggc

SEQ ID NO: 29935 - DNA, 2834 bp, Homo sapiens
  source 1..2834: mol_type = unassigned DNA
gcaagatggcgactgcggccgaaacctcggcttcagaacccgaggctgagtccaaggctgggcccaaggctgacggagaggaggatgaggttaaggcggctaggacaaggaggaaggtgttatcgcgggctgtggccgctgcgacatacaagaccatggggccagcgtgggatcagcaggaggaaggcgtgagcgagagcgatggggatgagtacgccatggcttcctccgcggagagctcccccggggagtacgagtgggaatatgacgaagaggaggagaaaaaccagctggagattgagagactggaggagcagttgtctatcaacgtctatgactacaactgccatgtggacttgatcagactgctcaggctggaaggggagcttaccaaggtgaggatggcccgccagaagatgagtgaaatctttcccttgactgaagagctctggctggagtggctgcatgacgagatcagcatggcccaggatggcctggacagagagcacgtgtatgacctctttgagaaagccgtgaaggattacatttgtcctaacatttggctagagtatggccagtactcagttggtgggattggtcagaaaggtggccttgagaaagttcgctccgtgtttgaaagggctctctcgtctgttggtttacatatgaccaaaggactcgccctctgggaggcttaccgagagtttgaaagtgcgattgtggaagctgctcggcttgagaaagtccacagtcttttccggcgacagttggcgatcccactctatgatatggaggccacatttgcagagtatgaagaatggtcagaagacccaataccagagtcagtaattcagaactataacaaagcactacagcagctggagaaatataaaccctatgaagaagcactgttgcaggcagaggcaccaaggctggcagaatatcaagcatatatcgattttgagatgaaaattggcgatcctgctcgcattcagttgatctttgagcgcgccctggtcgagaactgccttgtcccagacttatggatccgttacagtcagtacctagatcgacaactgaaagtaaaggatttggttttatctgtacataaccgcgctattagaaactgcccctggacagttgccttatggagtcggtacctcttggccatggagagacatggagttgatcatcaagtaatttctgactccagtaaagagctggaggagttgagggccgcctttactcgtgccttggagtatctgaagcaggaggtggaagagcgtttcaatgagagtggtgatccaagctgcgtgattatgcagaactgggctaggattgaggctcgactgtgcaataacatgcagaaagctcgggaactctgggatagcatcatgaccagaggaaatgccaagtacgccaacatgtggctagagtattacaacctggaaagagctcatggtgacacccagcactgccggaaggctctgcaccgggccgtccagtgcaccagtgactacccagagcacgtctgcgaagtgttactcaccatggagaggacagaaggttctttagaagattgggatatagctgttcagaaaactgaaacccgattagctcgtgtcaatgagcagagaatgaaggctgcagagaaggaagcagcccttgtgcagcaagaagaagaaaaggctgaacaacggaaaagagctcgggctgagaagaaagcgttaaaaaagaagaaaaagatcagaggcccagagaagcgcggagcagatgaggatgatgagaaagagtggggcgatgatgaagaagagcagccttccaaacgcagaagggtcgagaacagcatccctgcagctggagaaacacaaaatgtagaagtagcagcagggcccgctgggaaatgtgctgccgtagatgtggagcccccttcgaagcagaaggagaaggcagcctccctgaagagggacatgcccaaggtgctgcacgacagcagcaaggacagcatcaccgtctttgtcagcaacctgccctacagcatgcaggagccggacacgaagctcaggccactcttcgaggcctgtggggaggtggtccagatccgacccatcttcagcaaccgtggggatttccgaggttactgctacgtggagtttaaagaagagaaatcagcccttcaggcactggagatggaccggaaaagtgtagaagggaggccaatgtttgtttccccctgtgtggataagagcaaaaaccccgattttaaggtgttcaggtacagcacttccctagagaaacacaagctgttcatctcaggcctgcctttctcctgtactaaagaggaactagaagaaatctgtaaggctcatggcaccgtgaaggacctcaggctggtcaccaaccgggctggcaaaccaaagggcctggcctacgtggagtatgaaaatgaatcccaggcgtcgcaggctgtgatgaagatggacggcatgactatcaaagagaacatcatcaaagtggcaatcagcaaccctcctcagaggaaagttccagagaagccggagaccaggaaggcaccaggtggccccatgcttttgccgcagacatacggagcgagggggaagggaaggacgcagctgtctctactgcctcgtgccctgcagcgcccaagtgctgcagctcctcaggctgagaacggccctgccgcggctcctgcagttgccgccccagcagccaccgaggcacccaagatgtccaatgccgattttgccaagctgtttctgagaaagtgaacgggacgctgggagacaggaaatgccttacttcactctggcccg

SEQ ID NO: 29936 - DNA, 1758 bp, Homo sapiens
  source 1..1758: mol_type = unassigned DNA
cgagaactgccttgtcccagacttatggatccgttacagtcagtacctagatcgacaactgaaagtaaaggatttggttttatctgtacataaccgcgctattagaaactgcccctggacagttgccttatggagtcggtacctcttggccatggagagacatggagttgatcatcaagtaatttctgactccagtaaagagctggaggagttgagggccgcctttactcgtgccttggagtatctgaagcaggaggtggaagagcgtttcaatgagagtggtgatccaagctgcgtgattatgcagaactgggctaggattgaggctcgactgtgcaataacatgcagaaagctcgggaactctgggatagcatcatgaccagaggaaatgccaagtacgccaacatgtggctagagtattacaacctggaaagagctcatggtgacacccagcactgccggaaggctctgcaccgggccgtccagtgcaccagtgactacccagagcacgtctgcgaagtgttactcaccatggagaggacagaaggttctttagaagattgggatatagctgttcagaaaactgaaacccgattagctcgtgtcaatgagcagagaatgaaggctgcagagaaggaagcagcccttgtgcagcaagaagaagaaaaggctgaacaacggaaaagagctcgggctgagaagaaagcgttaaaaaagaagaaaaagatcagaggcccagagaagcgcggagcagatgaggatgatgagaaagagtggggcgatgatgaagaagagcagccttccaaacgcagaagggtcgagaacagcatccctgcagctggagaaacacaaaatgtagaagtagcagcagggcccgctgggaaatgtgctgccgtagatgtggagcccccttcgaagcagaaggagaaggcagcctccctgaagagggacatgcccaaggtgctgcacgacagcagcaaggacagcatgcaggagccggacacgaagctcaggccactcttcgaggcctgtggggaggtggtccagatccgacccatcttcagcaaccgtggggatttccgaggttactgctacgtggagtttaaagaagagaaatcagcccttcaggcactggagatggaccggaaaagtgtagaagggaggccaatgtttgtttccccctgtgtggataagagcaaaaaccccgattttaaggtgttcaggtacagcacttccctagagaaacacaagctgttcatctcaggcctgcctttctcctgtactaaagaggaactagaagaaatctgtaaggctcatggcaccgtgaaggacctcaggctggtcaccaaccgggctggcaaaccaaagggcctggcctacgtggagtatgaaaatgaatcccaggcgtcgcaggctgtgatgaagatggacggcatgactatcaaagagaacatcatcaaagtggcaatcagcaaccctcctcagaggaaagttccagagaagccggagaccaggaaggcaccaggtggccccatgcttttgccgcagacatacggagcgagggggaagggaaggacgcagctgtctctactgcctcgtgccctgcagcgcccaagtgctgcagctcctcaggctgagaacggccctgccgcggctcctgcagttgccgccccagcagccaccgaggcacccaagatgtccaatgccgattttgccaagctgtttctgagaaagtgaacgggacgctgggagacagg

SEQ ID NO: 29937 - DNA, 1184 bp, Homo sapiens
  source 1..1184: mol_type = unassigned DNA
cttctgtccgaagttgtgacggaacgcatgccattataatgagtttttatatctggtgggagcttttacagggtataaaataatgtgaatttagtgtatgtggagattttcctgttatctaagttcccagtttctctttcaatggcaagaaaacgggtttttgataaggcgcgcgccgcgggcagcttctgcctcagcgggtcttcggcggccgcgggaagacccgagagtcattagaagcgcaagatggcgactgcggccgaaacctcggcttcagaacccgaggctgagtccaaggctgggcccaaggctgacggagaggaggatgaggttaaggcggctaggacaaggaggaaggtgttatcgcgggctgtggccgctgcgacatacaagaccatggggccagcgtgggatcagcaggaggaaggcgtgagcgagagcgatggggatgagtacgccatggcttcctccgcggagagctcccccggggagtacgagtgggaatatgacgaagaggaggagaaaaaccagctggagattgagagactggaggagcaggtgggcccgggggtgggcagcgggcatcttccagtctttcaggtcctcgggtccccatgtcctggcccgcctccctagtcctcggcggcgataaagccgccaaggctgcaaacccgcttttcgtgacagtagctcctgtcggatttgagtgcttactgcctgcccattgccttgcaaacgttatctcattgaatcctcgccacgaccctgtgaaggaagccctgttatctatccccattttactggaggaaactgaggctcgtggaggaaagtttcttgctcaagataacacttcctgcaagtcaggccttgtactttgatcccattccagaactcccactcttaaccacacgtccaacagtagaaataaactcattcgcaagagagtgttattttgttatgtaggaatgacggcgatgatgaaacttgtggtaagaaaaatattgaccgcgatggtgataatagaaatggaaaggtttctggttctggaggttaaggcctcagttctagctgttcaactcttgtatgtgcttgtaagaatttcttaatttctctcaccctctcgacttccttatctgcagattgggagcaacaatttctgcataatataattgttgtaacagtaa

SEQ ID NO: 29938 - DNA, 408 bp, Homo sapiens
  source 1..408: mol_type = unassigned DNA
ggggccgcgacctcggctcgagaaggtgctttagtctgaagatggcggcctcagcagcgagaggtgctgcggcgctgcgtagaagtatcaatcagccggttgcttttgtgagaagaattccttggactgcggcgtcgagtcagctgaaagaacactttgcacagttcggccatgtcagaaggtgcattttaccttttgacaaggagactggctttcacagaggtttgggttgggttcagttttcttcagaagaaggacttcggaatgcactacaacaggaaaatcatattatagatggagtaaaggtccaggttcacactagaaggccaaaacttccgcaaacatctgatgatgaaaagaaagatttttgagactgcagcctattaataaagttaacataactgagaa

SEQ ID NO: 29939 - DNA, 1462 bp, Homo sapiens
  source 1..1462: mol_type = unassigned DNA
gcgccgccgggacgggcacgggcgcgcgggctccggcgggcgccggctgccttcctccgtcgctcgctgtctctcccggccgcattctcctccgctgcggggccgagctctccccagcgctcgcaggaaggaagaagggagccgaggacgccgagaagttcccgcggcagccgcggatcccggccaaggcggaggctgcggctccgacggggcaggagcgcgatccacggcgaggggcgtacggccaaagggtccgcggcgtggagcgctcggaccttccgctctcccccgggcgtgggccgggaccccatgagacgcgcccacgaggggcgcgagattcctagcttgggcggcgctaggcggagggaggtgttgcagccgccggagccagagagctgccggcaggaggcggcggcggcaagaacttgaacttggcgtcgggagcgggcgccccggacgccccccgccggggccggggcgccgagggacctgcgccgcagcgctgccccccgaatggccgcggcggcggaccgggctcccgcgccgcggccctaggcggcctctcgccatggccaagtggctaaacaagtacttcagcttgggcaacagcaagaccaagagccccccgcagccgccgcggccagactaccgcgagcagcggcgccgaggcgagcggccttcgcagcccccccaggccgtgccgcaggcctcctccgccgcctcggcgtcctgcggtccggccaccgcctcctgcttctcagcctcttcgggctcgctgcccgacgacagcggcagcaccagcgacctcatccgcgcctaccgcgcgcagaaggagcgagacttcgaggacccctacaacgggcctggctcgtcgctgcgcaaactgcgcgccatgtgccgcctggactactgcggcggcagcggggagccaggcggggtccagcgcgccttctcggcctcgtccgcgtcgggcgccgcgggctgttgctgcgcctcctcgggcgcgggggccgccgcgtcctcgtcctcgtcctccggctctccgcatctctaccgcagcagcagcgagcggcggcccgccacgccggccgaggtgcgctacatctcccccaagcaccgcctcatcaaagtggagagcgccgcgggcggtggggccggggaccccctggggggcgcctgcgcgggcggccgcacctggagcccgacggcctgcggaggcaagaaactgctcaacaagtgcgccgcctcagccgcggaggagagcggggccggcaagaaggacaaggtgaccatagccgatgactactcagatccctttgatgccaagaatgatctcaagagcaaagcaggaaagggggagagtgctggctacatggagccctatgaggcacagaggatcatgacaggtttacaggaagcatggagacattcccccagtggctgttttcctgttggcccttga

SEQ ID NO: 29940 - DNA, 2783 bp, Homo sapiens
  source 1..2783: mol_type = unassigned DNA
gccgccgggacgggcacgggcgcgcgggctccggcgggcgccggctgccttcctccgtcgctcgctgtctctcccggccgcattctcctccgctgcggggccgagctctccccagcgctcgcaggaaggaagaagggagccgaggacgccgagaagttcccgcggcagccgcggatcccggccaaggcggaggctgcggctccgacggggcaggagcgcgatccacggcgaggggcgtacggccaaagggtccgcggcgtggagcgctcggaccttccgctctcccccgggcgtgggccgggaccccatgagacgcgcccacgaggggcgcgagattcctagcttgggcggcgctaggcggagggaggtgttgcagccgccggagccagagagctgccggcaggaggcggcggcggcaagaacttgaacttggcgtcgggagcgggcgccccggacgccccccgccggggccggggcgccgagggacctgcgccgcagcgctgccccccgaatggccgcggcggcggaccgggctcccgcgccgcggccctaggcggcctctcgccatggccaagtggctaaacaagtacttcagcttgggcaacagcaagaccaagagccccccgcagccgccgcggccagactaccgcgagcagcggcgccgaggcgagcggccttcgcagcccccccaggccgtgccgcaggcctcctccgccgcctcggcgtcctgcggtccggccaccgcctcctgcttctcagcctcttcgggctcgctgcccgacgacagcggcagcaccagcgacctcatccgcgcctaccgcgcgcagaaggagcgagacttcgaggacccctacaacgggcctggctcgtcgctgcgcaaactgcgcgccatgtgccgcctggactactgcggcggcagcggggagccaggcggggtccagcgcgccttctcggcctcgtccgcgtcgggcgccgcgggctgttgctgcgcctcctcgggcgcgggggccgccgcgtcctcgtcctcgtcctccggctctccgcatctctaccgcagcagcagcgagcggcggcccgccacgccggccgaggtgcgctacatctcccccaagcaccgcctcatcaaagtggagagcgccgcgggcggtggggccggggaccccctggggggcgcctgcgcgggcggccgcacctggagcccgacggcctgcggaggcaagaaactgctcaacaagtgcgccgcctcagccgcggaggagagcggggccggcaagaaggacaaggtgaccatagccgatgactactcagatccctttgatgccaagaatgatctcaagagcaaagcaggaaagggggagagtgctggctacatggagccctatgaggcacagaggatcatgacagaatttcagaggcaggaaagtgtccggtcccagcataaaggtatccagttatatgacaccccttacgaacctgaaggccaaagtgttgactcagactcggagagcacagtcagcccccgactgcgggagagcaagctgccccaggatgacgacaggcccgccgatgagtacgaccagccttgggagtggaaccgggtcaccatcccagccctggcagcacagtttaatggcaacgagaagcggcagtcatccccctcaccttcgcgggaccggcggcgccagcttcgtgcccctggagggggctttaagcctatcaaacatgggagccctgagttctgcgggatcctaggagaaagggtggatcctgccgtccccctggagaagcaaatatggtatcacggagccatcagcagaggagacgccgagaacctgctgcgactctgcaaggagtgtagctaccttgtccggaacagccagaccagcaagcatgactactccctctccctgaggagcaaccagggttttatgcacatgaaactggccaaaaccaaagagaaatacgttctgggtcagaacagccctccgttcgacagtgtcccggaagtcatccactactacaccaccagaaagctacccatcaaaggggctgagcacttgtccctcctctatcccgtggctgtgaggaccctgtgagcggaccagacctgccctgctctgtgacagagcctgagacttggaggtgccagaggccccccaccaaccagcccagccactgttgctggctgtgtcgtttgtgttgtgtgtatggtactagcacaccactgcatgtctctagaatgctgttgccacttacgggggctggagaaggcctggataaagacagaagggcggcaacacaccaccccagcccccacccccaccctctccttgagtttctgtgaattaaaatatttgcaaatccaaagagatgccttccaggatgaacaaaggcagaccagctccgaggggcggggtagggtggggcgggagctccctggctgacatctctttgttctccagctgtctcaaattcacacctctgtacagggcaaagttttcccacaggagcccccctactgatgctgggagccaaatgctggtgctttgagagtcccggaggccccggggttcccgccccgctggtgtgtatatgtgtgtctgtgtgagtgtgtgtgtgagtacagatgtgagaaggtggtcacacacagatgggtaagcccactgatctacttgtagtcactcagtgtaatcattaggctatcttcaaggaatcattgtgcagtcaaaaagaggattcaattatttatgaatagggtgtgtaaataaaatagtcatttaata

SEQ ID NO: 29941 - DNA, 1576 bp, Homo sapiens
  source 1..1576: mol_type = unassigned DNA
ggcgaccgcggctgaggtacaggtgcctcgcggtgcagccgggtcgccttccagcccgtccgcctcccgaccagggcccgcgccccgtcccgcctctctcccgcccagccaaatgcaggccgccgccctccctgaggagatccgttggctcctggaagatgctgaagagtttctggcagaaggtttgcggaatgagaacctcagcgctgttgcaagggatcacagagaccatattctacggggctttcagcaaatcaaagccaggtactattgggattttcagccccaagggggagacattggacaggacagctctgatgataatcacagcgggactcttggcctgtccctcacatccgatgcaccctttttgtcagattatcaggatgagggaatggaagacatcgtaaaaggagctcaagaacttgataacgtaatcaagcaaggatacttggagaagaaaagcaaagatcatagtttctttggatcggagtggcagaagcgatggtgtgttgtcagcagaggtctcttctactactatgctaatgagaagagcaagcagcccaaagggaccttcctcattaagggctacggtgtacggatggccccccacctgcgaagagattccaagaaagaatcctgctttgaactgacctcccaggataggcgcagctatgagtttacagctactagtccagcagaagccagagactgggtggatcaaataagtttcttgttaaaggatctgagctccttaaccattccatatgaagaggatgaggaggaagaagaaaaagaagagacatatgatgatattgatggttttgactccccaagttgtggttcccagtgcagacccactatcttgcctgggagtgtggggataaaagagcctacagaggagaaagaagaagaagatatttatgaagtcttgccagatgaagagcatgatctagaagaggatgagagtggcactcgacgaaaaggagtagactatgccagttactaccagggcctatgggattgccatggtgaccagccagatgaactgtccttccaacggggtgacctcatccgtattctgagcaaggagtataacatgtatggctggtgggtgggagaactgaacagcctcgttgggattgttccaaaggagtatctcaccactgcctttgaagtggaagaaagatgaaacccaggaaatatattcttccctctctcctgcctttatgaggaaactgatcatcaaaagttcccactccctacttctgccaccccaccaacgccttggactcctctctttgctgaagagacccaagtctcttgacacctcagagtgactgtaagctaccagtaagacaagtgggaagaggcacgttcatcaaacctgttactaaaccagcctagtcatagctcatccccatctctaaatgtgtccacacaaccacatctgccttttccacaagcttttcacaaagaaggtgagagagaaggaaaccttgggaggaggacattactggttgttctggctggtttgaaaagcacaaataaacttgggatgtggttccttgccatg

SEQ ID NO: 29942 - DNA, 3447 bp, Homo sapiens
  source 1..3447: mol_type = unassigned DNA
cacacacacactggaaactcctgcatactcctcttactataatctgtcaccaaagactggatattcctgtgctggggctcgtgccagcgcctcgggctgccaggtgctgctttccaactcccacatgggctgccctccccctactgctacccacagggcccccactccacctgctcccagacgaggccaactcctggccaagcttaggggcacagcggaggcgctctgtttctgatttttctcgccttccttggagatgcctgtgcttggaagggaaggcagaacattgcatcttggaacaaatctgcttttgatcatgcaaatgaatgcctggataatgtaggcagactgtcaatttcaccagttagaaagaaagagaaaagggggagaaattccccatgacagcgactgatgaagaatttcaatagaaagctgctacttcagaaaataagatcatttgctgcgaatggagaacatctcaggcagccctgatgctccaccgtccttgcagagagaagcttgctcagagtggttactgaaaacaggaacctgcccttctgcaagccctgtgccttcctcgttcctagcagaggaagtatgcggccagtttagcaactgcagttcttctgtgtagcatgggctgcttctccacaaccgcgagaagcccggctgcctgtttattctggagcagcagcagttgacagacggagaggcagtgactctgcacccagcaatccctctgcagacagctcccacaggagtcatgcccagtgtgtgaaggctctgggcatcaccagcggccccagggaaaaagaaagaaatgggaaacagcatgaaatccacccctgcgcctgccgagaggcccctgcccaacccggagggactggatagcgacttccttgccgtgctaagtgactacccgtctcctgacatcagccccccgatattccgccgaggggagaaactgcgtgtgatttctgatgaagggggctggtggaaagctatttctcttagcactggtcgagagagttacatccctggaatatgtgtggccagagtttaccatggctggctgtttgagggcctgggcagagacaaggccgaggagctgctgcagctgccagacacaaaggtcggctccttcatgatcagagagagtgagaccaagaaagggttttactcactgtcggtgagacacaggcaggtaaagcattaccgcattttccgtctgcccaacaactggtactacatttccccgaggctcaccttccagtgcctggaggacctggtgaaccactattctgaggtggctgatggcctgtgctgtgtgctcaccacgccctgcctgacacaaagcacggctgccccagcagtgagggcctccagctcacctgtcaccttgcgtcagaagactgtggactggaggagagtgtccagactgcaggaggaccccgagggaacagagaacccgcttggggtagacgagtcccttttcagctatggccttcgagagagcattgcctcttacctgtccctgaccagtgaggacaacacctcctttgatcgaaagaagaaaagcatctccctgatgtatggtggcagcaagagaaagagctcattcttctcatcaccaccttactttgaggactagccaagaacagacacaatggttcatgcccaaaaggaacagaagttccaactattgcctgggatcttgcgaaaagcgaggttccctgatccctgggagcctcacgtattttagaagccaagagaagccacatggagactcaaattcgcatcttctctatccacatcatgaccaaaggaacccctccctggtgtctgatcagggctgtggcatcacgaaacattggatcatgacatgtcgggcgatgcttggaagagcccagcatgtatgtatgcacacattgtgtgtgtgggaaggacaaagccactctcacaagaaagggcaccaggactgctctccaaggaactggacctgtccagacagttacactccaaggtcattggagagaacttctgtatgggcaagcctgagagggagaggaaacaaaagctgtgtcctggcagaaggtctgggtttgcagatgggtgccctgaatggaactactttaactaatccatagggacttctggtatgctttcctctctttttaaaggaacttcgtgacactaaacattagcccaaaggacttcttagccttcaattgggagatacctttggtctgctcctgcaccaaagccatatgggtggaagtcagttggcctccctggttctgcagagggccagaagaatgagagagaggaagactgctggcagggaaatcgaggaggcgagactagaactgcaccagcttccctgatgtctgcagccatggctttgcagcgcagacagagcttctctgggatgctgggattcttgcctgtatgaatgcatcaagtattcatttattgcccgaataggcattgcattaagtcctctgtaaggtgtcaggcaagccaaaaaaaaaaaaaagatgcgtaagtcctaacccccaacagaggtgttcacagtgtagacagggaaaaaatgtataaacaaatgtgtaaaaagagaaatcagctcatggcttaggatggaattagagacaggtgagggacactcaggagctcattttccagctgctcttcagagtggaagggctggctggatcgggtaggtaagaatagctggattttttagaaaagaaatggatacagtctaaagaattaactcacccggtactttattctaagaagggtctggcatccatatgaggaaaaatgctcagctccaggaaagatggggagtccaagtggattaatgatgtcatgcataattttaagagacaagggagaaaacacaatgtatagccagagaaggagaagctcccatccaaatcctactaggaagagagtgggctgcagatgaatctgtgactcatgtttccctgtttcaaagggatcctggggaaggaggggaacatgcttgcagtatctctccctgtctgtctgctcacataagcattccgtccatctgagctcatcgtgctactggtatgtgtatgtgcagttacacagttttctgtatcatagattctagtgtgtttatacaaggagacatctgtggtttccccaaccgttccaaaaggctatttcaaaggaaccagccaacgtatgagaaatgaatgtaacactgtggacattgacttcccgcataaggcagggtgaccccctgaactccagatgtctgcacagtatcttatgtgttgttttccgttgtgacgaatgtgattggaacatttggggagcacccagagggatttctcagtgggaagcattacactttgctaaatcatgtatttattcctgattaaaacaaacctaataaatatttaacccttggca

SEQ ID NO: 29943 - DNA, 2102 bp, Homo sapiens
  source 1..2102: mol_type = unassigned DNA
actgctacccacagggcccccactccacctgctcccagacgaggccaactcctggccaagcttaggggcacagcggaggcgctctgtttctgatttttctcgccttccttggagatgcctgtgcttggaagggaaggcagaacattgcatcttggaacaaatctgcttttgatcatgcaaatgaatgcctggataatgtaggcagactgtcaatttcaccagttagaaagaaagagaaaagggggagaaattccccatgacagcgactgatgaagaatttcaatagaaagctgctacttcagaaaataagatcatttgctgcgaatggagaacatctcaggcagccctgatgctccaccggctctgggcatcaccagcggccccagggaaaaagaaagaaatgggaaacagcatgaaatccacccctgcgcctgccgagaggcccctgcccaacccggagggactggatagcgacttccttgccgtgctaagtgactacccgtctcctgacatcagccccccgatattccgccgaggggagaaactgcgtgtgatttctgatgaagggggctggtggaaagctatttctcttagcactggtcgagagagttacatccctggaatatgtgtggccagagtttaccatggctggctgtttgagggcctgggcagagacaaggccgaggagctgctgcagctgccagacacaaaggtcggctccttcatgatcagagagagtgagaccaagaaagggttttactcactgtcggtgagacacaggcaggtaaagcattaccgcattttccgtctgcccaacaactggtactacatttccccgaggctcaccttccagtgcctggaggacctggtgaaccactattctgaggtggctgatggcctgtgctgtgtgctcaccacgccctgcctgacacaaagcacggctgccccagcagtgagggcctccagctcacctgtcaccttgcgtcagaagactgtggactggaggagagtgtccagactgcaggaggaccccgagggaacagagaacccgcttggggtagacgagtcccttttcagctatggccttcgagagagcattgcctcttacctgtccctgaccagtgaggacaacacctcctttgatcgaaagaagaaaagcatctccctgatgtatggtggcagcaagagaaagagctcattcttctcatcaccaccttactttgaggactagccaagaacagacacaatggttcatgcccaaaaggaacagaagttccaactattgcctgggatcttgcgaaaagcgaggttccctgatccctgggagcctcacgtattttagaagccaagagaagccacatggagactcaaattcgcatcttctctatccacatcatgaccaaaggaacccctccctggtgtctgatcagggctgtggcatcacgaaacattggatcatgacatgtcgggcgatgcttggaagagcccagcatgtatgtatgcacacattgtgtgtgtgggaaggacaaagccactctcacaagaaagggcaccaggactgctctccaaggaactggacctgtccagacagttacactccaaggtcattggagagaacttctgtatgggcaagcctgagagggagaggaaacaaaagctgtgtcctggcagaaggtctgggtttgcagatgggtgccctgaatggaactactttaactaatccatagggacttctggtatgctttcctctctttttaaaggaacttcgtgacactaaacattagcccaaaggacttcttagccttcaattgggagatacctttggtctgctcctgcaccaaagccatatgggtggaagtcagttggcctccctggttctgcagagggccagaagaatgagagagaggaagactgctggcagggaaatcgaggaggcgagactagaactgcaccagcttccctgatgtctgcagccatggctttgcagcgcagacagagcttctctgggatgctgggattcttgcctgtatgaatgcatcaagtattcatttattgcccgaataggcattgcattaagtcctctgtaaggtgtcaggcaagcc

SEQ ID NO: 29944 - DNA, 1914 bp, Homo sapiens
  source 1..1914: mol_type = unassigned DNA
aaccaatcttcaccaatctcatcttcacatataaacagccgcctttcaagaagcaagctgccagaaaaatgatgcacgatgctctctaaactgggtcattctccacttggagggctcagggcacggttgactttccccgtctgtctcctataccacaggctctgggcatcaccagcggccccagggaaaaagaaagaaatgggaaacagcatgaaatccacccctgcgcctgccgagaggcccctgcccaacccggagggactggatagcgacttccttgccgtgctaagtgactacccgtctcctgacatcagccccccgatattccgccgaggggagaaactgcgtgtgatttctgatgaagggggctggtggaaagctatttctcttagcactggtcgagagagttacatccctggaatatgtgtggccagagtttaccatggctggctgtttgagggcctgggcagagacaaggccgaggagctgctgcagctgccagacacaaaggtcggctccttcatgatcagagagagtgagaccaagaaagggttttactcactgtcggtgagacacaggcaggtaaagcattaccgcattttccgtctgcccaacaactggtactacatttccccgaggctcaccttccagtgcctggaggacctggtgaaccactattctgaggtggctgatggcctgtgctgtgtgctcaccacgccctgcctgacacaaagcacggctgccccagcagtgagggcctccagctcacctgtcaccttgcgtcagaagactgtggactggaggagagtgtccagactgcaggaggaccccgagggaacagagaacccgcttggggtagacgagtcccttttcagctatggccttcgagagagcattgcctcttacctgtccctgaccagtgaggacaacacctcctttgatcgaaagaagaaaagcatctccctgatgtatggtggcagcaagagaaagagctcattcttctcatcaccaccttactttgaggactagccaagaacagacacaatggttcatgcccaaaaggaacagaagttccaactattgcctgggatcttgcgaaaagcgaggttccctgatccctgggagcctcacgtattttagaagccaagagaagccacatggagactcaaattcgcatcttctctatccacatcatgaccaaaggaacccctccctggtgtctgatcagggctgtggcatcacgaaacattggatcatgacatgtcgggcgatgcttggaagagcccagcatgtatgtatgcacacattgtgtgtgtgggaaggacaaagccactctcacaagaaagggcaccaggactgctctccaaggaactggacctgtccagacagttacactccaaggtcattggagagaacttctgtatgggcaagcctgagagggagaggaaacaaaagctgtgtcctggcagaaggtctgggtttgcagatgggtgccctgaatggaactactttaactaatccatagggacttctggtatgctttcctctctttttaaaggaacttcgtgacactaaacattagcccaaaggacttcttagccttcaattgggagatacctttggtctgctcctgcaccaaagccatatgggtggaagtcagttggcctccctggttctgcagagggccagaagaatgagagagaggaagactgctggcagggaaatcgaggaggcgagactagaactgcaccagcttccctgatgtctgcagccatggctttgcagcgcagacagagcttctctgggatgctgggattcttgcctgtatgaatgcatcaagtattcatttattgcccgaataggcattgcattaagtcctctgtaaggtgtcaggcaagccaaaaaaaaaaaaaa

SEQ ID NO: 29945 - DNA, 826 bp, Homo sapiens
  source 1..826: mol_type = unassigned DNA
attccccatgacagcgactgatgaagaatttcaatagaaagctgctacttcagaaaataagatcatttgctgcgaatggagaacatctcaggcagccctgatgctccaccgctggaggaggtcacgtgacattcacaggcatccagtcccagggtacctcctgctgcctggccccactgggtttatttgaatagtctgacttgatcaatccacagagccttctaacaattcaagtccttgcagagagaagcttgctcagagtggttactgaaaacaggaacctgcccttctgcaagccctgtgccttcctcgttcctagcagaggaagtatgcggccagtttagcaactgcagttcttctgtgtagcatgggctgcttctccacaaccgcgagaagcccggctgcctgtttattctggagcagcagcagttgacagacggagaggcagtgactctgcacccagcaatccctctgcagacagctcccacaggagtcatgcccagtgtgtgaaggctctgggcatcaccagcggccccagggaaaaagaaagaaatgggaaacagcatgaaatccacccctgcgcctgccgagaggcccctgcccaacccggagggactggatagcgacttccttgccgtgctaagtgactacccgtctcctgacatcagccccccgatattccgccgaggggagaaactgcgtgtgatttctgatgaagggggctggtggaaagctatttctcttagcactggtcgagagagttacatccctggaatatgtgtggccagagtttaccatggctggctgtttgagggcctgggcagag

SEQ ID NO: 29946 - DNA, 563 bp, Homo sapiens
  source 1..563: mol_type = unassigned DNA
aagatcatttgctgcgaatggagaacatctcaggcagccctgatgctccaccgtccttgcagagagaagcttgctcagagtggttactgaaaacaggaacctgcccttctgcaagccctgtgccttcctcgttcctagcagaggaagtatgcggccagtttagcaactgcagttcttctgtgtagcatgggctgcttctccacaaccgcgagaagcccggctgcctgtttattctggagcagcagcagttgacagacggagaggcagtgactctgcacccagcaatccctctgcagacagctcccacaggagtcatgcccagtgtgtgaagcccggacacagcaccttctgtcacggagactgaactctgactggcaagacagaacgggtgggagtgcaagcaacagcagagaagactgttagcgtagaagaacccaggcctctaggactgactcaaactttctcatctcatgaccctgggctctgggcatcaccagcggccccagggaaaaagaaagaaatgggaaacagcatgaaatccacccctgcgcctgccgagaggc

SEQ ID NO: 29947 - DNA, 586 bp, Homo sapiens
  source 1..586: mol_type = unassigned DNA
aagatcatttgctgcgaatggagaacatctcaggcagccctgatgctccaccgtccttgcagagagaagcttgctcagagtggttactgaaaacaggaacctgcccttctgcaagccctgtgccttcctcgttcctagcagaggaagtatgcggccagtttagcaactgcagttcttctgtgtagcatgggctgcttctccacaaccgcgagaagcccggctgcctgtttattctggagcagcagcagttgacagacggagaggcagtgactctgcacccagcaatccctctgcagacagctcccacaggagtcatgcccagtgtgtgaagaacaggaaaccaaggtccaagttcacacaaaggaaataacattggtccaaagaccggagggaaaataaggctctgggcatcaccagcggccccagggaaaaagaaagaaatgggaaacagcatgaaatccacccctgcgcctgccgagaggcccctgcccaacccggagggactggatagcgacttccttgccgtgctaagtgactacccgtctcctgacatcagccccccgatattccgccgaggggagaaact

SEQ ID NO: 29948 - DNA, 594 bp, Homo sapiens
  source 1..594: mol_type = unassigned DNA
gtcttcagagggacttgatggatcctgtacccaccctccgtctttggtctgaagaaaatgggtgggtctctgctggtggctctgggcatcaccagcggccccagggaaaaagaaagaaatgggaaacagcatgaaatccacccctgcgcctgccgagaggcccctgcccaacccggagggactggatagcgacttccttgccgtgctaagtgactacccgtctcctgacatcagccccccgatattccgccgaggggagaaactgcgtgtgatttctgatgaagggggctggtggaaagctatttctcttagcactggtcgagagagttacatccctggaatatgtgtggccagagtttaccatggctggctgtttgagggcctgggcagagacaaggccgaggagctgctgcagctgccagacacaaaggtcggctccttcatgatcagagagagtgagaccaagaaagggttttactcactgtcggtgagacacaggcaggtaaagcattaccgcattttccgtctgcccaacaactggtactacatttccccgaggctcaccttccagtgcctggaggacctggtgaacca

SEQ ID NO: 29949 - DNA, 582 bp, Homo sapiens
  source 1..582: mol_type = unassigned DNA
aactttgctgtcattgggaccccctgggtgggccataggtggcctggggtggtatgtgggggagggtcttcagagggacttgatggatcctgtacccaccctccgtctttggtctgaagaaaatgggtgggtctctgctggtgtccttgcagagagaagcttgctcagagtggttactgaaaacaggaacctgcccttctgcaagccctgtgccttcctcgttcctagcagaggaagtatgcggccagtttagcaactgcagttcttctgtgtagcatgggctgcttctccacaaccgcgagaagcccggctgcctgtttattctggagcagcagcagttgacagacggagaggcagtgactctgcacccagcaatccctctgcagacagctcccacaggagtcatgcccagtgtgtgaaggctctgggcatcaccagcggccccagggaaaaagaaagaaatgggaaacagcatgaaatccacccctgcgcctgccgagaggcccctgcccaacccggagggactggatagcgacttccttgccgtgctaagtgactacccgtctcctgacatcagccccc

SEQ ID NO: 29950 - DNA, 2757 bp, Homo sapiens
  source 1..2757: mol_type = unassigned DNA
gtgagaaccacagagtctgcagtcggagctagagctccaaggaccccacgcctgtgtctctgtgacagagctcaaagggccctgggccttccctccctggctcggctgtgcttgggagggttccccagtccagaatccctaaggagcatggggcagctgatccatccctggtgtacaaactgctgactgcagacagatgctgagctacccaaaccaacacctagcctctccctgaagatcctcccaggctgagagagttctgggtgtcctaggaccaaggacactggcagacttccagaagggcccccaaagccctaacctgtccagccagagcatgcgtctcagcagagctgtcttcccaagcctttgatgacaaaccaatttccctcgatgatgtgcttctgagtgctctgctgaggaacaatgggaagtctgcccagcagaagaaaatctctgccaagcccaagcttgagttcctctgtccaaggccagggacctgtgaccatggaagcagagagaagcaaggccacagccgtggccctgggcagtttcccggcaggtggcccggccgagctgtcgctgagactcggggagccattgaccatcgtctctgaggatggagactggtggacggtgctgtctgaagtctcaggcagagagtataacatccccagcgtccacgtggccaaagtctcccatgggtggctgtatgagggcctgagcagggagaaagcagaggaactgctgttgttacctgggaaccctggaggggccttcctcatccgggagagccagaccaggagaggctcttactctctgtcagtccgcctcagccgccctgcatcctgggaccggatcagacactacaggatccactgccttgacaatggctggctgtacatctcaccgcgcctcaccttcccctcactccaggccctggtggaccattactctgagctggcggatgacatctgctgcctactcaaggagccctgtgtcctgcagagggctggcccgctccctggcaaggatatacccctacctgtgactgtgcagaggacaccactcaactggaaagagctggacagctccctcctgttttctgaagctgccacaggggaggagtctcttctcagtgagggtctccgggagtccctcagcttctacatcagcctgaatgacgaggctgtctctttggatgatgcctaggcccaaaggagaggccaaaagggaaaccaaggctgcacacctagaaccccaattcagcctcctgggcaccccagaggcaaggctgtgcactcagggagggagggtgggacacagaggtgcatctagggtcccacctgtacccttgctctttcctctcttagcccttagaagtcacctacttccttccagtgccatgatcccacctgcgacctctagtgcgagtgcagagaaggtgggaccagggccagggttccaaaaagagaataagcctcctggggggtctgacctagttagttcttgagtttggggtttccagtaccatctggatgccctgcctgttgagccccattctacatccccaccattaaccaggccccacccacaaggtagaaacaacccctagagtcaacgagaaagtcattttcagaaaatctacaagtctcgttgagaccaccaccatacctcagaaggtaggactgtggcctagaagggaaaggaaagctgagatgatgtcttaccgtagcagcagatcttggatggtccaggctctatgtgacctccagagcaaagagaaagacttcggacagtctaggtcctcaaatgtcccccattgaggacaacagccccagctctttttcttttttttgagacggagtcttgccctgttgcccatgctggagtgcaatggcacgatctcagctcactgcaacctccatctcctggattcaaacaattctcctgcctcagcctccagaatagctgggattacaggcgtacaccaccatgcctggctaatttttttgtatttttagtagacatggggtttcaccacattggccaggctggtgtcgaactcctgacctcaggtgatccacccaccttggcctcccaaagtgctgggattacaggtgtgagccacggcacccagcctagctctcagatctctatttcattttgtggcttaccattccctagcacactggccttgccatcttgtggccgaataaaaaataacacctcttaagtctagcacactgcagtgaggccaggcacctcagtgctgggcaggggcatcagaaggtgctaagccctctctccacaatgccaagacggagaccacagcctacaccaaatccagcccttgatttccctgctgcctccataaacagaaagaggtctgctggatccgctaagggatcagggagaggaagaaagagggatggggtgggaggcaccccctccagtgctcctactggttcccaagctacaggtggggtgggaaaggctttatcaggtatcatcaacaggttctcaattaaagatttgatttattcaagtatgtgaaaacattctacaatggaaactcttattagatgctgcatgtactgtgctatggaccacgcacatacagccatgctgtttcagaagacttgaaatgccattgatagtttaaaaactctacacccgatggagaatcgaggaagacaatttaatgtttcatctgaatccagaggtgcatcaaattaaatgacagctccacttggcaaa

SEQ ID NO: 29951 - DNA, 2171 bp, Homo sapiens
  source 1..2171: mol_type = unassigned DNA
tgcgtctcagcagagctgtcttcccaagcctttgatgacaaaccaatttccctcgatgatgtgcttctgagtgctctgctgaggaacaatgggaagtctgcccagcagaagaaaatctctgccaagcccaagcttgagttcctctgtccaaggccagggacctgtgaccatggaagcagagagaagcaaggccacagccgtggccctgggcagtttcccggcaggtggcccggccgagctgtcgctgagactcggggagccattgaccatcgtctctgaggatggagactggtggacggtgctgtctgaagtctcaggcagagagtataacatccccagcgtccacgtggccaaagtctcccatgggtggctgtatgagggcctgagcagggagaaagcagaggaactgctgttgttacctgggaaccctggaggggccttcctcatccgggagagccagaccaggagaggctcttactctctgtcagtccgcctcagccgccctgcatcctgggaccggatcagacactacaggatccactgccttgacaatggctggctgtacatctcaccgcgcctcaccttcccctcactccaggccctggtggaccattactctgagggctggcccgctccctggcaaggatatacccctacctgtgactgtgcagaggacaccactcaactggaaagagctggacagctccctcctgttttctgaagctgccacaggggaggagtctcttctcagtgagggtctccgggagtccctcagcttctacatcagcctgaatgacgaggctgtctctttggatgatgcctaggcccaaaggagaggccaaaagggaaaccaaggctgcacacctagaaccccaattcagcctcctgggcaccccagaggcaaggctgtgcactcagggagggagggtgggacacagaggtgcatctagggtcccacctgtacccttgctctttcctctcttagcccttagaagtcacctacttccttccagtgccatgatcccacctgcgacctctagtgcgagtgcagagaaggtgggaccagggccagggttccaaaaagagaataagcctcctggggggtctgacctagttagttcttgagtttggggtttccagtaccatctggatgccctgcctgttgagccccattctacatccccaccattaaccaggccccacccacaaggtagaaacaacccctagagtcaacgagaaagtcattttcagaaaatctacaagtctcgttgagaccaccaccatacctcagaaggtaggactgtggcctagaagggaaaggaaagctgagatgatgtcttaccgtagcagcagatcttggatggtccaggctctatgtgacctccagagcaaagagaaagacttcggacagtctaggtcctcaaatgtcccccattgaggacaacagccccagctctttttcttttttttgagacggagtcttgccctgttgcccatgctggagtgcaatggcacgatctcagctcactgcaacctccatctcctggattcaaacaattctcctgcctcagcctccagaatagctgggattacaggcgtacaccaccatgcctggctaatttttttgtatttttagtagacatggggtttcaccacattggccaggctggtgtcgaactcctgacctcaggtgatccacccaccttggcctcccaaagtgctgggattacaggtgtgagccacggcacccagcctagctctcagatctctatttcattttgtggcttaccattccctagcacactggccttgccatcttgtggccgaataaaaaataacacctcttaagtctagcacactgcagtgaggccaggcacctcagtgctgggcaggggcatcagaaggtgctaagccctctctccacaatgccaagacggagaccacagcctacaccaaatccagcccttgatttccctgctgcctccataaacagaaagaggtctgctggatccgctaagggatcagggagaggaagaaagagggatggggtgggaggcaccccctccagtgctcctactggttcccaagctacaggtggggtgggaaaggctttatcaggtatcatcaacaggttctcaattaaagatttgatttattcaagtatgtgaaaa

SEQ ID NO: 29952 - DNA, 4394 bp, Homo sapiens
  source 1..4394: mol_type = unassigned DNA
acgctccgcccggcccggcccggcccggccgtccatacttccctccggtgtccaccagagggcgaacgggagacgcgaatgtggttcgactacgcatgcgcacgccgctgggcgcacgtgcggagggcggcggggcgggagggtaaaggtaggaggtgagaggtgaaggggcgggcacccggcggccaggagagagagggagggcgccacgcaccggactgcgggccgagagcgcgcacgccgcgctccgcccctgctgccgcccccgtcgccgccgccgccgccgccgcagcttgggaggtgctgccaccacaggtacctgcacatgttgttctttgtcagtgctgtcaagtgtgtgccagggtgatccatggtcactttccgggatggcagcaaggtgacttcggctgaggatgaccctgactgaaaggctgcgtgagaagatatctcgggccttctacaaccatgggctcctctgtgcatcctatcccatccccatcatcctcttcacagggttctgcatcttagcctgctgctacccactgctgaaactccccttgccaggaacaggacctgtggaattcaccacccctgtgaaggattactcgcccccacctgtggactctgaccgcaaacaaggagagcctactgagcagcctgagtggtatgtgggtgccccggtggcttatgtccagcagatatttgtgaagtcctcagtgtttccctggcacaagaacctcctggcagtagatgtatttcgttcacctttgtcccgggcattccaactggtggaggagatccggaaccacgtgctgagagacagctctgggatcaggagcttggaggagttgtgtctgcaagtgaccgacctgctgccaggccttaggaagctcaggaacctactccctgagcatggatgcctgctgctgtcccctgggaacttctggcagaatgactgggaacgcttccatgctgatcctgacatcattgggaccatccaccagcacgagcctaaaaccctgcagacttcagccacactcaaagacttgttatttggtgttcctgggaagtacagcggggtgagcctctacaccaggaagaggatggtctcctacaccatcaccctggtcttccagcactaccatgccaagttcctgggcagcctgcgtgcccgcctgatgcttctgcaccccagccccaactgcagccttcgggcggagagcctggtccacgtgcacttcaaggaggagattggtgtcgctgagctcatcccccttgtgaccacctacatcatcttgtttgcctacatctacttctccacgcggaagatcgacatggtcaagtccaagtgggggctggccctggctgccgtggtcacagtgctcagctcgctgctcatgtctgtgggactctgcacactcttcggcctgacgcccaccctcaatggcggcgagattttcccctaccttgtggtggttattgggttagagaatgtgttggtgctcaccaagtctgtggtctcaaccccggtagacctggaggtgaagctgcggatcgcccaaggcctaagcagcgagagctggtccatcatgaagaacatggccacggagctgggcatcatcctcatcggctacttcaccctagtgcccgccatccaggagttctgtctctttgctgtcgtggggctggtgtctgacttcttccttcagatgctgtttttcaccactgtcctgtccattgacattcgccggatggagctagcagacctgaacaagcgactgccccctgaggcctgcctgccctcagccaagccagtgggacagccaacgcgctacgagcggcagctggctgtgaggccgtccacaccccacaccatcacgttgcagccgtcttccttccgaaacctgcggctccccaagaggctgcgtgttgtctacttcctggcccgcacccgcctggcacagcgcctcatcatggctggcaccgttgtctggattggcatcctggtatacacagacccagcagggctgcgcaactacctcgctgcccaggtgacggaacagagcccattgggtgagggagccctggctcccatgcccgtgcctagtggcatgctgccccccagccacccggaccctgccttctccatcttcccacctgatgcccctaagctacctgagaaccagacgtcgccaggcgagtcacctgagcgtggaggtccagcagaggttgtccatgacagcccagtcccagaggtaacctgggggcctgaggatgaggaactttggaggaaattgtccttccgccactggccgacgctcttcagctattacaacatcacactggccaagaggtacatcagcctgctgcccgtcatcccagtcacgctccgcctgaacccgagggaggctctggagggccggcaccctcaggacggccgcagtgcctggcccccaccggggcccatacctgctgggcactgggaagcaggacccaagggcccaggtggggtgcaggcccatggagacgtcacgctgtacaaggtggcggcgctgggcctggccaccggcatcgtcttggtgctgctgctgctctgcctctaccgcgtgctatgcccgcgcaactacgggcagctgggtggtgggcccgggcggcggaggcgcggggagctgccctgcgacgactacggctatgcgccacccgagacggagatcgtgccgcttgtgctgcgcggccacctcatggacatcgagtgcctggccagcgacggcatgctgctggtgagctgctgcctggcaggccacgtctgcgtgtgggacgcgcagaccggggattgcctaacgcgcattccgcgcccaggcaggcagcgccgggacagtggcgtgggcagcgggcttgaggctcaggagagctgggaacgactttcagatggtgggaaggctggtccagaggagcctggggacagccctcccctgagacaccgcccccggggccctccgccgccttccctcttcggggaccagcctgacctcacctgcttaattgacaccaacttttcagcgcagcctcggtcctcacagcccactcagcccgagccccggcaccgggcggtctgtggccgctctcgggactccccaggctatgacttcagctgcctggtgcagcgggtgtaccaggaggaggggctggcggccgtctgcacaccagccctgcgcccaccctcgcctgggccggtgctgtcccaggcccctgaggacgagggtggctcccccgagaaaggctccccttccctcgcctgggcccccagtgccgagggttccatctggagcttggagctgcagggcaacctcatcgtggtggggcggagcagcggccggctggaggtgtgggacgccattgaaggggtgctgtgctgcagcagcgaggaggtctcctcaggcattaccgctctggtgttcttggacaaaaggattgtggctgcacggctcaacggttcccttgatttcttctccttggagacccacactgccctcagccccctgcagtttagagggaccccagggcggggcagttcccctgcctctccagtgtacagcagcagcgacacagtggcctgtcacctgacccacacagtgccctgtgcacaccaaaaacccatcacagccctgaaagccgctgctgggcgcttggtgactgggagccaagaccacacactgagagtgttccgtctggaggactcgtgctgcctcttcacccttcagggccactcaggggccatcacgaccgtgtacattgaccagaccatggtgctggccagtggaggacaagatggggccatctgcctgtgggatgtactgactggcagccgggtcagccatgtgtttgctcaccgtggggatgtcacctcccttacctgtaccacctcctgtgtcatcagcagtggcctggatgacctcatcagcatctgggaccgcagcacaggcatcaagttctactccattcagcaggacctgggctgtggtgcaagcttgggtgtcatctcagacaacctgctggtgactggcggccagggctgtgtctccttttgggacctaaactacggggacctgttacagacagtctacctggggaagaacagtgaggcccagcctgcccgccagatcctggtgctggacaacgctgccattgtctgcaactttggcagtgagctcagcctggtgtatgtgccctctgtgctggagaagctggactgagcgcagggcctccttgcccaggcaggaggctggggtgctgtgtgggggccaatgcactgaacctggacttgggggaaagagccgagtatcttccagccgctgcctcctgactgtaataatattaaacttttttaaaaaacc

SEQ ID NO: 29953 - DNA, 2731 bp, Homo sapiens
  source 1..2731: mol_type = unassigned DNA
agaggtgaaggggcgggcacccggcggccaggagagagagggagggcgccacgcaccggactgcgggccgagagcgcgcacgccgcgctccgcccctgctgccgcccccgtcgccgccgccgccgccgccgcagcttgggaggtgctgccaccacaggtacctgcacatgttgttctttgtcagtgctgtcaagtgtgtgccagggtgatccatggtcactttccgggatggcagcaaggtgacttcggctgaggatgaccctgactgaaaggctgcgtgagaagatatctcgggccttctacaaccatgggctcctctgtgcatcctatcccatccccatcatcctcttcacagggttctgcatcttagcctgctgctacccactgctgaaactccccttgccaggaacaggacctgtggaattcaccacccctgtgaaggattactcgcccccacctgtggactctgaccgcaaacaaggagagcctactgagcagcctgagtggtatgtgggtgccccggtggcttatgtccagcagatatttgtgaagtcctcagtgtttccctggcacaagaacctcctggcagtagatgtatttcgttcacctttgtcccgggcattccaactggtggaggagatccggaaccacgtgctgagagacagctctgggatcaggagcttggaggagttgtgtctgcaagtgaccgacctgctgccaggccttaggaagctcaggaacctactccctgagcatggatgcctgctgctgtcccctgggaacttctggcagaatgactgggaacgcttccatgctgatcctgacatcattgggaccatccaccagcacgagcctaaaaccctgcagacttcagccacactcaaagacttgttatttggtgttcctgggaagtacagcggggtgagcctctacaccaggaagaggatggtctcctacaccatcaccctggtcttccagcactaccatgccaagttcctgggcagcctgcgtgcccgcctgatgcttctgcaccccagccccaactgcagccttcgggcggagagcctggtccacgtgcacttcaaggaggagattggtgtcgctgagctcatcccccttgtgaccacctacatcatcttgtttgcctacatctacttctccacgcggaagatcgacatggtcaagtccaagtgggggctggccctggctgccgtggtcacagtgctcagctcgctgctcatgtctgtgggactctgcacactcttcggcctgacgcccaccctcaatggcggcgagattttcccctaccttgtggtggttattgggttagagaatgtgttggtgctcaccaagtctgtggtctcaaccccggtagacctggaggtgaagctgcggatcgcccaaggcctaagcagcgagagctggtccatcatgaagaacatggccacggagctgggcatcatcctcatcggctacttcaccctagtgcccgccatccaggagttctgtctctttgctgtcgtggggctggtgtctgacttcttccttcagatgctgtttttcaccactgtcctgtccattgacattcgccggatggagctagcagacctgaacaagcgactgccccctgaggcctgcctgccctcagccaagccagtgggacagccaacgcgctacgagcggagcagcggccggctggaggtgtgggacgccattgaaggggtgctgtgctgcagcagcgaggaggtctcctcaggcattaccgctctggtgttcttggacaaaaggattgtggctgcacggctcaacggttcccttgatttcttctccttggagacccacactgccctcagccccctgcagtttagagggaccccagggcggggcagttcccctgcctctccagtgtacagcagcagcgacacagtggcctgtcacctgacccacacagtgccctgtgcacaccaaaaacccatcacagccctgaaagccgctgctgggcgcttggtgactgggagccaagaccacacactgagagtgttccgtctggaggactcgtgctgcctcttcacccttcagggccactcaggggccatcacgaccgtgtacattgaccagaccatggtgctggccagtggaggacaagatggggccatctgcctgtgggatgtactgactggcagccgggtcagccatgtgtttgctcaccgtggggatgtcacctcccttacctgtaccacctcctgtgtcatcagcagtggcctggatgacctcatcagcatctgggaccgcagcacaggcatcaagttctactccattcagcaggacctgggctgtggtgcaagcttgggtgtcatctcagacaacctgctggtgactggcggccagggctgtgtctccttttgggacctaaactacggggacctgttacagacagtctacctggggaagaacagtgaggcccagcctgcccgccagatcctggtgctggacaacgctgccattgtctgcaactttggcagtgagctcagcctggtgtatgtgccctctgtgctggagaagctggactgagcgcagggcctccttgcccaggcaggaggctggggtgctgtgtgggggccaatgcactgaacctggacttgggggaaagagccgagtatcttccagccgctgcctcctgactgtaataatattaaacttttttaaaaaaccatatcatcatctgtcaggc

SEQ ID NO: 29954 - DNA, 2878 bp, Homo sapiens
  source 1..2878: mol_type = unassigned DNA
atgaccctgactgaaaggctgcgtgagaagatatctcgggccttctacaaccatgggctcctctgtgcatcctatcccatccccatcatcctcatcggctacttcaccctagtgcccgccatccaggagttctgtctctttgctgtcgtggggctggtgtctgacttcttccttcagatgctgtttttcaccactgtcctgtccattgacattcgccggatggagctagcagacctgaacaagcgactgccccctgaggcctgcctgccctcagccaagccagtgggacagccaacgcgctacgagcggcagctggctgtgaggccgtccacaccccacaccatcacgttgcagccgtcttccttccgaaacctgcggctccccaagaggctgcgtgttgtctacttcctggcccgcacccgcctggcacagcgcctcatcatggctggcaccgttgtctggattggcatcctggtatacacagacccagcagggctgcgcaactacctcgctgcccaggtgacggaacagagcccattgggtgagggagccctggctcccatgcccgtgcctagtggcatgctgccccccagccacccggaccctgccttctccatcttcccacctgatgcccctaagctacctgagaaccagacgtcgccaggcgagtcacctgagcgtggaggtccagcagaggttgtccatgacagcccagtcccagaggtaacctgggggcctgaggatgaggaactttggaggaaattgtccttccgccactggccgacgctcttcagctattacaacatcacactggccaagaggtacatcagcctgctgcccgtcatcccagtcacgctccgcctgaacccgagggaggctctggagggccggcaccctcaggacggccgcagtgcctggcccccaccggggcccatacctgctgggcactgggaagcaggacccaagggcccaggtggggtgcaggcccatggagacgtcacgctgtacaaggtggcggcgctgggcctggccaccggcatcgtcttggtgctgctgctgctctgcctctaccgcgtgctatgcccgcgcaactacgggcagctgggtggtgggcccgggcggcggaggcgcggggagctgccctgcgacgactacggctatgcgccacccgagacggagatcgtgccgcttgtgctgcgcggccacctcatggacatcgagtgcctggccagcgacggcatgctgctggtgagctgctgcctggcaggccacgtctgcgtgtgggacgcgcagaccggggattgcctaacgcgcattccgcgcccagggcagcgccgggacagtggcgtgggcagcgggcttgaggctcaggagagctgggaacgactttcagatggtgggaaggctggtccagaggagcctggggacagccctcccctgagacaccgcccccggggccctccgccgccttccctcttcggggaccagcctgacctcacctgcttaattgacaccaacttttcagcgcagcctcggtcctcacagcccactcagcccgagccccggcaccgggcggtctgtggccgctctcgggactccccaggctatgacttcagctgcctggtgcagcgggtgtaccaggaggaggggctggcggccgtctgcacaccagccctgcgcccaccctcgcctgggccggtgctgtcccaggcccctgaggacgagggtggctcccccgagaaaggctccccttccctcgcctgggcccccagtgccgagggttccatctggagcttggagctgcagggcaacctcatcgtggtggggcggagcagcggccggctggaggtgtgggacgccattgaaggggtgctgtgctgcagcagcgaggaggtctcctcaggcattaccgctctggtgttcttggacaaaaggattgtggctgcacggctcaacggttcccttgatttcttctccttggagacccacactgccctcagccccctgcagtttagagggaccccagggcggggcagttcccctgcctctccagtgtacagcagcagcgacacagtggcctgtcacctgacccacacagtgccctgtgcacaccaaaaacccatcacagccctgaaagccgctgctgggcgcttggtgactgggagccaagaccacacactgagagtgttccgtctggaggactcgtgctgcctcttcacccttcagggccactcaggggccatcacgaccgtgtacattgaccagaccatggtgctggccagtggaggacaagatggggccatctgcctgtgggatgtactgactggcagccgggtcagccatgtgtttgctcaccgtggggatgtcacctcccttacctgtaccacctcctgtgtcatcagcagtggcctggatgacctcatcagcatctgggaccgcagcacaggcatcaagttctactccattcagcaggacctgggctgtggtgcaagcttgggtgtcatctcagacaacctgctggtgactggcggccagggctgtgtctccttttgggacctaaactacggggacctgttacagacagtctacctggggaagaacagtgaggcccagcctgcccgccagatcctggtgctggacaacgctgccattgtctgcaactttggcagtgagctcagcctggtgtatgtgccctctgtgctggagaagctggactgagcgcagggcctccttgcccaggcaggaggctggggtgctgtgtgggggccaatgcactgaacctggacttgggggaaagagccgagtatcttccagccgctgcctcctgactgtaataatattaaacttttttaaaaaaccatatcatcatctgtcaggc

SEQ ID NO: 29955 - DNA, 2925 bp, Homo sapiens
  source 1..2925: mol_type = unassigned DNA
ctgggaacgcttccatgctgatcctgacatcattgggaccatccaccagcacgagcctaaaaccctgcagacttcagccacactcaaagacttgttatttggtgttcctgggaagtacagcggggtgagcctctacaccaggaagaggatggtctcctacaccatcaccctggtcttccagcactaccatgccaagttcctgggcagcctgcgtgcccgcctgatgcttctgcaccccagccccaactgcagccttcgggcggagagcctggtccacgtgcacttcaaggaggagattggtgtcgctgagctcatcccccttgtgaccacctacatcatcttgtttgcctacatctacttctccacgcggaagatcgacatggtcaagtccaagtgggggctggccctggctgccgtggtcacagtgctcagctcgctgctcatgtctgtgggactctgcacactcttcggcctgacgcccaccctcaatggcggcgagattttcccctaccttgtggtggttattgggttagagaatgtgttggtgctcaccaagtctgtggtctcaaccccggtagacctggaggtgaagctgcggatcgcccaaggcctaagcagcgagagctggtccatcatgaagaacatggccacggagctgggcatcatcctcatcggctacttcaccctagtgcccgccatccaggagttctgtctctttgctgtcgtggggctggtgtctgacttcttccttcagatgctgtttttcaccactgtcctgtccattgacattcgccggatggagctagcagacctgaacaagcgactgccccctgaggcctgcctgccctcagccaagccagtgggacagccaacgcgctacgagcggcagctggctgtgaggccgtccacaccccacaccatcacgttgcagccgtcttccttccgaaacctgcggctccccaagaggctgcgtgttgtctacttcctggcccccaccggggcccatacctgctgggcactgggaagcaggacccaagggcccaggtggggtgcaggcccatggagacgtcacgctgtacaaggtggcggcgctgggcctggccaccggcatcgtcttggtgctgctgctgctctgcctctaccgcgtgctatgcccgcgcaactacgggcagctgggtggtgggcccgggcggcggaggcgcggggagctgccctgcgacgactacggctatgcgccacccgagacggagatcgtgccgcttgtgctgcgcggccacctcatggacatcgagtgcctggccagcgacggcatgctgctggtgagctgctgcctggcaggccacgtctgcgtgtgggacgcgcagaccggggattgcctaacgcgcattccgcgcccaggcaggcagcgccgggacagtggcgtgggcagcgggcttgaggctcaggagagctgggaacgactttcagatggtgggaaggctggtccagaggagcctggggacagccctcccctgagacaccgcccccggggccctccgccgccttccctcttcggggaccagcctgacctcacctgcttaattgacaccaacttttcagcgcagcctcggtcctcacagcccactcagcccgagccccggcaccgggcggtctgtggccgctctcgggactccccaggctatgacttcagctgcctggtgcagcgggtgtaccaggaggaggggctggcggccgtctgcacaccagccctgcgcccaccctcgcctgggccggtgctgtcccaggcccctgaggacgagggtggctcccccgagaaaggctccccttccctcgcctgggcccccagtgccgagggttccatctggagcttggagctgcagggcaacctcatcgtggtggggcggagcagcggccggctggaggtgtgggacgccattgaaggggtgctgtgctgcagcagcgaggaggtctcctcaggcattaccgctctggtgttcttggacaaaaggattgtggctgcacggctcaacggttcccttgatttcttctccttggagacccacactgccctcagccccctgcagtttagagggaccccagggcggggcagttcccctgcctctccagtgtacagcagcagcgacacagtggcctgtcacctgacccacacagtgccctgtgcacaccaaaaacccatcacagccctgaaagccgctgctgggcgcttggtgactgggagccaagaccacacactgagagtgttccgtctggaggactcgtgctgcctcttcacccttcagggccactcaggggccatcacgaccgtgtacattgaccagaccatggtgctggccagtggaggacaagatggggccatctgcctgtgggatgtactgactggcagccgggtcagccatgtgtttgctcaccgtggggatgtcacctcccttacctgtaccacctcctgtgtcatcagcagtggcctggatgacctcatcagcatctgggaccgcagcacaggcatcaagttctactccattcagcaggacctgggctgtggtgcaagcttgggtgtcatctcagacaacctgctggtgactggcggccagggctgtgtctccttttgggacctaaactacggggacctgttacagacagtctacctggggaagaacagtgaggcccagcctgcccgccagatcctggtgctggacaacgctgccattgtctgcaactttggcagtgagctcagcctggtgtatgtgccctctgtgctggagaagctggactgagcgcagggcctccttgcccaggcaggaggctggggtgctgtgtgggggccaatgcactgaacctggacttgggggaaagagccgagtatcttccagccgctgcctcctgactgtaataatattaaactttttt

SEQ ID NO: 29956 - DNA, 683 bp, Homo sapiens
  source 1..683: mol_type = unassigned DNA
gtgtccctgcaccggccggcccctggagctccgcgtccccaccagacctccgcgggcccctggtgtgacggggggagatgcgcggcgtcgcatcccctggcctagttgctccgggaagctgttgtagaacctgctttggtgctgtttgggttttccggagtgcgggggagagcaggtacctgcacatgttgttctttgtcagtgctgtcaagtgtgtgccagggtgatccatggtcactttccgggatggcagcaaggtgacttcggctgaggatgaccctgactgaaaggctgcgtgagaagatatctcgggccttctacaaccatgggctcctctgtgcatcctatcccatccccatcatcctcttcacagggttctgcatcttagcctgctgctacccactgctgaaactccccttgccaggaacaggacctgtggaattcaccacccctgtgaaggattactcgcccccacctgtggactctgaccgcaaacaaggagagcctactgagcagcctgagtggtatgtgggtgccccggtggcttatgtccagcagatatttgtgaagtcctcagtgtttccctggcacaagaacctcctggcagtagatgtatttcgttcacctttgtcccgggcattccaactggtggaggagatccggaaccacgtgctgagagacag

SEQ ID NO: 29957 - DNA, 3634 bp, Homo sapiens
  source 1..3634: mol_type = unassigned DNA
cccgtcgccgccgccgccgccgccgcagcttgggaggtgctgccaccacaggtacctgcacatgttgttctttgtcagtgctgtcaagtgtgtgccagggtgatccatggtcactttccgggatggcagcaaggtgacttcggctgaggatgaccctgactgaaaggctgcgtgagaagatatctcgggccttctacaaccatgggctcctctgtgcatcctatcccatccccatcatcctcttcacagggttctgcatcttagcctgctgctacccactgctgaaactccccttgccaggaacaggacctgtggaattcaccacccctgtgaaggattactcgcccccacctgtggactctgaccgcaaacaaggagagcctactgagcagcctgagtgggttcctgggcagcctgcgtgcccgcctgatgcttctgcaccccagccccaactgcagccttcgggcggagagcctggtccacgtgcacttcaaggaggagattggtgtcgctgagctcatcccccttgtgaccacctacatcatcttgtttgcctacatctacttctccacgcggaagatcgacatggtcaagtccaagtgggggctggccctggctgccgtggtcacagtgctcagctcgctgctcatgtctgtgggactctgcacactcttcggcctgacgcccaccctcaatggcggcgagattttcccctaccttgtggtggttattgggttagagaatgtgttggtgctcaccaagtctgtggtctcaaccccggtagacctggaggtgaagctgcggatcgcccaaggcctaagcagcgagagctggtccatcatgaagaacatggccacggagctgggcatcatcctcatcggctacttcaccctagtgcccgccatccaggagttctgtctctttgctgtcgtggggctggtgtctgacttcttccttcagatgctgtttttcaccactgtcctgtccattgacattcgccggatggagctagcagacctgaacaagcgactgccccctgaggcctgcctgccctcagccaagccagtgggacagccaacgcgctacgagcggcagctggctgtgaggccgtccacaccccacaccatcacgttgcagccgtcttccttccgaaacctgcggctccccaagaggctgcgtgttgtctacttcctggcccgcacccgcctggcacagcgcctcatcatggctggcaccgttgtctggattggcatcctggtatacacagacccagcagggctgcgcaactacctcgctgcccaggtgacggaacagagcccattgggtgagggagccctggctcccatgcccgtgcctagtggcatgctgccccccagccacccggaccctgccttctccatcttcccacctgatgcccctaagctacctgagaaccagacgtcgccaggcgagtcacctgagcgtggaggtccagcagaggttgtccatgacagcccagtcccagaggtaacctgggggcctgaggatgaggaactttggaggaaattgtccttccgccactggccgacgctcttcagctattacaacatcacactggccaagaggtacatcagcctgctgcccgtcatcccagtcacgctccgcctgaacccgagggaggctctggagggccggcaccctcaggacggccgcagtgcctggcccccaccggggcccatacctgctgggcactgggaagcaggacccaagggcccaggtggggtgcaggcccatggagacgtcacgctgtacaaggtggcggcgctgggcctggccaccggcatcgtcttggtgctgctgctgctctgcctctaccgcgtgctatgcccgcgcaactacgggcagctgggtggtgggcccgggcggcggaggcgcggggagctgccctgcgacgactacggctatgcgccacccgagacggagatcgtgccgcttgtgctgcgcggccacctcatggacatcgagtgcctggccagcgacggcatgctgctggtgagctgctgcctggcaggccacgtctgcgtgtgggacgcgcagaccggggattgcctaacgcgcattccgcgcccagggcagcgccgggacagtggcgtgggcagcgggcttgaggctcaggagagctgggaacgactttcagatggtgggaaggctggtccagaggagcctggggacagccctcccctgagacaccgcccccggggccctccgccgccttccctcttcggggaccagcctgacctcacctgcttaattgacaccaacttttcagcgcagcctcggtcctcacagcccactcagcccgagccccggcaccgggcggtctgtggccgctctcgggactccccaggctatgacttcagctgcctggtgcagcgggtgtaccaggaggaggggctggcggccgtctgcacaccagccctgcgcccaccctcgcctgggccggtgctgtcccaggcccctgaggacgagggtggctcccccgagaaaggctccccttccctcgcctgggcccccagtgccgagggttccatctggagcttggagctgcagggcaacctcatcgtggtggggcggagcagcggccggctggaggtgtgggacgccattgaaggggtgctgtgctgcagcagcgaggaggtctcctcaggcattaccgctctggtgttcttggacaaaaggattgtggctgcacggctcaacggttcccttgatttcttctccttggagacccacactgccctcagccccctgcagtttagagggaccccagggcggggcagttcccctgcctctccagtgtacagcagcagcgacacagtggcctgtcacctgacccacacagtgccctgtgcacaccaaaaacccatcacagccctgaaagccgctgctgggcgcttggtgactgggagccaagaccacacactgagagtgttccgtctggaggactcgtgctgcctcttcacccttcagggccactcaggggccatcacgaccgtgtacattgaccagaccatggtgctggccagtggaggacaagatggggccatctgcctgtgggatgtactgactggcagccgggtcagccatgtgtttgctcaccgtggggatgtcacctcccttacctgtaccacctcctgtgtcatcagcagtggcctggatgacctcatcagcatctgggaccgcagcacaggcatcaagttctactccattcagcaggacctgggctgtggtgcaagcttgggtgtcatctcagacaacctgctggtgactggcggccagggctgtgtctccttttgggacctaaactacggggacctgttacagacagtctacctggggaagaacagtgaggcccagcctgcccgccagatcctggtgctggacaacgctgccattgtctgcaactttggcagtgagctcagcctggtgtatgtgccctctgtgctggagaagctggactgagcgcagggcctccttgcccaggcaggaggctggggtgctgtgtgggggccaatgcactgaacctggacttgggggaaagagccgagtatcttccagccgctgcctcctgactgtaataatattaaactttttt

SEQ ID NO: 29958 - DNA, 550 bp, Homo sapiens
  source 1..550: mol_type = unassigned DNA
agagtccggtgggaactgggttttaggaggaggtatctgaagaatgtgtagtgggtcgggggctggtgcggtcagaagggccacctctaatttctgccttgcattggtgactagatctgcactttctggaactcccagagaagtttgctggtgcctttgagggcaggtacagggcctgccttatccaggtacctgcacatgttgttctttgtcagtgctgtcaagtgtgtgccagggtgatccatggtcactttccgggatggcagcaaggtgacttcggctgaggatgaccctgactgaaaggctgcgtgagaagatatctcgggccttctacaaccatgggctcctctgtgcatcctatcccatccccatcatcctcttcacagggttctgcatcttagcctgctgctacccactgctgaaactccccttgccaggaacaggacctgtggaattcaccacccctgtgaaggattactcgcccccacctgtggactctgaccgcaaacaaggagagcctactgagcagcctgagtgggtgggtactcgt

SEQ ID NO: 29959 - DNA, 706 bp, Homo sapiens
  source 1..706: mol_type = unassigned DNA
agagagagagagagagagagagagagtgtgtgtgtgtgtgtgtgtgtgtgtgtgtgtgtgtgtgtgtgtattttgggattgaggtcactagaccttgcatataggcattctgaaaccattccccagccacataactatcgcctccctccagcagccctagtgtgcagagccaagtactctttgttaactggcttttctcccttcttaccaggtacctgcacatgttgttctttgtcagtgctgtcaagtgtgtgccagggtgatccatggtcactttccgggatggcagcaaggtgacttcggctgaggatgaccctgactgaaaggctgcgtgagaagatatctcgggccttctacaaccatgggctcctctgtgcatcctatcccatccccatcatcctcttcacagggttctgcatcttagcctgctgctacccactgctgaaactccccttgccaggaacaggacctgtggaattcaccacccctgtgaaggattactcgcccccacctgtggactctgaccgcaaacaaggagagcctactgagcagcctgagtggtatgtgggtgccccggtggcttatgtccagcagatatttgtgaagtcctcagtgtttccctggcacaagaacctcctggcagtagatgtatttcgttcacctttgtcccgggcattccaactggtggaggagatccggaaccacg

SEQ ID NO: 29960 - DNA, 3422 bp, Homo sapiens
  source 1..3422: mol_type = unassigned DNA
acccggcggccaggagagagagggagggcgccacgcaccggactgcgggccgagagcgcgcacgccgcgctccgcccctgctgccgcccccgtcgccgccgccgccgccgccgcagcttgggaggtgctgccaccacaggtacctgcacatgttgttctttgtcagtgctgtcaagtgtgtgccagggtgatccatggtcactttccgggatggcagcaaggtgacttcggctgaggatgaccctgactgaaaggctgcgtgagaagatatctcgggccttctacaaccatgggctcctctgtgcatcctatcccatccccatcatcctcttcacagggttctgcatcttagcctgctgctacccactgctgaaactccccttgccaggaacaggacctgtggaattcaccacccctgtgaaggattactcgcccccacctgtggactctgaccgcaaacaaggagagcctactgagcagcctgagtggcgagattttcccctaccttgtggtggttattgggttagagaatgtgttggtgctcaccaagtctgtggtctcaaccccggtagacctggaggtgaagctgcggatcgcccaaggcctaagcagcgagagctggtccatcatgaagaacatggccacggagctgggcatcatcctcatcggctacttcaccctagtgcccgccatccaggagttctgtctctttgctgtcgtggggctggtgtctgacttcttccttcagatgctgtttttcaccactgtcctgtccattgacattcgccggatggagctagcagacctgaacaagcgactgccccctgaggcctgcctgccctcagccaagccagtgggacagccaacgcgctacgagcggcagctggctgtgaggccgtccacaccccacaccatcacgttgcagccgtcttccttccgaaacctgcggctccccaagaggctgcgtgttgtctacttcctggcccgcacccgcctggcacagcgcctcatcatggctggcaccgttgtctggattggcatcctggtatacacagacccagcagggctgcgcaactacctcgctgcccaggtgacggaacagagcccattgggtgagggagccctggctcccatgcccgtgcctagtggcatgctgccccccagccacccggaccctgccttctccatcttcccacctgatgcccctaagctacctgagaaccagacgtcgccaggcgagtcacctgagcgtggaggtccagcagaggttgtccatgacagcccagtcccagaggtaacctgggggcctgaggatgaggaactttggaggaaattgtccttccgccactggccgacgctcttcagctattacaacatcacactggccaagaggtacatcagcctgctgcccgtcatcccagtcacgctccgcctgaacccgagggaggctctggagggccggcaccctcaggacggccgcagtgcctggcccccaccggggcccatacctgctgggcactgggaagcaggacccaagggcccaggtggggtgcaggcccatggagacgtcacgctgtacaaggtggcggcgctgggcctggccaccggcatcgtcttggtgctgctgctgctctgcctctaccgcgtgctatgcccgcgcaactacgggcagctgggtggtgggcccgggcggcggaggcgcggggagctgccctgcgacgactacggctatgcgccacccgagacggagatcgtgccgcttgtgctgcgcggccacctcatggacatcgagtgcctggccagcgacggcatgctgctggtgagctgctgcctggcaggccacgtctgcgtgtgggacgcgcagaccggggattgcctaacgcgcattccgcgcccagggcagcgccgggacagtggcgtgggcagcgggcttgaggctcaggagagctgggaacgactttcagatggtgggaaggctggtccagaggagcctggggacagccctcccctgagacaccgcccccggggccctccgccgccttccctcttcggggaccagcctgacctcacctgcttaattgacaccaacttttcagcgcagcctcggtcctcacagcccactcagcccgagccccggcaccgggcggtctgtggccgctctcgggactccccaggctatgacttcagctgcctggtgcagcgggtgtaccaggaggaggggctggcggccgtctgcacaccagccctgcgcccaccctcgcctgggccggtgctgtcccaggcccctgaggacgagggtggctcccccgagaaaggctccccttccctcgcctgggcccccagtgccgagggttccatctggagcttggagctgcagggcaacctcatcgtggtggggcggagcagcggccggctggaggtgtgggacgccattgaaggggtgctgtgctgcagcagcgaggaggtctcctcaggcattaccgctctggtgttcttggacaaaaggattgtggctgcacggctcaacggttcccttgatttcttctccttggagacccacactgccctcagccccctgcagtttagagggaccccagggcggggcagttcccctgcctctccagtgtacagcagcagcgacacagtggcctgtcacctgacccacacagtgccctgtgcacaccaaaaacccatcacagccctgaaagccgctgctgggcgcttggtgactgggagccaagaccacacactgagagtgttccgtctggaggactcgtgctgcctcttcacccttcagggccactcaggggccatcacgaccgtgtacattgaccagaccatggtgctggccagtggaggacaagatggggccatctgcctgtgggatgtactgactggcagccgggtcagccatgtgtttgctcaccgtggggatgtcacctcccttacctgtaccacctcctgtgtcatcagcagtggcctggatgacctcatcagcatctgggaccgcagcacaggcatcaagttctactccattcagcaggacctgggctgtggtgcaagcttgggtgtcatctcagacaacctgctggtgactggcggccagggctgtgtctccttttgggacctaaactacggggacctgttacagacagtctacctggggaagaacagtgaggcccagcctgcccgccagatcctggtgctggacaacgctgccattgtctgcaactttggcagtgagctcagcctggtgtatgtgccctctgtgctggagaagctggactgagcgcagggcctccttgcccaggcaggaggctggggtgctgtgtgggggccaatgcactgaacctggacttgggggaaagagccgagtatcttccagccgctgcctcctgactgtaataatattaaactttttt

SEQ ID NO: 29961 - DNA, 1295 bp, Homo sapiens
  source 1..1295: mol_type = unassigned DNA
gacgtcagagaccaatggctgcggccgcagctgcggcgctggaatcctggcaggcggcggctccgcggaagaggcgctccgcggctcgacggccgcggcggagggaggcggcgccccgggggagagaggcggcgccccgggggagagaggcggcgccccggggccccgaggcggagttcgagtctgacagcggagtcgtgcttcgtcgcatctgggaggctgagaaggacctgtttatctctgatttctggagttcagcactagaaaccatcaatagatgtctcacaaaacatctggaacaactgaaggcccctgtggggactctttcagacatctttggaaacctgcatcttgactcattgccagaggagtcagatgtggccactgattctatcccaagagagatcttggtcacaggaacctgccatttgaagtgtgtgtgttacggcattgggaactttgccacctgcatcgtagctagaaaccagctaacgtttttgctgcttttgttggaaaagtgccagattcccagaagtcactgttgggtatatgaccctctgtttagccaacttgaaattgaagtccttaacacccttggtgtgactgttctcagtgagaacgaggaagggaaacggagtattcgcggggagcctaccatcttttacatgctccattgtgggacggccttgtacaacaatcttttatggagtaactggtcagtagatgccctttctaagatggtcatcattgggaacagtttcaaaggacttgaggagaggttgttggcaaggattctgcagaaaaattatccctacattgcaaagattttaaaaggactggaggagcttgagtttcctcagacttcacaatacatggacatatttaatgatacctctgtccactggttccctgtgcaaaagctagaacagctctccatagatatttgggagtttcgggaagaaccagattatcaggactgtgaggaccttgaaatcatcaggaacaagagagaagatccttctgctactgactgaactcgttgtgaggtactcagtgttggctgaggtagaagctgccaccagagactaaagggaaggctgctatggaggaactacagagaactcctttgccaggaaagaacatcaacttggctgtcctgttttgaggacgataccccacatgaggacttggtataaagattcctgccctacgtggcattgtcccattttacatccttccctcatgacctggcctgatgtggagtagctcctgagtaaagaagttacccttttgaa

SEQ ID NO: 29962 - DNA, 4108 bp, Homo sapiens
  source 1..4108: mol_type = unassigned DNA
ccggccgtctatgctccaggccctctcctcgcggtgccggtgaacccgccagccgccccgatgtacagcatgatgatggagaccgacctgcactcgcccggcggcgcccaggcccccacgaacctctcgggccccgccggggcgggcggcggcgggggcggaggcgggggcggcggcggcggcgggggcgccaaggccaaccaggaccgggtcaaacggcccatgaacgccttcatggtgtggtcccgcgggcagcggcgcaagatggcccaggagaaccccaagatgcacaactcggagatcagcaagcgcctgggggccgagtggaaggtcatgtccgaggccgagaagcggccgttcatcgacgaggccaagcggctgcgcgcgctgcacatgaaggagcacccggattacaagtaccggccgcgccgcaagaccaagacgctgctcaagaaggacaagtactcgctggccggcgggctcctggcggccggcgcgggtggcggcggcgcggctgtggccatgggcgtgggcgtgggcgtgggcgcggcggccgtgggccagcgcctggagagcccaggcggcgcggcgggcggcggctacgcgcacgtcaacggctgggccaacggcgcctaccccggctcggtggcggcggcggcggcggccgcggccatgatgcaggaggcgcagctggcctacgggcagcacccgggcgcgggcggcgcgcacccgcacgcgcaccccgcgcacccgcacccgcaccacccgcacgcgcacccgcacaacccgcagcccatgcaccgctacgacatgggcgcgctgcagtacagccccatctccaactcgcagggctacatgagcgcgtcgccctcgggctacggcggcctcccctacggcgccgcggccgccgccgccgccgctgcgggcggcgcgcaccagaactcggccgtggcggcggcggcggcggcggcggccgcgtcgtcgggcgccctgggcgcgctgggctctctggtgaagtcggagcccagcggcagcccgcccgccccagcgcactcgcgggcgccgtgccccggggacctgcgcgagatgatcagcatgtacttgcccgccggcgaggggggcgacccggcggcggcagcagcggccgcggcgcagagccggctgcactcgctgccgcagcactaccagggcgcgggcgcgggcgtgaacggcacggtgcccctgacgcacatctagcgccttcgggacgccggggactctgcggcggcgacccacgagctcgcggcccgcgcccggctcccgccccgccccggcgcggcgtggcttttgtacagacgttcccacattcttgtcaaaaggaaaatactggagacgaacgccgggtgacgcgtgtcccccactcaccttccccggagaccctggcgaccgccgggcgctgacaccagacttgggttttagactgaacttcggtgttttcttgagactttttgtacagtatttatcacctacggaggaagcggaaagcgttttctttgctcgaggggacaaaaaagtcaaaacgaggcgagaggcgaagcccacttttgtataccggccggcgcgctcactttcctccgcgttgcttccggacggcgccgaccgccggagcccaagtgacgcggagctcgtcgcatttgttataaatgtagtaaggcaggtccaagcacttacaagttttttgtagttgttaccgctcttttgggttggtttgttaatttatacaaagagattaccaccaccaccccctccttcagacggcggagttatattctgggttttgtaaaactttatgtatctgagcatttccatttttttttttgggttttgtattatttcttgtaaatgcattgtgaaaaattttattttcggcgttgcaatgcggggaggagaagtcagattatgtacatagttttctaaaaagcctttcttctaaaaacgaaaaaagaccccccacccaaaatgtttcgagtcaacaaatttaagagacagagcccattttctccataaatttgtaacatgctatttttatgtgcatgttttatgagttcaaaatgcaatgaggaaatctgacagggaaattatctgtatgaactaaaagtaagggaaccccggggaatgggaggacaggatttttcaaggaacctttttcaatgaaagagaaggaagttaaaacctataggttattttgtagagctgagtgttaatacgggccgagaaataaaagtatcttctgctccggctgtttcactgcggacggctggggctgctgcgcgttaccttgctgcaagcggggcgccttccacctggctgggggtctgcgccacagtttggtccagaggagggaggaggaagggaagaccccagtggtgggaccctggaccaggccatggatgaaggacaaagaccagggcaggtcacgggtttcccaattccccagcaattaagatttcgagcagaatttatctaaatgtgtttcaaggaaacacaatcgctgaaccaaaacgtactgcagccgagccccctccgtccatcctctgcccctccccctggcttctttctcttgggaaaacgggcaaaataattgtgctggattctcacacacacagaaatatcgaccatcaccctcccccgcgtgaactgggatgcaagttgctaaccgatgtgaacgcaaaatgccttgttcattattcctgacgagatcttgaggttgtttgatgctttaaattttttaattatattattttctaggtgtttattggtacattgcagttttttttttgaaatttaaaaatttctgtaaaactttgtcttcaagtaatctgacagcattaaatattgcatttaaaaattatactgtagcaaatacatttaaaaattaatcacaacgttaagatgaaattatatttttggaaaaaaaaaacacttgaagcccagatggaaatacgtttatttcagcagccttaggtttcccctcgctttctcaacacccttccttgtcctggagtatggactgtccgtccaaaagtgagcctatgctataagtttaatgagaaccgaattcagcctgcattcgagaatagctttaagtataatgctgatctgacaattgacgtgtaatttgggaagtcattttgataattttgcttaaaccactcattcgttaaagtgattacaaaaaagttcaagaatgatgtccactgctttctaacaagataataaaccccccccctcttttctttttctttatttttatttcttttagctatttgatcctttctgaagcagttgtttctggaagagtctgtgcgcccatggatggctgagcaccactacgacttagtccgggataagggcctccccagtcctctccgggagatgatttgggaaattttataatgcttgttctgttaactcaccgggaccttgagggtccaatgggaccttgagggttttctctgaaatatacaaacttaaaggactctctctgaggttctttgactgacgtccactctcagtctggcccctgtgctcccctgtgtgtaccctggagtttctgtgtccaattgttggcatctaggtcttggctcaagattaggatgtgggccccactttagaggcacagactatgaaaagctgagttagtgcgcccgggacgccaggcaagcagcttttacagtttggcatcttattgcaggtgcttcgtgcacagtcagctgaaatagccaatgccaggtgctccaaccaccttatttccttgttttgttgattagaacaacacagaaaaaagcaaatataaatttttaatgactccatttaaaaatatcacagggtgggggcaaggaaattagctgagattcatctcaggattgagattctatccccccttccccgcccccagcagtgtcgctccaattcaaattagtggagaaaagattacagtaggccctgagccgactgtgaattcggtgcttggccaaggtaacactcatcgtattcacggagtgaaatactatatgatgatagttattatattatatgacgacttcattcacttcccaaatcacagggt

SEQ ID NO: 29963 - DNA, 8718 bp, Homo sapiens
  source 1..8718: mol_type = unassigned DNA
acctccgcacgagacccagcggcccgggttggagcgtccagccctgcagcggatcatggtgcagcaggcggagagcttggaagcggagagcaacctgccccgggaggcgctggacacggaggagggcgaattcatggcttgcagcccggtggccctggacgagagcgacccagactggtgcaagacggcgtcgggccacatcaagcggccgatgaacgcgttcatggtatggtccaagatcgaacgcaggaagatcatggagcagtctccggacatgcacaacgccgagatctccaagaggctgggcaagcgctggaaaatgctgaaggacagcgagaagatcccgttcatccgggaggcggagcggctgcggctcaagcacatggccgactaccccgactacaagtaccggccccggaaaaagcccaaaatggacccctcggccaagcccagcgccagccagagcccagagaagagcgcggccggcggcggcggcgggagcgcgggcggaggcgcgggcggtgccaagacctccaagggctccagcaagaaatgcggcaagctcaaggcccccgcggccgcgggcgccaaggcgggcgcgggcaaggcggcccagtccggggactacgggggcgcgggcgacgactacgtgctgggcagcctgcgcgtgagcggctcgggcggcggcggcgcgggcaagacggtcaagtgcgtgtttctggatgaggacgacgacgacgacgacgacgacgacgagctgcagctgcagatcaaacaggagccggacgaggaggacgaggaaccaccgcaccagcagctcctgcagccgccggggcagcagccgtcgcagctgctgagacgctacaacgtcgccaaagtgcccgccagccctacgctgagcagctcggcggagtcccccgagggagcgagcctctacgacgaggtgcgggccggcgcgacctcgggcgccgggggcggcagccgcctctactacagcttcaagaacatcaccaagcagcacccgccgccgctcgcgcagcccgcgctgtcgcccgcgtcctcgcgctcggtgtccacctcctcgtccagcagcagcggcagcagcagcggcagcagcggcgaggacgccgacgacctgatgttcgacctgagcttgaatttctctcaaagcgcgcacagcgccagcgagcagcagctggggggcggcgcggcggccgggaacctgtccctgtcgctggtggataaggatttggattcgttcagcgagggcagcctgggctcccacttcgagttccccgactactgcacgccggagctgagcgagatgatcgcgggggactggctggaggcgaacttctccgacctggtgttcacatattgaaaggcgcccgctgctcgctctttctctcggagggtgcagagctgggttccttgggaggaagttgtagtggtgatgatgatgatgataatgatgatgatgatggtggtgttgatggtggcggtggtagggtggaggggagagaagaagatgctgatgatattgataagatgtcgtgacgcaaagaaattggaaaacatgatgaaaattttggtggagttaaagtgaaatgagtagtttttaaacatttttcctgtcctttttttgtcccccctcccttcctttatcgtgtctcaaggtagttgcatacctagtctggagttgtgattattttcccaaaaaatgtgtttttgtaattactatttctttttcctgaaattcgtgattgcaacaaaggcagagggggcggggcgggggaggggaggtaggacccgctccggaaggcgctgtttgaagcttgtcggtctttgaagtctggaagacgtctgcagaggacccttttggcagcacaactgttactctagggagttggtggagatatttttttttcttaagagaacttaaagaactggtgatttttttttaacaaaaaaagggaccattgcaacttttgttaatttaattttttttttttttttttttttttttttttttggagggagaaaactgatgtcttctatgcatccgattcttaacaaaactgcagggagcttgaaaaaatgcagactgtacaaacgcttacaaaaaaaaaaactgtgaactgacttaagatcagagtttacttttcagatcaaattgtttatggttttacaaatgtgatttctacttgccaactttttttttgtaacttgttcccttatacctccttgattgaataccagacagcctagacctcagtacaaaaggtattgaaacatttttgatacataacagacctcagtcttttttaaaaattaatatattttcaggcgtatttttgtacagtgaaaagggaacattcttgctgtgttttttcagtaagactttcaggcacttcttcccttttgatttcttttttttcctctgttttttagcatgcaagtatgttggtacgttatgtcctggtttaaaaaggattaaaattttaaaataatccttgcatctaaaggccttgtggtttaaaaaaaaaaagcaaacttttttttgtacagctatagtagagatttgttcaatatttgtaggtaaagatttattgaaaatggtgatatagacctcagagctgttatcttagtttaaagattgtatatgtactgtactatagtaggactttatgtatctcatacgctgtgatgtggatggggccccagatggaaggtttgaaactggattctcgatttttagcaaaaaagaaaaaaaaaaggcacatagtttaaaaagtttctcattttgtgcaatataatctaaataaagtacagaccatctgcatattttgtagcaaatggtggcaaagcagactcaatgcactgtcgacatcattgcctgtttttttttttttttttttgtgctggaagtctgtatcttgacaattttaataaatcagctggaactgatagaaactcgcatcgccaatagtctctatggaagtcaaactggaggtcctgttgtcgcagagcattcggtggtgaggctgttgtgtgcgcggatgaggggaggtggcaggagagaattctacatttagggggttaggctgaaaagtgttcaattagcaggctgatttctttttcctcttccgctagttgtgaaagacaggggaagggtgttctttctctctgccctccctttccatctccagctccccatttcctttctcacctcctcctccactccctgcctcttctccccacccatcctggcgggcgggctgcgcggaggctcgggagctggccggggaggggcggatggaggggcctgggttgccagctcccttggtcggggtcctgctcgctggggcttgtgtgttctctgcggcgggccgcgtccccgctgagcctcgcggtgacagccgcctttggcagcgagcgctcggggcacttctatccccgcctctcaaagggtggggacagccgtttccagatttgaattttttctgttctttatttttaacgctgcatcttcgcgtgtgctcagaggtggttgttggcggagaacgccgccgcagtgtttgacctctagcggtgaagggggaaggggaagaggaaaggagagaagtggtcggtgtctgtttccttctgtcccccggggccgtggagctgtcggagggaaggaggacggtgcggggccgcagggggcgcggggcgcggcgggacccaggctacgagcgggagggaggcgggagtcgggggaagacgcggcaggccggccgagggcaccccgaggaacatggcatggcctctgtgcgatccgagtcgcggtctccggggtgcctgggagggccgaaccactggtgagggcgtggggagcagggggtggcagagggcacccgggcggtagtccgggacgcgcaaggcagagccctgacgctccgggtccccgtgcctggctcttcttgcctcgccaccgcgtgctcctgggcgcgccccgccgcgggcccttgaggcgcgcggagacaccagcgctggcttcccgggcccgcgggccggggagggaagcctcggggctgcggggtgagaggaagaaagcaaacccggggagcaggcggctgccgcacccgcgcaccccgggccctcaccacgccctccccgcgcgccggctcaggggctgccccggaatcagctccccggggccgccgcaacgaaggtggatccgcatcttgattgttctccgggagcctcctgggggctccggcggcggcgcgggcgcgacccatcccgctggcgctccccgctcgctgaaccccgtttgcctgtccacaccccctcgctccccaccatttttcctgaccggcctgtgtccccgagccctcgcggcaggcccgagcaggcgatcgcggccgggcacgcgcgccccgggctcccgccccccttccgagcatccgccgcctcttttctgctgggtctgggaggagggaggctgggaggccgctcggggcccagcgtgccagccccggagttcagcctcccgagctgcggcgcccgcagcggaggaggttttcagtggctgattgaaactcactgcaaaatcaccacgactctttcacctactgagatgattgaccgaggtttggccttccatttttactgagatttggcgagaccgaatggaagcgtccgcacagtaactgcagctgctaggccagaggggccccggcgcccttcccgcctcccctcccgcttgcttttgccttactcgatcttaccaccacccctcccccggccccccgactgagaactcgggcctctcacccgccccccagcctcccgctctgggcgagcctcctccccagcccccacccctgggatgcgaagccagcaagcttttgctgcagatggacaggtttcttttctgtggctttttcctttcgataaaccatcagatttcagtagtacatttgggaaaagaaggggctgatggcgttaaccaggttctcaatatagaactggatttctggagttgtttaccttaccccacaccccctcaacatgtagactaatgcagccattggtggtacatttattttagccacggataattgaaccagcggtttacaattgacacgtgctccgtgctggtgattttatgtggcagccctctgctgcagttccgaaacttgttggcaacgtaaacccattgataggctgatctatgtattttgaaagcctgaaaacttggcatgtcttttctgttttaatcatagatgaatcttggacattttctgtggtgaggtggaaactttaagtaaattagtaaagtaataatttggcttcagaatgggaagagatagtcaagattttttttttttaaagccatgtggcctaacttgatacaaaaataaaagtaattgtttggcaatctaaatttaaaacctgttagaactcaggacaggcgcttcaatgcgctttttaacaatatttaaggctgttttgatgagtgcgttgtgagaatcatcttaatgaattctttattgagtgtctaaaacatagtataatacacatggtattcttgccactggatagtcttcaataaaagtttaattgatttttttttgttggtctcttaagtaagtcttatttttaactaagcattgacagaatatcttaaaatggtaacctgggggtggcgggtgggtgctgtgtgcacggcagcctagccagtggggatcctgctgtttattataagtagttcacagactctgatggcattttggtaagctttccatctttaagaaattgaaccagcattctcttattaattctttaaactgtggaagtaatttccagttcttacactctgatacgcatcccttttatttaaaaaaaaaaaaaatgctaataaaaggcagtgtacttaaactgtgctttgcaaatattgtgtatgttatgaatgactacagacactgggcaaattatttgtagaatgattatcctttagctagagaaagaaatcattacaactcttttgggcagagatgtttctttttaatgttaatcaaggggaagtgatttaaatatgcataaatgtagcagtcagggtgatttagttgcttttttcatgaaagaaaaagactcaaaagacaagacttatttttctcttctgggacttgaaatcataatcatctgatattagtacagtacaagaaatttacatttgttttttacttcagaatttaagtgacttttgcccaaggaatttgagaaataaggcaaataagttgctctattttaaagtagtcattcaatataaatatattatatcaatcttaacttttttattctctgatatgattaataatatgtatattcttacttttcttctaatgggcatatgtatccttgtggacactttgagagaggttttcttggactctcccatttatagaatctttatactcttttactgtgtggttccctgcttttaacagatttctgaggcaaatatatttgtgcttttttcttatgtaggaagaccagcgaaaatagtttactgagttgtcaattttatcagtagataagaaactttctttattacagtttcagggaagattttttcaggatatttctcagttattctaagggccaaattttgtaaaatttccattaggaatgtcagtttcaaataccctttgtatagcctaagcctgtgaggataacaagaatgagccttacctatcctaacacagggatttacaagttcccaaagtaaccgtctccatgtaactcttgacatacttttctgagatttggcttatttttattattggttatttctcactgttcattctatttgatttattctacaacatccccttttatttaatgatctggaaaattctgctctttgataacaactcaggatttttttgttcagttttggtttttgccccttcctgtggagcctacattttcaaccacaataaagatgaaacaaaatttatgaaactgagctctcttccattttacttactgctggcttttttttttttttttttccttgattcctaccataccttcgtttttttcattgtacttttttaacactacctatatccattagctgcctaattagttttatctgttccatgtggatgcagtgagtttataagagaatttcacaaacaagtagttttttagtgaacttaaaataaacagaattttaaaggagacctatttttatactcaataaaagcacaaaagtgcagaaagtataaaacggcttacaaagggagacacaagctcataatgttccatgtataaaagtaataactttattgggtagagatattcttacaagatctagcacctctgccagtgcacagataggactgttttaaatgatttgggaacttttggttgcctgcagttgtgaacagagaacttctctacagagaaacaaaccactaaaagcaatatgaccgagttgagatgtggtttccaatgagcaattggtgaatttaagcaacctggatgtgcatatgtggaggctcccgtctcactgtttgatcaaacttcttttatgtagtcacgtagacttgattttttctgctgtgaaaatgaaaaaataaagcaatatgacaaaaagtttaaaaatgcataaaaaataggatttcctctaggctcctcgaagagatttttttaatatgatgcttgtcttactttcttagacacgttacatttccccttccaaaaaaaaaaaaaaggacaactggaagtaatttatcatataaagaattttgatcaaatagatattgacaaagggccctctgtcacatttttcttcatccagcttttgttcaaaaacagtatgcctcctcccttgaatcacatagggagaaacgttatactccattctcattaatttcccattttgtctacttttactcttgtacatatgttgtgggtttaagagtcttttgcatttgttctgtgacacctttttttgaattgactgttttaaaacggaggcctattttttccggtttgggactcctagtggttatggcatcccataatgcttcgtgacggccaccaggacagaaccacctgatgttttagagcagttttcagcatgacactgttaacaagtgtgtattttccaaggccacatgaaacttactttcttagccactccaggtttgggagcagaaaagctgaaaaacccttttgtgtagaagtctgagtggtttgtgggggggaccttttttagagtttgcatgccagcgcacggcctattgctgtgaaacagagagaaggtaaagctacctgaggcagtgcgctggaggatgaagtgtttgatagcactaggggggaaagaaaatgcatggcaaagtttcgtcttctcgtagactatctagcatgcagagtgtagtgtgttgaaacggtgtatgacattgctgtatcaaagttgtaaaattaagcattatttattgaaaactatgtatttttttgtaaaaacctgatcacatagagaatatcagtggcttgtgcttgtgcttcgatctaaccagcttcttgacccacccccccttggtatgcagtgttaatgctcagggttgaaaatagtacactccaatgtctcttttgcaagagtttttcacagaggattacatttgttcaaaagactctaataaaattgtgtgatcaatcttc

SEQ ID NO: 29964 - DNA, 4627 bp, Homo sapiens
  source 1..4627: mol_type = unassigned DNA
ccgcggcggagccagaggctgcaggaagagcccgcgggggcccggagggtgcgattcctcggcccccgcaaaacaatgtgtgttgtgagccaggacgcaacttgccggaggcggcgggggcgcgccgagcccgcctgagaccgcgctgaccttctccccccgccgtccgttgggcccgagcgcccagctcctcgctccccagttcgcgggggccgggccgagccgcggggcggggccgcccctccgtcgccgctgcctcctcccccacccccagccgcggaggatgcggacggcccccggcggcgtctagcggccccgggcccaggcgcgatggtgcagcagcggggcgcgagggccaagcgggacggcgggccgccgcccccgggacccgggccggccgaggagggggcgcgcgagcccggctggtgcaagaccccgagcggccacatcaagaggccgatgaacgcattcatggtgtggtcgcagcacgaacggcggaagatcatggaccagtggcccgacatgcacaacgccgagatctccaagcgcctgggccgccgctggcagctgctgcaggactcggagaagatcccgttcgtgcgggaggcggagcggctgcggctcaagcacatggcggattacccggactacaagtaccggccgcgcaaaaagagcaagggggcgcccgccaaggcgcggccccgcccccccggtggtagcggtggcggcagccggctcaagcccgggccgcagctgcctggccgcgggggccgccgagcagcgggagggcctttggggggcggggcggcggcgcccgaggacgacgatgaagacgacgacgaggagctgctggaagtgcgcctggtcgagaccccggggcgggagctgtggaggatggtcccggcgggacgggccgctcggggacaagcggagcgcgcccaagggccgtcgggcgagggggcggccgccgccgccgccgcctccccgacaccgtcggaggacgaggagccggaggaagaggaggaggaggcggcagcggctgaggaaggtgaagaggagacggtggcgtcgggggaggagtcgctgggctttctgtccaggctgccccctggcccggccggcctggactgcagcgccctggatcgcgacccggacctgcagcctccctcgggcacgtcgcacttcgagttcccggactactgcacccccgaggttaccgagatgatcgcgggggactggcgcccgtctagcatcgcagacctggttttcacctactgagcccaccgtcagcggggcgcgcacgcccccaaaccagctgtttacatacaggaatcaggtattggggcccctcggaggccgaggctggcaccccatctcccgcgcagcctgccccctcctggacgtgcccatcccccctcagatccagacatgcccctcccccgcagacacaccccaaggcagcccaacccccaccccttccccgacacccaagcccctccccacgtcgccccctcctgcacagccaccagcagccagccccctccgatacacctcccgtcctctcctacagacctgcacccctccccccttttgcacacgcccctcctcgtggccggaggacccgccccctcctttgctccggaatctctcctccctcgcccggcccgccttctctgggttaggggggcgatgcggccgggtggcaacgcacgcgcctcctgcgcccctcccttccctggggggaggggcgcaccccttttatccccggagcgctagggcccgcccctccgctggggcccacccccttcgtgcgcatgcttaatgcttctggggaggagggggctggtcccagcggagccgcactcttcgcccgctccgggcaaaagcgggggcgagtgtagagcgatcctgggaaatcctttgatccgggagccctaggtttcctctccagccaacggggcgtcgctgccttaatgggaggagcactcggaagggttggtttgggcctgaaactctcccaagtggcatagccccttttccggtatggggtctcctacacccacgcgcaccacctctccggtcgcgtggctgcctctacagcctacctatacgtccctttttccccccaactgggaattgagaggtaaggtctttctctggaaatccagcagtagaggaagggaccacccaagaaaactaaaaaccaaggcaccttaccagtctgtctggggacaggatccctgctgcaccttccccaccccctcctgggaagtgccccctcacctcagggcacccgcaacctgggctcctccctgagcgcaccggcccttcctgtcacccaggtccaccctcagtactcaagctgcagtatacagcgggaaaaactgaggcactttggtgctaggggtttgggactgaggcgtggagagcagatgtgatggcaggaagactctcgcttttaaacatctggtttgggagagaccatcgacttggccagtgagactgagaatggattccgagtagtgatgggccgtttgcacctcggtttttccacgtgagaaatggggagaacgctgctgttaggaggaagttgtgtccagttcagggtgccctcgggagccctgtccctgttgctgtggcccctctcacgccgccatctctctgccccgccccgcccctccggcctccccacaccccccttgccctcactacctgtatctcaccggcgtgtgttcaccctcccgggtggctcacacactctcattcacacacacaaatctcaggaacaaacggtcccagagtcctccggacccctgcccagggtctctgcaggtctctgccccacgcgttcccgtcgctgacaaagccaccagctgcctcctttaagcttggtgctccggctctgggcctttcttgcgctctattttttttttttttttttttaagaaaaacaacaacaacaaaaaaagacaatgaaaaaaaaaacgtcatgtgagtgaagagatgtcactgtctgtggtcttggagaactagtctcgtagctgaggggtggggtccctctgtctggggcactggcacccacagcaggactccgccagtctgatgccaggactgaataaagtgtatttgccccgaccttgccctgtggttctgcatgtctgtgctcttcctcaaccctccctaaacagtttgccagattcaagtccgtgtgatttgggcccgagctgggtgtcccagggcaagccaccttgcctgtctaggcctctatgtcaggactccctggccttcatgaagaatagcaaactcatccctgtagggaccaggcaggtaacatagacgagtgactctgggtggacagtggtgtcatgacccacttcaaggggcctacctcctgccagttgtgaccctgtgggaatgcagtccacagtggccaggtggccagatttttcaagaaaagctggatggatgtttctgagtcatcttaatttcaaaatgagactcatattttaaaatttctgtgggccaaatgaaacaagtatgcaggcaggtctggtccgagggggctggcttggccatgcctttctgtgcctttaatgaggactaagaagcaagattgggccacactgtctggactcaaagcccagctccaccactgagcacccgtgtgactctttccatatgtataacgtggggataataataatagctgcttcacaggatgaaatgaagtttgaggtgagaagcattcaccatggtgcccatcgtgttactccattgtcagaggaggaaacggggtcaggcaggaaagcaacttaaaggagggcctgcaagcagccagggtcagagacagggcttggttctgcttcctggtgaagcatggcttcggggtgctgcctctccctccctgtttgaatctgcagattgtgttaggcccccagctgagggcctggagtggtgggattggtcccagtgcctggcgcacattggcctgcagagtagattaactgaatgaccaaagagcaacagaagtctagtgattcttgtctttgaggttctgactggtgttttacaactgagtccaaggcttttccctcctttgtccctctgacacccctccccctaattctcatctgtcagatccagtgtattcctaagctgggacaaagcctctgttttcccagtaggagccagggctgagtgtggaaattacagtgactgcttcttctcagcttctctggttgaaagcaagctggcgaagtaagaggaggtagagttgagaaggtgtggaagatagggacagctgcccccagaactcccttcaagggaggacttccccagctatgggaagtgccatcagggtggccgcagctgcagagagccacttcacctgagaccacgcccttcctggggcagcctgtatctggtgtctgagtgaggcatggtataaacacctggtcatttcaatccaacatgggacggacactgacagacagtactcccagcaggcccaggccagccagggcttcgtcaggcctgcagcacaatttgacttcctatgcccaggcctgcttcctcttcttcctcttcttttcacaggtgcttattcctaataaacatcttgcaaccc

SEQ ID NO: 29965 - DNA, 2868 bp, Homo sapiens
  source 1..2868: mol_type = unassigned DNA
tcggcggccgggcggggagcggcgcgcgcgggccgcggcggagccagaggctgcaggaagagcccgcgggggcccggagggtgcgattcctcggcccccgcaaaacaatgtgtgttgtgagccaggacgcaacttgccggaggcggcgggggcgcgccgagcccgcctgagaccgcgctgcctcctcccccacccccagccgcggaggatgcggacggcccccggcggcgtctagcggccccgggcccaggcgcgatggtgcagcagcggggcgcgagggccaagcgggacggcgggccgccgcccccgggacccgggccggccgaggagggggcgcgcgagcccggctggtgcaagaccccgagcggccacatcaagaggccgatgaacgcattcatggtgtggtcgcagcacgaacggcggaagatcatggaccagtggcccgacatgcacaacgccgagatctccaagcgcctgggccgccgctggcagctgctgcaggactcggagaagatcccgttcgtgcgggaggcggagcggctgcggctcaagcacatggcggattacccggactacaagtaccggccgcgcaaaaagagcaagggggcgcccgccaaggcgcggccccgcccccccggtggtagcggtggcggcagccggctcaagcccgggccgcagctgcctggccgcgggggccgccgagcagcgggagggcctttggggggcggggcggcggcgcccgaggacgacgatgaagacgacgacgaggagctgctggaagtgcgcctggtcgagaccccggggcgggagctgtggaggatggtcccggcgggacgggccgctcggggacaagcggagcgcgcccaagggccgtcgggcgagggggcggccgccgccgccgccgcctccccgacaccgtcggaggacgaggagccggaggaagaggaggaggaggcggcagcggctgaggaaggtgaagaggagacggtggcgtcgggggaggagtcgctgggctttctgtccaggctgccccctggcccggccggcctggactgcagcgccctggatcgcgacccggacctgcagcctccctcgggcacgtcgcacttcgagttcccggactactgcacccccgaggttaccgagatgatcgcgggggactggcgcccgtctagcatcgcagacctggttttcacctactgagcccaccgtcagcggggcgcgcacgcccccaaaccagctgtttacatacaggaatcaggtattggggcccctcggaggccgaggctggcaccccatctcccgcgcagcctgccccctcctggacgtgcccatcccccctcagatccagacatgcccctcccccgcagacacaccccaaggcagcccaacccccaccccttccccgacacccaagcccctccccacgtcgccccctcctgcacagccaccagcagccagccccctccgatacacctcccgtcctctcctacagacctgcacccctccccccttttgcacacgcccctcctcgtggccggaggacccgccccctcctttgctccggaatctctcctccctcgcccggcccgccttctctgggttaggggggcgatgcggccgggtggcaacgcacgcgcctcctgcgcccctcccttccctggggggaggggcgcaccccttttatccccggagcgctagggcccgcccctccgctggggcccacccccttcgtgcgcatgcttaatgcttctggggaggagggggctggtcccagcggagccgcactcttcgcccgctccgggcaaaagcgggggcgagtgtagagcgatcctgggaaatcctttgatccgggagccctaggtttcctctccagccaacggggcgtcgctgccttaatgggaggagcactcggaagggttggtttgggcctgaaactctcccaagtggcatagccccttttccggtatggggtctcctacacccacgcgcaccacctctccggtcgcgtggctgcctctacagcctacctatacgtccctttttccccccaactgggaattgagaggtaaggtctttctctggaaatccagcagtagaggaagggaccacccaagaaaactaaaaaccaaggcaccttaccagtctgtctggggacaggatccctgctgcaccttccccaccccctcctgggaagtgccccctcacctcagggcacccgcaacctgggctcctccctgagcgcaccggcccttcctgtcacccaggtccaccctcagtactcaagctgcagtatacagcgggaaaaactgaggcactttggtgctaggggtttgggactgaggcgtggagagcagatgtgatggcaggaagactctcgcttttaaacatctggtttgggagagaccatcgacttggccagtgagactgagaatggattccgagtagtgatgggccgtttgcacctcggtttttccacgtgagaaatggggagaacgctgctgttaggaggaagttgtgtccagttcagggtgccctcgggagccctgtccctgttgctgtggcccctctcacgccgccatctctctgccccgccccgcccctccggcctccccacaccccccttgccctcactacctgtatctcaccggcgtgtgttcaccctcccgggtggctcacacactctcattcacacacacaaatctcaggaacaaacggtcccagagtcctccggacccctgcccagggtctctgcaggtctctgccccacgcgttcccgtcgctgacaaagccaccagctgcctcctttaagcttggtgctccggctctgggcctttcttgcgctctatttttttttttttttttttt

SEQ ID NO: 29966 - DNA, 3579 bp, Homo sapiens
  source 1..3579: mol_type = unassigned DNA
ggcatgtgagcgggaagcctaggctgccagccgcgaggaccgcacggaggaggagcaggagcgcggagccgcgagccccgagccccgagcccggcgcctggctgagtagatgtccatgaggagccccatctctgcccagctggccctggatggcgttggcaccatggtgaactgcaccatcaagtcagaggagaagaaagagccttgccacgaggccccccagggctcagccactgccgctgaacctcagcctggagacccagcccgggcctcccaggatagtgctgacccccaagctccagcccaggggaatttcaggggctcctgggactgtagctctccagagggtaatgggtccccagaacccaagagaccaggagtgtcggaggctgcctctggaagccaggagaagctggacttcaaccgaaatttgaaagaagtggtgccagccatagagaagctgttgtccagtgactggaaggagaggtttctaggaaggaactctatggaagccaaagatgtcaaagggacccaagagagcctagcagagaaggagctccagcttctggtcatgattcaccagctgtccaccctgcgggaccagctcctgacagcccactcggagcagaagaacatggctgccatgctgtttgagaagcagcagcagcagatggagcttgcccggcagcagcaggagcagattgcaaagcagcagcagcagctgattcagcagcagcataagatcaacctccttcagcagcagatccagcaggttaacatgccttatgtcatgatcccagccttccccccaagccaccaacctctgcctgtcacccctgactcccagctggccttacccattcagcccattccctgcaaaccagtggagtatccgctgcagctgctgcacagcccccctgccccagtggtgaagaggcctggggccatggccacccaccaccccctgcaggagccctcccagcccctgaacctcacagccaagcccaaggcccccgagctgcccaacacctccagctccccaagcctgaagatgagcagctgtgtgccccgcccccccagccatggaggccccacgcgggacctgcagtccagccccccgagcctgcctctgggcttccttggtgaaggggacgctgtcaccaaagccatccaggatgctcggcagctgctgcacagccacagtggggccttggatggctcccccaacacccccttccgtaaggacctcatcagcctggactcatccccagccaaggagcggctggaggacggctgtgtgcacccactggaggaagccatgctgagctgcgacatggatggctcccgccacttccccgagtcccgaaacagcagccacatcaagaggcccatgaacgccttcatggtgtgggccaaggatgagcggaggaagatcctgcaagccttcccagacatgcacaactccagcatcagcaagatccttggatctcgctggaagtccatgaccaaccaggagaagcagccctactatgaggaacaggcgcggctgagccggcagcacctggagaagtatcctgactacaagtacaagccgcggcccaagcgcacctgcatcgtggagggcaagcggctgcgcgtgggagagtacaaggccctgatgaggacccggcgtcaggatgcccgccagagctacgtgatccccccgcaggctggccaggtgcagatgagctcctcagatgtcctgtaccctcgggcagcaggcatgccgctggcacagccactggtggagcactatgtccctcgtagcctggaccccaacatgcctgtgatcgtcaacacctgcagcctcagagaggagggtgagggcacagatgacaggcactcggtggctgatggcgagatgtaccggtacagcgaggacgaggactcggagggcgaagagaagagcgatggggagttggtggtgctcacagactgatcccggctgggtgggcctggccccttctcctctggggaagaccttgtcccaactcgatgggcacagccagccaacctaagactatgttggtacttggacttgttcgtgccccagagatgggcaaagctgtgcacttgcagatacattcatgaggggagaggcgccctcccttcctgaggagctgttggcctgggtgggcaggaactgcagtatggccatgggctgagcaggctgagcacctcagcctttagggcttatggccaggggacactgtatgactctcctctcctgcaggtgtctatccacctggggtatggcatctaccgacctgtctccctggggtcacatgctttgtttccattcttgtcctggctggaccagccactgtgggaccaacacccctcccacactcccccagactgctcgtctatcaccaggatcgctttgtactttgtgcaaaagggtctggctgtcccttgctgttttcatctctgccaagcctattgtgcctctggctgctgtatgtgtgcgcgtgcacgtgtgtgtgtttcatctgttcattcactgcacaagatatttattgagtgcccactacgtgccaggcactgttgctgagttcctgtgggtgtgtctctcgatgccactcctgcttctctgggggcctctttctgtgcttctctttgtccccaaattgctacctctttgtcagtctgggtgtctcaggttctgtgtgtccttgtgtgcatttctgtctctctctgtcctcgtctctctgcaaggccctctatttctctctttcttggtgtctgtcctttgccccctgtgccctctggattctctgggtctatgtaggcccctggtctgccctgggctcatcagccttcctgacctcctcctgccctccccttcactccctccctggctctgccagtcggttcccacggagccatttttagctctgatcagcatgggaatgtgcctcggcctccaaggggctttgtcctggtgcccccgcccctggtcccaacctgatcccacgagggagttgggacaggaggattgatggtgctccccttcctgccagcgtcagaggccctggagaggggctgtccatggcagctggtctttattcctccctcatgagcacagggtcgggggggtccccattcttggaagaggttgagaagactcctgggcttcagcctctcccacccagccctgcccctcacctgcctgccctcccctcccccactctatactagggactggatctcagcctctgatcagtttcacaaagtttgttccctaaggaaatcaaatcccattgtcacctaactctgaagatctaaatagcccttggatcagtatgggaaccccaaatcccacagggccagatgtggagtctgtgtctgcccccgtcttctctccatcctcaaagcccccacttctctccaggctgtttctttttttatgactgtaaacatagatagtgctttattttgttaataataagataatgatgagtaacttaaccagcacatttctcctgtttacactcgggggatttttttgttttctgatgacataataaagacagatca

SEQ ID NO: 29967 - DNA, 538 bp, Homo sapiens
  source 1..538: mol_type = unassigned DNA
acgcgggtcgagcttagggtgcacccccaacccgctcctcgccgaccgcagaggactaggtctttctcatcagcccgactatgcgcctagtttaaggatttctcagcgggaagccgaagcgacctgcgcgcgtcctgcgtggggctcaggtgcctgcgacgaggcgcagagctcctccaccatggttgcgtggggtgctgggggacagacgcgctccccttgccacggtttcagggtcgttccccagcggaccagaccagcgcggcatcctgtttgttttctgctccggctgctcctgtcccacccccacccccaccgcaggctgcttcttgctacccccacctcccgccctgggatatcgtaggatgtccatgaggagccccatctctgcccagctggccctggatggcgttggcaccatggtgaactgcaccatcaagtcagaggagaagaaagagccttgccacgaggccccccagggctcagccactgccgctgaacctcagcctggagacccagcccgggcctcccaggatag

SEQ ID NO: 29968 - DNA, 597 bp, Homo sapiens
  source 1..597: mol_type = unassigned DNA
agaactgttgggaggctaatggctgatgatgtctgcggcagcagtgctccatgaatggatgtccatgaggagccccatctctgcccagctggccctggatggcgttggcaccatggtgaactgcaccatcaagtcagaggagaagaaagagccttgccacgaggccccccagggctcagccactgccgctgaacctcagcctggagacccagcccgggcctcccaggatagtgctgacccccaagctccagcccaggggaatttcaggggctcctgggactgtagctctccagagggtaatgggtccccagaacccaagagaccaggagtgtcggaggctgcctctggaagccaggagaagctggacttcaaccgaaatttgaaagaagtggtgccagccatagagaagctgttgtccagtgactggaaggagaggtttctaggaaggaactctatggaagccaaagatgtcaaagggacccaagagagcctagcagagaaggagctccagcttctggtcatgattcaccagctgtccaccctgcgggaccagctcctgacagcccactcggagcagaagaacatggctgccatgct

SEQ ID NO: 29969 - DNA, 818 bp, Homo sapiens
  source 1..818: mol_type = unassigned DNA
tgcagaacccttgcactccctacccccacccacctagccgccgggaccatgtccaaaccttcagaccacatcaagcggcccatgaacgccttcatggtatggtcccggggccagcggcgcaagatggcccaggaaaaccccaagatgcacaactcggagatcagcaaacgcctaggtgccgaatggaagcttctgtccgaggcagagaagcggccatacatcgatgaagccaagcggctacgcgcccagcacatgaaggagcaccctgactacaagtaccgacctcggcgcaagcccaagaacctgctcaagaaggacaggtatgtcttccccttgccctacctgggcgacacggacccgctcaaggcggctggcctgcccgtgggggcctccgacggcctcctgagcgcgcccgagaaagcccgggccttcttgccgccggcctcggcgccctactccctgctggaccccgcgcagtttagctcgagcgccatccagaagatgggcgaagtgccccacaccttggctaccggcgctctgccctacgcgtccaccctgggctaccagaacggcgccttcggcagcctcagctgccccagccagcacacgcacacgcacccgtcccccaccaaccctggctacgtggtgccctgtaactgtaccgcctggtctgcctccaccctgcagccccccgtcgcctacatcctcttcccaggcatgaccaagactggcatagacccttattcgtcagcccacgctacggccatgtaacccccagcccggcccggacctgaggcgtggtctgaaagccgggtctg

SEQ ID NO: 29970 - DNA, 1394 bp, Homo sapiens
  source 1..1394: mol_type = unassigned DNA
ttaaggaggtgcagtcttatgggagggacaggggcggagtcagtctttaaaagctgttcccaggtctggcccgcctgccacaaacgctgagcccaggtgggagaggtctggcctatccgcgcctggcagctgtcggaactccggagaccacaaaggggtttatggtttaccccctccacggaaggtcggtctgatcgcagctgcgggtcggggagagggaccgggggtcccccagtcagtaggcctcagaacacctcttcagtgccggggcaccagacagcggattttgcattcgactctccccaaagtgtgccgaacaggttggaagcaaaggctccggtttaagctctgggcttggggataaaatacactttttaaggacccaagttcctcggcaacgactccagactgggaagacctttccattttcaggatcgacgcttcacgttgaggggagggcattcaggacgccctcttaaggcttctcccaacccatggcgctaccaggctcctcacaggaccaggcctggagcctggagcctccggctgccacggctgctgcctcctcatcttcgggaccccaggagcgggagggcgctgggagccccgcggcccccgggacgctgcccctggagaaggtgaagcggccgatgaacgcgttcatggtgtggagctccgctcagcgccgccagatggcgcagcagaaccccaagatgcacaactccgagatctccaagcgcctgggcgcgcagtggaagctgctggacgaggacgagaagcggcccttcgtggaggaggccaagcggctccgcgcccgacacctgcgcgactaccccgactacaagtaccggcctcggcgcaaggccaagagctcgggcgccggaccttcccgctgcggacagggaagaggcaacctggccagcggcggcccgctctgggggccggggtacgcgaccacccaaccgagcagaggctttgggtacagaccccccagctactcgacagcctacctgcctggcagctatggctcttcccactgcaaactggaagccccctcaccgtgctccctccctcagagtgaccctaggctccagggggaactgctgcccacctatacccactacctgccccctggctctcccactccatacaaccctccccttgctggtgcccccatgcccctaacccacctctaaccctcatggacgcagacctcacgggacgggcctcatcctccttttttaatccagcagcatcccctaccccaggctgtcaaccctttctcctgttggactacagttcagaggcagcctgcagtcctcccatgatagccagggagagccgcacaacatacaattatatttttggtagtattaaacagttttgtattattc

SEQ ID NO: 29971 - DNA, 1048 bp, Homo sapiens
  source 1..1048: mol_type = unassigned DNA
gggagaggtctggcctatccgcgcctggcagctgtcggaactccggagaccacaaaggggtttatggtttaccccctccacggaaggatcgacgcttcacgttgaggggagggcattcaggacgccctcttaaggcttctcccaacccatggcgctaccaggctcctcacaggaccaggcctggagcctggagcctccggctgccacggctgctgcctcctcatcttcgggaccccaggagcgggagggcgctgggagccccgcggcccccgggacgctgcccctggagaaggtgaagcggccgatgaacgcgttcatggtgtggagctccgctcagcgccgccagatggcgcagcagaaccccaagatgcacaactccgagatctccaagcgcctgggcgcgcagtggaagctgctggacgaggacgagaagcggcccttcgtggaggaggccaagcggctccgcgcccgacacctgcgcgactaccccgactacaagtaccggcctcggcgcaaggccaagagctcgggcgccggaccttcccgctgcggacagggaagaggcaacctggccagcggcggcccgctctgggggccggggtacgcgaccacccaaccgagcagaggctttgggtacagaccccccagctactcgacagcctacctgcctggcagctatggctcttcccactgcaaactggaagccccctcaccgtgctccctccctcagagtgaccctaggctccagggggaactgctgcccacctatacccactacctgccccctggctctcccactccatacaaccctccccttgctggtgcccccatgcccctaacccacctctaaccctcatggacgcagacctcacgggacgggcctcatcctccttttttaatccagcagcatcccctaccccaggctgtcaaccctttctcctgttggactacagttcagaggcagcctgcagtcctcccatgatagccagggagagccgcacaacatacaattatatttttggtagtattaaacagttttgtattattc

SEQ ID NO: 29972 - DNA, 2342 bp, Homo sapiens
  source 1..2342: mol_type = unassigned DNA
gcagtgtcactaggccggctgggggccctgggtacgctgtagaccagaccgcgacaggccagaacacgggcggcggcttcgggccgggagacccgcgcagccctcggggcatctcagtgcctcactccccaccccctcccccgggtcgggggaggcggcgcgtccggcggagggttgaggggagcggggcaggcctggagcgccatgagcagcccggatgcgggatacgccagtgacgaccagagccagacccagagcgcgctgcccgcggtgatggccgggctgggcccctgcccctgggccgagtcgctgagccccatcggggacatgaaggtgaagggcgaggcgccggcgaacagcggagcaccggccggggccgcgggccgagccaagggcgagtcccgtatccggcggccgatgaacgctttcatggtgtgggctaaggacgagcgcaagcggctggcgcagcagaatccagacctgcacaacgccgagttgagcaagatgctgggcaagtcgtggaaggcgctgacgctggcggagaagcggcccttcgtggaggaggcagagcggctgcgcgtgcagcacatgcaggaccaccccaactacaagtaccggccgcggcggcgcaagcaggtgaagcggctgaagcgggtggagggcggcttcctgcacggcctggctgagccgcaggcggccgcgctgggccccgagggcggccgcgtggccatggacggcctgggcctccagttccccgagcagggcttccccgccggcccgccgctgctgcctccgcacatgggcggccactaccgcgactgccagagtctgggcgcgcctccgctcgacggctacccgttgcccacgcccgacacgtccccgctggacggcgtggaccccgacccggctttcttcgccgccccgatgcccggggactgcccggcggccggcacctacagctacgcgcaggtctcggactacgctggccccccggagcctcccgccggtcccatgcacccccgactcggcccagagcccgcgggtccctcgattccgggcctcctggcgccacccagcgcccttcacgtgtactacggcgcgatgggctcgcccggggcgggcggcgggcgcggcttccagatgcagccgcaacaccagcaccagcaccagcaccagcaccaccccccgggccccggacagccgtcgccccctccggaggcactgccctgccgggacggcacggaccccagtcagcccgccgagctcctcggggaggtggaccgcacggaatttgaacagtatctgcacttcgtgtgcaagcctgagatgggcctcccctaccaggggcatgactccggtgtgaatctccccgacagccacggggccatttcctcggtggtgtccgacgccagctccgcggtatattactgcaactatcctgacgtgtgacaggtccctgatccgccccagcctgcaggccagaagcagtgttacacacttcctggaggagctaaggaaatcctcagactcctgggtttttgttgttgctgttgttgttttttaaaaggtgtgttggcatataatttatggtaatttattttgtctgccacttgaacagtttgggggggtgaggtttcatttaaaatttgttcagagatttgtttcccatagttggattgtcaaaaccctatttccaagttcaagttaactagctttgaatgtgtcccaaaacagcttcctccatttcctgaaagtttattgatcaaagaaatgttgtcctgggtgtgttttttcaatcttctaaaaaataaaatctggaatcctgcttttttgctctactagtacctctgtcacactagtcttatcaaaaaccagttcttaagatcaatgttaagtttattagttaatgtaaatttctcatcctcgaaaagggtgaacataaatgcctttaaggagtatatctaaaaataaacattaggatatctaagtttgatgtaattgtttcaggaaggaaaaaagaaaagcattctggaatgagcctacttcaagtaatcttagtttctaaaactaacagttaatattttcaattccagtatatcactttaagtagaaggggatgtccaagtaattttggttttctaactgttgaatcataagcttgacctgcccccagaggctttttggatgtttttatctgtgttttgccatctctttacactcctcgacattcagtttaccttaatcttcacatttttacaccttgggaagtggcaagcatcgctgggtttaagataaaggagtcacaaaaactaatcaaaataaaatttgcattatgacaactt

SEQ ID NO: 29973 - DNA, 1723 bp, Homo sapiens
  source 1..1723: mol_type = unassigned DNA
ccaccgccgtccccaccgccatccgccctcccggcctggcctgcccttgcgcccggctccccagtgcccgccgcccgcccgccgcgctcccgcgctccgttccgcccaggccgcgcccagctggaatgcagagatcgccgcccggctacggcgcacaggacgacccgcccgcccgccgcgactgtgcatgggccccgggacacggggccgccgctgacacgcgcggcctcgccgccggccccgccgccctcgccgcgcccgccgcgcccgcctcgccgcccagcccgcagcgcagtcccccgcgcagccccgagccggggcgctatggcctcagcccggccggccgcggggaacgccaggcggcagacgagtcgcgcatccggcggcccatgaacgccttcatggtgtgggcaaaggacgagcgcaagcggctggctcagcagaacccggacctgcacaacgcggtgctcagcaagatgctgggcaaagcgtggaaggagctgaacgcggcggagaagcggcccttcgtggaggaagccgaacggctgcgcgtgcagcacttgcgcgaccaccccaactacaagtaccggccgcgccgcaagaagcaggcgcgcaaggcccggcggctggagcccggcctcctgctcccgggattagcgcccccgcagccaccgcccgagcctttccccgcggcgtctggctcggctcgcgccttccgcgagctgcccccgctgggcgccgagttcgacggcctggggctgcccacgcccgagcgctcgcctctggacggcctggagcccggcgaggctgccttcttcccaccgcccgcggcgcccgaggactgcgcgctgcggcccttccgcgcgccctacgcgcccaccgagttgtcgcgggaccccggcggttgctacggggctcccctggcggaggcgctcaggaccgcgccccccgcggcgccgctcgctggcctgtactacggcaccctgggcacgcccggcccgtaccccggcccgctgtcgccgccgcccgaggccccgccgctggagagcgccgagccgctggggcccgccgccgatctgtgggccgacgtggacctcaccgagttcgaccagtacctcaactgcagccggactcggcccgacgcccccgggctcccgtaccacgtggcactggccaaactgggcccgcgcgccatgtcctgcccagaggagagcagcctgatctccgcgctgtcggacgccagcagcgcggtctattacagcgcgtgcatctccggctaggccgccggcgccgcccgggtccctgcagcgcttcctcccgcagcccccgcgaccgatccgaccgcgtcgctgccgctctgctctctcatacgcgtgtatgtttggttccatgtcacagccccctaggagccagtgatgctcggccttgcgcccgttccacctcccaggccacccttcctgggcttctgggccacctgccctcggggggcccctgcgagggtgcctggagttcccacgtgtcccggggcttttccaggaagcccgagcccaggacctgttggcagagttgccagggttacatttttgaagcacctgctccttttcttgcagtgtattttctacaaccagattgtattaatattttttactttgcccttttaaaaaatatacctaatacaatatatttaatttttaattaaactcttaaacttttcttccaagaa

SEQ ID NO: 29974 - DNA, 2504 bp, Homo sapiens
  source 1..2504: mol_type = unassigned DNA
ctccgcgggcagccaacattgatttcctccgggccgagggcgagggcccgggaggcggcgggctgcagccgcggcagggcgagagcatgtccaagccggtggaccacgtcaagcggcccatgaacgccttcatggtgtggtcgcgggctcagcggcgcaagatggcccaggagaaccccaagatgcacaactcggagatcagcaagcgcttgggcgccgagtggaaactgctcacagagtcggagaagcggccgttcatcgacgaggccaagcgtctacgcgccatgcacatgaaggagcaccccgactacaagtaccggccgcggcgcaagcccaagacgctgctcaagaaggacaagttcgccttcccggtgccctacggcctgggcggcgtggcggacgccgagcaccctgcgctcaaggcgggcgccgggctgcacgcgggggcgggcggcggcctggtgcctgagtcgctgctcgccaatcccgagaaggcggccgcggccgccgccgctgccgccgcacgcgtcttcttcccgcagtcggccgctgccgccgccgctgccgccgccgccgccgccgcgggcagcccctactcgctgctcgacctgggctccaaaatggcagagatctcgtcgtcctcgtccggcctcccgtacgcgtcgtcgctgggctacccgaccgcgggcgcgggcgccttccacggcgcggcggcggcggctgcagcggcggccgccgccgccggggggcacacgcactcgcaccccagcccgggcaacccgggctacatgatcccgtgcaactgcagcgcgtggcccagccccgggctgcagccgccgctcgcctacatcctgctgccgggcatgggcaagccccagctggacccctaccccgcggcctacgctgccgcgctatgaccccgcggggccgcctcgcgaggaccggtgtgcacacgtgtacatatgtataggtacgagcgctgcggcctccccgtgcgccctcccgcgaccgggggcccggtttgtatgtacatagaatgtataggtgccaggtagaggcagagaggccaggcggggcaggagtggccaagcgcgcaagggcgcgggcgagcaggcctgtgaattcgcaggatcatttcagacccgcacttcggcagccaactcgaaagcaggcggttgtgtgcggcagcagttggcgtttgctttgcacttcggaacctgttgcgttttgacccacggaggtggaggagtaactttttgacatgttggcctttccagttttgttggaagtttcatggtcggttttgtttttgtttctcattcttcttcctcgcccctcagccccccaacccccaaccccctcccggtccgtgttgcatgcacgctgttcaaatgtgaggtctgaaatggctggcacacgggaaaagctgcttgtgtcattcgtttctgggagtgggatggctctgagcagcctcgcctccctgtttgtactatttgaactttgcagatctctgttctctcaagcagaactcccaaccagatccattcttgaccagtgaccggctcgaatctggccttttgtgtgagatgatcacggtttcttttgtttatcacgccatttgcaaatcagagcaagagctctttctcaagggcaagaaacgcaaacaagaaatatttgtgagatgaaagttgtcaattggattttcttcctaaacaaacaacaacaacaaactactagaagtctccctgagtccactcgcttggatttctgacacagtttacaaaaaaggaaaaaggcactgctcctattttcccttatggctgagttcaccttaagattgtaaatgtgtatatgtcagtgaaaacattgaggcttggaaaatgtgttattttcgttgccctaagtttgagtcgactttagactcaaaaacattttgagcgaatatcaaagttaacttttaaaaattgcgaaactatttcagaatcgcaattttatcgaagattaaatcagacttttttgtctggtaattatatatttattatttagcaaaactgaagaaaaaaagcacagaattgtttcaacagatgtctctcattttcagctagcatttctctcccaagttgagctggtttaatgtgttttggatttccctcctcaattggcttattttttagatcacctgcaattcatttgcaaattgcaataaaacacattttagaaaaaaggaaccttcaattattagctttgtttctttttaaatgtatatattttgactaatgtttgtgaatgaagttggctaacatgtatttagtttcattttggctttatgtaatataaagtttttaaaattttaaatatggttttaacctttatgtgtaaatgattttctagtgtgaccttctaatttaatattagacgtctaaggtatatctgtaaattagaatccgactatcactctgttcattttttttgaacaaagagtttaaataaagcctgaaccaggg

SEQ ID NO: 29975 - DNA, 2074 bp, Homo sapiens
  source 1..2074: mol_type = unassigned DNA
atgcgacctgttcgagagaactcatcaggtgcgagaagcccgcgggttcctgctgatttggcgcggagcattttgataagcctacccttcccgccggactcgctggcccacaggcccccaagctccgctccgacggagtcccagggccttttcaccgtggccgctccagccccgggagcgccttctcctcccgccacgctggcgcaccttcttcccgccccggcaatgtacagccttctggagactgaactcaagaaccccgtagggacacccacacaagcggcgggcaccggcggccccgcagccccgggaggcgcaggcaagagtagtgcgaacgcagccggcggcgcgaactcgggcggcggcagcagcggtggtgcgagcggaggtggcgggggtacagaccaggaccgtgtgaaacggcccatgaacgccttcatggtatggtcccgcgggcagcggcgcaaaatggccctggagaaccccaagatgcacaattctgagatcagcaagcgcttgggcgccgactggaaactgctgaccgacgccgagaagcgaccattcatcgacgaggccaagcgacttcgcgccgtgcacatgaaggagtatccggactacaagtaccgaccgcgccgcaagaccaagacgctgctcaagaaagataagtactccctgcccagcggcctcctgcctcccggtgccgcggccgccgccgccgctgccgcggccgcagccgctgccgccagcagtccggtgggcgtgggccagcgcctggacacgtacacgcacgtgaacggctgggccaacggcgcgtactcgctggtgcaggagcagctgggctacgcgcagcccccgagcatgagcagcccgccgccgccgcccgcgctgccgccgatgcaccgctacgacatggccggcctgcagtacagcccaatgatgccgcccggcgctcagagctacatgaacgtcgctgccgcggccgccgccgcctcgggctacgggggcatggcgccctcagccacagcagccgcggccgccgcctacgggcagcagcccgccaccgccgcggccgcagctgcggccgcagccgccatgagcctgggccccatgggctcggtagtgaagtctgagcccagctcgccgccgcccgccatcgcatcgcactctcagcgcgcgtgcctcggcgacctgcgcgacatgatcagcatgtacctgccacccggcggggacgcggccgacgccgcctctccgctgcccggcggtcgcctgcacggcgtgcaccagcactaccagggcgccgggactgcagtcaacggaacggtgccgctgacccacatctgagcaccggcctgcgctcgtccacccttgttccccacccccacccccactcccgccccgcacccccaagttgggacgccttgtttagctttgcttgcctgggactgttgccttgtaccgatgatggggagggctgaaagttttgctgtagctgtcgggttttgtacaaaagcaaaaataagtcaggagcagcgaaaatgggacttctagagagctctcttgccccacgccgctgctcctttcacctttgtaggctgggaatcgctgtgttatttgcaaagaaaaaacagcccccactcctcctcctgagttccagggttattctgttacatttgaaaatgttgtcttgttagtttgcagttagccaaggagtgaatgggagaaacatagtatcgggtgaggccagctggagaactgcaacgcctacgcccccagtcgtgtcgcgtctgttttcctcgtggttttttggggcgctgaccgctccaagcagcgcggcagctaaagccaatgttaatttatagccaggtgtgcgtgtgtctcccgcctcgccgcccctggccgcgggacagcttctgtccaatcatgttgagttggtgatttctgccgtgatctgtttgatatttcttcgcgctaatgtgttcagatttcgtttgggtagtggggaggggctactttgtttcagggttttcaagcttttactcttaattcctaaatgagatcaataaattttataacc

SEQ ID NO: 29976 - DNA, 4315 bp, Homo sapiens
  source 1..4315: mol_type = unassigned DNA
gagaaaatcaattggtttagaaggtttggactcacttgacaggttcagttggagacgatcataggtggctgctgtgacaaagggaaattgtgcttttccagcatgcttactgaccctgatttacctcaggagtttgaaaggatgtcttccaagcgaccagcctctccgtatggggaagcagatggagaggtagccatggtgacaagcagacagaaagtggaagaagaggagagtgacgggctcccagcctttcaccttcccttgcatgtgagttttcccaacaagcctcactctgaggaatttcagccagtttctctgctgacgcaagagacttgtggccataggactcccacttctcagcacaatacaatggaagttgatggcaataaagttatgtcttcatttgccccacacaactcatctacctcacctcagaaggcagaagaaggtgggcgacagagtggcgagtccttgtctagtacagccctgggaactcctgaacggcgcaagggcagtttagctgatgttgttgacaccttgaagcagaggaaaatggaagagctcatcaaaaacgagccggaagaaacccccagtattgaaaaactactctcaaaggactggaaagacaagcttcttgcaatgggatcggggaactttggcgaaataaaagggactcccgagagcttagctgagaaagaaaggcaactcatgggtatgatcaaccagctgaccagcctccgagagcagctgttggctgcccacgatgagcagaagaaactagctgcctctcagattgagaaacagcgtcagcaaatggagctggccaagcagcaacaagaacaaattgcaagacagcagcagcagcttctacagcaacaacacaaaatcaatttgctccagcaacagatccaggttcaaggtcagctgccgccattaatgattcccgtattccctcctgatcaacggacactggctgcagctgcccagcaaggattcctcctccctccaggcttcagctataaggctggatgtagtgacccttaccctgttcagctgatcccaactaccatggcagctgctgccgcagcaacaccaggcttaggcccactccaactgcagcagttatatgctgcccagctagctgcaatgcaggtatctccaggagggaagctgccaggcataccccaaggcaaccttggtgctgctgtatctcctaccagcattcacacagacaagagcacaaacagcccaccacccaaaagcaaggatgaagtggcacagccactgaacctatcagctaaacccaagacctctgatggcaaatcacccacatcacccacctctccccatatgccagctctgagaataaacagtggggcaggccccctcaaagcctctgtcccagcagcgttagctagtccttcagccagagttagcacaataggttacttaaatgaccatgatgctgtcaccaaggcaatccaagaagctcggcaaatgaaggagcaactccgacgggaacaacaggtgcttgatgggaaggtggctgttgtgaatagtctgggtctcaataactgccgaacagaaaaggaaaaaacaacactggagagtctgactcagcaactggcagttaaacagaatgaagaaggaaaatttagccatgcaatgatggatttcaatctgagtggagattctgatggaagtgctggagtctcagagtcaagaatttatagggaatcccgagggcgtggtagcaatgaaccccacataaagcgtccaatgaatgccttcatggtgtgggctaaagatgaacggagaaagatccttcaagcctttcctgacatgcacaactccaacatcagcaagatattgggatctcgctggaaagctatgacaaacctagagaaacagccatattatgaggagcaagcccgtctcagcaagcagcacctggagaagtaccctgactataagtacaagcccaggccaaagcgcacctgcctggtggatggcaaaaagctgcgcattggtgaatacaaggcaatcatgcgcaacaggcggcaggaaatgcggcagtacttcaatgttgggcaacaagcacagatccccattgccactgctggtgttgtgtaccctggagccatcgccatggctgggatgccctcccctcacctgccctcggagcactcaagcgtgtctagcagcccagagcctgggatgcctgttatccagagcacttacggtgtgaaaggagaggagccacatatcaaagaagagatacaggccgaggacatcaatggagaaatttatgatgagtacgacgaggaagaggatgatccagatgtagattatgggagtgacagtgaaaaccatattgcaggacaagccaactgataagggtcaaaagattgttgtgaccttaggacttaaagaagccctaactggttcatccttaccagtggccaagcacattaactttctcatacactgactgttactttaactgttagtcttaaatagttgggacatcagctgactaatagacctcagcctcaaaaggcttggaaagaaaaaacaaatacaacaagcaaacaacaatatcaacaacaagagattgaaataagctatgggtaaaataatgccagtaattcagctgctacatccaagcactgaagtcttacccgtcaacttttttttttttttaaataaactttatggctgtttgttctacaatgttctagaaattctcactcaggtacacagtgccaacaagtggcttgtgaatgtgttttgttgttttgtgctacaatttttaaaaagaaaaaagttttgttttgttttttggggtttctgggttttttccttttctttttctttcctttcattttttttctttgtaatgcacctgacagaaaaaaaagaaaaatgaatttctctttacttctctccaccttctccatctctctactttaaagatggaagtctgtgcatgaggggaaagagggaaaaagagcctgtttttaacttccttgctatccaccacaaaataagcaattattttctttagaggactttatctattgcacaccacactacatctttgagcaagtgccaaatttgtactgaagtgttgaccaagttcattttttctctttactttttccttttccttcttaagttaggacagtgttaaatcttagacaatcccttgaaaaacctgaaataccagcagctggtgagatttgacttttttttttaatggaaactgtaggtgctgttctcaggtgaaaagagagagagagagagagacataagaaatttagagaaaaatattttctgatcttggatttttgtgtgtatgtatgtatgtgattatggtactaataataggaataacgttggaccattgtgagttaaacccacatctggggatgaaatcccacatcctcccaagtgactggtctagaaataatcttgaccttgactttgcacttcaaatgacaacttaaccaagtatagggctcagaaattatatttttaaatgtctgattattattggatggatcaggtggccctgtgtaatagaggtgtgcatgtataacatggaagctactagcaaactgctcccagatgtcctttctccctggtcagttggttccattaacgtttgctacttagtgatttttgtttttcctgttgatattttgagcaaaacaatcattgttttcattgaatatatttggccattttttcagacaaatagaattagcttatttcttcaacattccatcctttcccgatcaggaaatgaaactgatgattttataaggtatttttcacccctccatgaagtgaggtggaggcctttagcatttcagaagtgtgggccatatgtagttcatgccataaaaagtaggatttaattaaaagtcattgcagcccaataaaatggagcctggctgcacccagggatccttgccactgctcttcccttgctgtcagattaatccactgaagtccaactttggttcaagcagagtatttgcaaagagcaacaactgaatgtgatgggactgcttatgtagattttgccagccaaatgccaaggcagttgtagggcctgtacaaataaatgcaaaatcatttcaagtcaattgccattatttgtattgaagtatcagatagatagtaaatactgcaactagtagcttgatgtgctatagttttcactccagtcatcattttcctatctcaccccccgaaacaccaccctaaagttggatttttacatataaataaaaaaagaatccctttt

SEQ ID NO: 29977 - DNA, 3991 bp, Homo sapiens
  source 1..3991: mol_type = unassigned DNA
gagaaaatcaattggtttagaaggtttggactcacttgacaggttcagttggagacgatcataggtggctgctgtgacaaagggaaattgtgcttttccagcatgcttactgaccctgatttacctcaggagtttgaaaggatgtcttccaagcgaccagcctctccgtatggggaagcagatggagaggtagccatggtgacaagcagacagaaagtggaagaagaggagagtgacgggctcccagcctttcaccttcccttgcatgtgagttttcccaacaagcctcactctgaggaatttcagccagtttctctgctgacgcaagagacttgtggccataggactcccacttctcagcacaatacaatggaagttgatggcaataaagttatgtcttcatttgccccacacaactcatctacctcacctcagaaggcagaagaaggtgggcgacagagtggcgagtccttgtctagtacagccctgggaactcctgaacggcgcaagggcagtttagctgatgttgttgacaccttgaagcagaggaaaatggaagagctcatcaaaaacgagccggaagaaacccccagtattgaaaaactactctcaaaggactggaaagacaagcttcttgcaatgggatcggggaactttggcgaaataaaagggactcccgagagcttagctgagaaagaaaggcaactcatgggtatgatcaaccagctgaccagcctccgagagcagctgttggctgcccacgatgagcagaagaaactagctgcctctcagattgagaaacagcgtcagcaaatggagctggccaagcagcaacaagaacaaattgcaagacagcagcagcagcttctacagcaacaacacaaaatcaatttgctccagcaacagatccaggttcaaggtcagctgccgccattaatgattcccgtattccctcctgatcaacggacactggctgcagctgcccagcaaggattcctcctccctccaggcttcagctataaggctggatgtagtgacccttaccctgttcagctgatcccaactaccatggcagctgctgccgcagcaacaccaggcttaggcccactccaactgcagcagttatatgctgcccagctagctgcaatgcaggtatctccaggagggaagctgccaggcataccccaaggcaaccttggtgctgctgtatctcctaccagcattcacacagacaagagcacaaacagcccaccacccaaaagcaaggaaaaaacaacactggagagtctgactcagcaactggcagttaaacagaatgaagaaggaaaatttagccatgcaatgatggatttcaatctgagtggagattctgatggaagtgctggagtctcagagtcaagaatttatagggaatcccgagggcgtggtagcaatgaaccccacataaagcgtccaatgaatgccttcatggtgtgggctaaagatgaacggagaaagatccttcaagcctttcctgacatgcacaactccaacatcagcaagatattgggatctcgctggaaagctatgacaaacctagagaaacagccatattatgaggagcaagcccgtctcagcaagcagcacctggagaagtaccctgactataagtacaagcccaggccaaagcgcacctgcctggtggatggcaaaaagctgcgcattggtgaatacaaggcaatcatgcgcaacaggcggcaggaaatgcggcagtacttcaatgttgggcaacaagcacagatccccattgccactgctggtgttgtgtaccctggagccatcgccatggctgggatgccctcccctcacctgccctcggagcactcaagcgtgtctagcagcccagagcctgggatgcctgttatccagagcacttacggtgtgaaaggagaggagccacatatcaaagaagagatacaggccgaggacatcaatggagaaatttatgatgagtacgacgaggaagaggatgatccagatgtagattatgggagtgacagtgaaaaccatattgcaggacaagccaactgataagggtcaaaagattgttgtgaccttaggacttaaagaagccctaactggttcatccttaccagtggccaagcacattaactttctcatacactgactgttactttaactgttagtcttaaatagttgggacatcagctgactaatagacctcagcctcaaaaggcttggaaagaaaaaacaaatacaacaagcaaacaacaatatcaacaacaagagattgaaataagctatgggtaaaataatgccagtaattcagctgctacatccaagcactgaagtcttacccgtcaacttttttttttttttaaataaactttatggctgtttgttctacaatgttctagaaattctcactcaggtacacagtgccaacaagtggcttgtgaatgtgttttgttgttttgtgctacaatttttaaaaagaaaaaagttttgttttgttttttggggtttctgggttttttccttttctttttctttcctttcattttttttctttgtaatgcacctgacagaaaaaaaagaaaaatgaatttctctttacttctctccaccttctccatctctctactttaaagatggaagtctgtgcatgaggggaaagagggaaaaagagcctgtttttaacttccttgctatccaccacaaaataagcaattattttctttagaggactttatctattgcacaccacactacatctttgagcaagtgccaaatttgtactgaagtgttgaccaagttcattttttctctttactttttccttttccttcttaagttaggacagtgttaaatcttagacaatcccttgaaaaacctgaaataccagcagctggtgagatttgacttttttttttaatggaaactgtaggtgctgttctcaggtgaaaagagagagagagagagagacataagaaatttagagaaaaatattttctgatcttggatttttgtgtgtatgtatgtatgtgattatggtactaataataggaataacgttggaccattgtgagttaaacccacatctggggatgaaatcccacatcctcccaagtgactggtctagaaataatcttgaccttgactttgcacttcaaatgacaacttaaccaagtatagggctcagaaattatatttttaaatgtctgattattattggatggatcaggtggccctgtgtaatagaggtgtgcatgtataacatggaagctactagcaaactgctcccagatgtcctttctccctggtcagttggttccattaacgtttgctacttagtgatttttgtttttcctgttgatattttgagcaaaacaatcattgttttcattgaatatatttggccattttttcagacaaatagaattagcttatttcttcaacattccatcctttcccgatcaggaaatgaaactgatgattttataaggtatttttcacccctccatgaagtgaggtggaggcctttagcatttcagaagtgtgggccatatgtagttcatgccataaaaagtaggatttaattaaaagtcattgcagcccaataaaatggagcctggctgcacccagggatccttgccactgctcttcccttgctgtcagattaatccactgaagtccaactttggttcaagcagagtatttgcaaagagcaacaactgaatgtgatgggactgcttatgtagattttgccagccaaatgccaaggcagttgtagggcctgtacaaataaatgcaaaatcatttcaagtcaattgccattatttgtattgaagtatcagatagatagtaaatactgcaactagtagcttgatgtgctatagttttcactccagtcatcattttcctatctcaccccccgaaacaccaccctaaagttggatttttacatataaataaaaaaagaatccctttt

SEQ ID NO: 29978 - DNA, 1379 bp, Homo sapiens
  source 1..1379: mol_type = unassigned DNA
aaacagtcagttatagtgggttcaccagactgttggagatttgtgccataggagctgtgcatgcatgatgaagtggcacagccactgaacctatcagctaaacccaagacctctgatggcaaatcacccacatcacccacctctccccatatgccagctctgagaataaacagtggggcaggccccctcaaagcctctgtcccagcagcgttagctagtccttcagccagagttagcacaataggttacttaaatgaccatgatgctgtcaccaaggcaatccaagaagctcggcaaatgaaggagcaactccgacgggaacaacaggtgcttgatgggaaggtggctgttgtgaatagtctgggtctcaataactgccgaacagaaaaggaaaaaacaacactggagagtctgactcagcaactggcagttaaacagaatgaagaaggaaaatttagccatgcaatgatggatttcaatctgagtggagattctgatggaagtgctggagtctcagagtcaagaatttatagggaatcccgagggcgtggtagcaatgaaccccacataaagcgtccaatgaatgccttcatggtgtgggctaaagatgaacggagaaagatccttcaagcctttcctgacatgcacaactccaacatcagcaagatattgggatctcgctggaaagctatgacaaacctagagaaacagccatattatgaggagcaagcccgtctcagcaagcagcacctggagaagtaccctgactataagtacaagcccaggccaaagcgcacctgcctggtggatggcaaaaagctgcgcattggtgaatacaaggcaatcatgcgcaacaggcggcaggaaatgcggcagtacttcaatgttgggcaacaagcacagatccccattgccactgctggtgttgtgtaccctggagccatcgccatggctgggatgccctcccctcacctgccctcggagcactcaagcgtgtctagcagcccagagcctgggatgcctgttatccagagcacttacggtgtgaaaggagaggagccacatatcaaagaagagatacaggccgaggacatcaatggagaaatttatgatgagtacgacgaggaagaggatgatccagatgtagattatgggagtgacagtgaaaaccatattgcaggacaagccaactgataagggtcaaaagattgttgtgaccttaggacttaaagaagccctaactggttcatccttaccagtggccaagcacattaactttctcatacactgactgttactttaactgttagtcttaaatagttgggacatcagctgactaatagacctcagcctcaaaaggcttggaaagaaaaaacaaa

SEQ ID NO: 29979 - DNA, 2942 bp, Homo sapiens
  source 1..2942: mol_type = unassigned DNA
gcttactccctgaccagatgctgcggtgcacggggcagccaccatctctgcatgcatgtctgtgtaagtgtctctctctctgtgtgtatgtgcctctgtcatttcgtgtcaaaggtacattacctgattacctttctcggctgccagatttttatctagataattggaactgctatggaggctgtgccttgccagccagcttagaatctgtaaagccatagtttgtccaccttgttatctgtggctgcctgggcagaggaaattaaagagatccacagccaggggggcgcttcctactcctgacctccccagcgatcccaaacaggacagtttgttagtaccgtctttttgtttttatgttttgatttcgttttgggtttttgttcgctcgtgtatgttattttggcatgtggatacctattcccctccacatcgcacatcgtgttttatggagtttagagctgaggaaactttggtcgggttgccaggacgttcgcaccactttgcggaaagcacgagctaacagtgagaccgacagagatgtcttccaagcgaccagcctctccgtatggggaagcagatggagaggtagccatggtgacaagcagacagaaagtggaagaagaggagagtgacgggctcccagcctttcaccttcccttgcatgaagttgatggcaataaagttatgtcttcatttgccccacacaactcatctacctcacctcagaaggcagaagaaggtgggcgacagagtggcgagtccttgtctagtacagccctgggaactcctgaacggcgcaagggcagtttagctgatgttgttgacaccttgaagcagaggaaaatggaagagctcatcaaaaacgagccggaagaaacccccagtattgaaaaactactctcaaaggactggaaagacaagcttcttgcaatgggatcggggaactttggcgaaataaaagggactcccgagagcttagctgagaaagaaaggcaactcatgggtatgatcaaccagctgaccagcctccgagagcagctgttggctgcccacgatgagcagaagaaactagctgcctctcagattgagaaacagcgtcagcaaatggagctggccaagcagcaacaagaacaaattgcaagacagcagcagcagcttctacagcaacaacacaaaatcaatttgctccagcaacagatccaggttcaaggtcagctgccgccattaatgattcccgtattccctcctgatcaacggacactggctgcagctgcccagcaaggattcctcctccctccaggcttcagctataaggctggatgtagtgacccttaccctgttcagctgatcccaactaccatggcagctgctgccgcagcaacaccaggcttaggcccactccaactgcagcagttatatgctgcccagctagctgcaatgcaggtatctccaggagggaagctgccaggcataccccaaggcaaccttggtgctgctgtatctcctaccagcattcacacagacaagagcacaaacagcccaccacccaaaagcaaggatgaagtggcacagccactgaacctatcagctaaacccaagacctctgatggcaaatcacccacatcacccacctctccccatatgccagctctgagaataaacagtggggcaggccccctcaaagcctctgtcccagcagcgttagctagtccttcagccagagttagcacaataggttacttaaatgaccatgatgctgtcaccaaggcaatccaagaagctcggcaaatgaaggagcaactccgacgggaacaacaggtgcttgatgggaaggtggctgttgtgaatagtctgggtctcaataactgccgaacagaaaaggaaaaaacaacactggagagtctgactcagcaactggcagttaaacagaatgaagaaggaaaatttagccatgcaatgatggatttcaatctgagtggagattctgatggaagtgctggagtctcagagtcaagaatttatagggaatcccgagggcgtggtagcaatgaaccccacataaagcgtccaatgaatgccttcatggtgtgggctaaagatgaacggagaaagatccttcaagcctttcctgatcttggatttttgtgtgtatgtatgtatgtgattatggtactaataataggaataacgttggaccattgtgagttaaacccacatctggggatgaaatcccacatcctcccaagtgactggtctagaaataatcttgaccttgactttgcacttcaaatgacaacttaaccaagtatagggctcagaaattatatttttaaatgtctgattattattggatggatcaggtggccctgtgtaatagaggtgtgcatgtataacatggaagctactagcaaactgctcccagatgtcctttctccctggtcagttggttccattaacgtttgctacttagtgatttttgtttttcctgttgatattttgagcaaaacaatcattgttttcattgaatatatttggccattttttcagacaaatagaattagcttatttcttcaacattccatcctttcccgatcaggaaatgaaactgatgattttataaggtatttttcacccctccatgaagtgaggtggaggcctttagcatttcagaagtgtgggccatatgtagttcatgccataaaaagtaggatttaattaaaagtcattgcagcccaataaaatggagcctggctgcacccagggatccttgccactgctcttcccttgctgtcagattaatccactgaagtccaactttggttcaagcagagtatttgcaaagagcaacaactgaatgtgatgggactgcttatgtagattttgccagccaaatgccaaggcagttgtagggcctgtacaaataaatgcaaaatcatttc

SEQ ID NO: 29980 - DNA, 4261 bp, Homo sapiens
  source 1..4261: mol_type = unassigned DNA
gagaaaatcaattggtttagaaggtttggactcacttgacaggttcagttggagacgatcataggtggctgctgtgacaaagggaaattgtgcttttccagcatgcttactgaccctgatttacctcaggagtttgaaaggatgtcttccaagcgaccagcctctccgtatggggaagcagatggagaggtagccatggtgacaagcagacagaaagtggaagaagaggagagtgacgggctcccagcctttcaccttcccttgcatgtgagttttcccaacaagcctcactctgaggaatttcagccagtttctctgctgacgcaagagacttgtggccataggactcccacttctcagcacaatacaatggaagttgatggcaataaagttatgtcttcatttgccccacacaactcatctacctcacctcagaaggcagaagaaggtgggcgacagagtggcgagtccttgtctagtacagccctgggaactcctgaacggcgcaagggcagtttagctgatgttgttgacaccttgaagcagaggaaaatggaagagctcatcaaaaacgagccggaagaaacccccagtattgaaaaactactctcaaaggactggaaagacaagcttcttgcaatgggatcggggaactttggcgaaataaaagggactcccgagagcttagctgagaaagaaaggcaactcatgggtatgatcaaccagctgaccagcctccgagagcagctgttggctgcccacgatgagcagaagaaactagctgcctctcagattgagaaacagcgtcagcaaatggagctggccaagcagcaacaagaacaaattgcaagacagcagcagcagcttctacagcaacaacacaaaatcaatttgctccagcaacagatccaggttcaaggtcagctgccgccattaatgattcccgtattccctcctgatcaacggacactggctgcagctgcccagcaaggattcctcctccctccaggcttcagctataaggctggatgtagtgacccttaccctgttcagctgatcccaactaccatggcagctgctgccgcagcaacaccaggcttaggcccactccaactgcagcagttatatgctgcccagctagctgcaatgcaggtatctccaggagggaagctgccaggcataccccaaggcaaccttggtgctgctgtatctcctaccagcattcacacagacaagagcacaaacagcccaccacccaaaagcaaggatgaagtggcacagccactgaacctatcagctaaacccaagacctctgatggcaaatcacccacatcacccacctctccccatatgccagctctgagaataaacagtggggcaggccccctcaaagcctctgtcccagcagcgttagctagtccttcagccagagttagcacaataggttacttaaatgaccatgatgctgtcaccaaggcaatccaagaagctcggcaaatgaaggagcaactccgacgggaacaacaggtgcttgatgggaaggtggctgttgtgaatagtctgggtctcaataactgccgaacagaaaaggaaaaaacaacactggagagtctgactcagcaactggcagttaaacagaatgaagaaggaaaatttagccatgcaatgatggatttcaatctgagtggagattctgatggaagtgctggagtctcagagtcaagaatttatagggaatcccgagggcgtggtagcaatgaaccccacataaagcgtccaatgaatgccttcatggtgtgggctaaagatgaacggagaaagatccttcaagcctttcctgacatgcacaactccaacatcagcaagatattgggatctcgctggaaagctatgacaaacctagagaaacagccatattatgaggagcaagcccgtctcagcaagcagcacctggagaagtaccctgactataagtacaagcccaggccaaagcgcacctgcctggtggatggcaaaaagctgcgcattggtgaatacaaggcaatcatgcgcaacaggcggcaggaaatgcggcagtacttcaatgttgggcaacaagcacagatccccattgccactgctggtgttgtgtaccctggagccatcgccatggctgggatgccctcccctcacctgccctcggagcactcaagcgtgtctagcagcccagagcctgggatgcctgttatccagagcacttacggtgtgaaaggagaggagccacatatcaaagaagagatacaggccgaggacatcaatggagaaatttatgatgagtacgacgaggaagaggatgatccagatgtagattatgggagtgacagtgaaaaccatattgcaggacaagccaactgataagggtcaaaagattgttgtgaccttaggacttaaagaagccctaactggttcatccttaccagtggccaagcacattaactttctcatacactgactgttactttaactgttagtcttaaatagttgggacatcagctgactaatagacctcagcctcaaaaggcttggaaagaaaaaacaaatacaacaagcaaacaacaatatcaacaacaagagattgaaataagctatgggtaaaataatgccagtaattcagctgctacatccaagcactgaagtcttacccgtcaacttttttttttttttaaataaactttatggctgtttgttctacaatgttctagaaattctcactcaggtacacagtgccaacaagtggcttgtgaatgtgttttgttgttttgtgctacaatttttaaaaagaaaaaagttttgttttgttttttggggtttctgggttttttccttttctttttctttcctttcattttttttctttgtaatgcacctgacagaaaaaaaagaaaaatgaatttctctttacttctctccaccttctccatctctctactttaaagatggaagtctgtgcatgaggggaaagagggaaaaagagcctgtttttaacttccttgctatccaccacaaaataagcaattattttctttagaggactttatctattgcacaccacactacatctttgagcaagtgccaaatttgtactgaagtgttgaccaagttcattttttctctttactttttccttttccttcttaagttaggacagtgttaaatcttagacaatcccttgaaaaacctgaaataccagcagctggtgagatttgacttttttttttaatggaaactgtaggtgctgttctcaggtgaaaagagagagagagagagagacataagaaatttagagaaaaatattttctgatcttggatttttgtgtgtatgtatgtatgtgattatggtactaataataggaataacgttggaccattgtgagttaaacccacatctggggatgaaatcccacatcctcccaagtgactggtctagaaataatcttgaccttgactttgcacttcaaatgacaacttaaccaagtatagggctcagaaattatatttttaaatgtctgattattattggatggatcaggtggccctgtgtaatagaggtgtgcatgtataacatggaagctactagcaaactgctcccagatgtcctttctccctggtcagttggttccattaacgtttgctacttagtgatttttgtttttcctgttgatattttgagcaaaacaatcattgttttcattgaatatatttggccattttttcagacaaatagaattagcttatttcttcaacattccatcctttcccgatcaggaaatgaaactgatgattttataaggtatttttcacccctccatgaagtgaggtggaggcctttagcatttcagaagtgtgggccatatgtagttcatgccataaaaagtaggatttaattaaaagtcattgcagcccaataaaatggagcctggctgcacccagggatccttgccactgctcttcccttgctgtcagattaatccactgaagtccaactttggttcaagcagagtatttgcaaagagcaacaactgaatgtgatgggactgcttatgtagattttgccagccaaatgccaaggcagttgtagggcctgtacaaataaatgcaaaatcatttcaagtcaattgccattatttgtattgaagtatcagatagatagtaaatactgcaactagtagcttgatgtgctatagttttcactccagtcatcattttcctatctcaccccccg

SEQ ID NO: 29981 - DNA, 2365 bp, Homo sapiens
  source 1..2365: mol_type = unassigned DNA
caggatgtcttccaagcgaccagcctctccgtatggggaagcagatggagaggtagccatggtgacaagcagacagaaagtggaagaagaggagagtgacgggctcccagcctttcaccttcccttgcatgtgagttttcccaacaagcctcactctgaggaatttcagccagtttctctgctgacgcaagagacttgtggccataggactcccacttctcagcacaatacaatggaagttgatggcaataaagttatgtcttcatttgccccacacaactcatctacctcacctcagaaggcagaagaaggtgggcgacagagtggcgagtccttgtctagtacagccctgggaactcctgaacggcgcaagggcagtttagctgatgttgttgacaccttgaagcagaggaaaatggaagagctcatcaaaaacgagccggaagaaacccccagtattgaaaaactactctcaaaggactggaaagacaagcttcttgcaatgggatcggggaactttggcgaaataaaagggactcccgagagcttagctgagaaagaaaggcaactcatgggtatgatcaaccagctgaccagcctccgagagcagctgttggctgcccacgatgagcagaagaaactagctgcctctcagattgagaaacagcgtcagcaaatggagctggccaagcagcaacaagaacaaattgcaagacagcagcagcagcttctacagcaacaacacaaaatcaatttgctccagcaacagatccaggttcaaggtcagctgccgccattaatgattcccgtattccctcctgatcaacggacactggctgcagctgcccagcaaggattcctcctccctccaggcttcagctataaggctggatgtagtgacccttaccctgttcagctgatcccaactaccatggcagctgctgccgcagcaacaccaggcttaggcccactccaactgcagcagttatatgctgcccagctagctgcaatgcaggtatctccaggagggaagctgccaggcataccccaaggcaaccttggtgctgctgtatctcctaccagcattcacacagacaagagcacaaacagcccaccacccaaaagcaaggaaaaaacaacactggagagtctgactcagcaactggcagttaaacagaatgaagaaggaaaatttagccatgcaatgatggatttcaatctgagtggagattctgatggaagtgctggagtctcagagtcaagaatttatagggaatcccgagggcgtggtagcaatgaaccccacataaagcgtccaatgaatgccttcatggtgtgggctaaagatgaacggagaaagatccttcaagcctttcctgacatgcacaactccaacatcagcaagatattgggatctcgctggaaagctatgacaaacctagagaaacagccatattatgaggagcaagcccgtctcagcaagcagcacctggagaagtaccctgactataagtacaagcccaggccaaagcgcacctgcctggtggatggcaaaaagctgcgcattggtgaatacaaggcaatcatgcgcaacaggcggcaggaaatgcggcagtacttcaatgttgggcaacaagcacagatccccattgccactgctggtgttgtgtaccctggagccatcgccatggctgggatgccctcccctcacctgccctcggagcactcaagcgtgtctagcagcccagagcctgggatgcctgttatccagagcacttacggtgtgaaaggagaggagccacatatcaaagaagagatacaggccgaggacatcaatggagaaatttatgatgagtacgacgaggaagaggatgatccagatgtagattatgggagtgacagtgaaaaccatattgcaggacaagccaactgataagggtcaaaagattgttgtgaccttaggacttaaagaagccctaactggttcatccttaccagtggccaagcacattaactttctcatacactgactgttactttaactgttagtcttaaatagttgggacatcagctgactaatagacctcagcctcaaaaggcttggaaagaaaaaacaaatacaacaagcaaacaacaatatcaacaacaagagattgaaataagctatgggtaaaataatgccagtaattcagctgctacatccaagcactgaagtcttacccgtcaacttttttttttttttaaataaactttatggctgtttgttctacaatgttctagaaattctcactcaggtacacagtgccaacaagtggcttgtgaatgtgttttgttgttttgtgctacaatttttaaaaagaaaaaa

SEQ ID NO: 29982 - DNA, 6969 bp, Homo sapiens
  source 1..6969: mol_type = unassigned DNA
aggatgtcttccaagcgaccagcctctccgtatggggaagcagatggagaggtagccatggtgacaagcagacagaaagtggaagaagaggagagtgacgggctcccagcctttcaccttcccttgcatgtgagttttcccaacaagcctcactctgaggaatttcagccagtttctctgctgacgcaagagacttgtggccataggactcccacttctcagcacaatacaatggaagttgatggcaataaagttatgtcttcatttgccccacacaactcatctacctcacctcagaaggcagaagaaggtgggcgacagagtggcgagtccttgtctagtacagccctgggaactcctgaacggcgcaagggcagtttagctgatgttgttgacaccttgaagcagaggaaaatggaagagctcatcaaaaacgagccggaagaaacccccagtattgaaaaactactctcaaaggactggaaagacaagcttcttgcaatgggatcggggaactttggcgaaataaaagggactcccgagagcttagctgagaaagaaaggcaactcatgggtatgatcaaccagctgaccagcctccgagagcagctgttggctgcccacgatgagcagaagaaactagctgcctctcagattgagaaacagcgtcagcaaatggagctggccaagcagcaacaagaacaaattgcaagacagcagcagcagcttctacagcaacaacacaaaatcaatttgctccagcaacagatccaggttcaaggtcagctgccgccattaatgattcccgtattccctcctgatcaacggacactggctgcagctgcccagcaaggattcctcctccctccaggcttcagctataaggctggatgtagtgacccttaccctgttcagctgatcccaactaccatggcagctgctgccgcagcaacaccaggcttaggcccactccaactgcagcagttatatgctgcccagctagctgcaatgcaggtatctccaggagggaagctgccaggcataccccaaggcaaccttggtgctgctgtatctcctaccagcattcacacagacaagagcacaaacagcccaccacccaaaagcaaggatgaagtggcacagccactgaacctatcagctaaacccaagacctctgatggcaaatcacccacatcacccacctctccccatatgccagctctgagaataaacagtggggcaggccccctcaaagcctctgtcccagcagcgttagctagtccttcagccagagttagcacaataggttacttaaatgaccatgatgctgtcaccaaggcaatccaagaagctcggcaaatgaaggagcaactccgacgggaacaacaggtgcttgatgggaaggtggctgttgtgaatagtctgggtctcaataactgccgaacagaaaaggaaaaaacaacactggagagtctgactcagcaactggcagttaaacagaatgaagaaggaaaatttagccatgcaatgatggatttcaatctgagtggagattctgatggaagtgctggagtctcagagtcaagaatttatagggaatcccgagggcgtggtagcaatgaaccccacataaagcgtccaatgaatgccttcatggtgtgggctaaagatgaacggagaaagatccttcaagcctttcctgacatgcacaactccaacatcagcaagatattgggatctcgctggaaagctatgacaaacctagagaaacagccatattatgaggagcaagcccgtctcagcaagcagcacctggagaagtaccctgactataagtacaagcccaggccaaagcgcacctgcctggtggatggcaaaaagctgcgcattggtgaatacaaggcaatcatgcgcaacaggcggcaggaaatgcggcagtacttcaatgttgggcaacaagcacagatccccattgccactgctggtgttgtgtaccctggagccatcgccatggctgggatgccctcccctcacctgccctcggagcactcaagcgtgtctagcagcccagagcctgggatgcctgttatccagagcacttacggtgtgaaaggagaggagccacatatcaaagaagagatacaggccgaggacatcaatggagaaatttatgatgagtacgacgaggaagaggatgatccagatgtagattatgggagtgacagtgaaaaccatattgcaggacaagccaactgataagggtcaaaagattgttgtgaccttaggacttaaagaagccctaactggttcatccttaccagtggccaagcacattaactttctcatacactgactgttactttaactgttagtcttaaatagttgggacatcagctgactaatagacctcagcctcaaaaggcttggaaagaaaaaacaaatacaacaagcaaacaacaatatcaacaacaagagattgaaataagctatgggtaaaataatgccagtaattcagctgctacatccaagcactgaagtcttacccgtcaacttttttttttttttaaataaactttatggctgtttgttctacaatgttctagaaattctcactcaggtacacagtgccaacaagtggcttgtgaatgtgttttgttgttttgtgctacaatttttaaaaagaaaaaagttttgttttgttttttggggtttctgggttttttccttttctttttctttcctttcattttttttctttgtaatgcacctgacagaaaaaaaagaaaaatgaatttctctttacttctctccaccttctccatctctctactttaaagatggaagtctgtgcatgaggggaaagagggaaaaagagcctgtttttaacttccttgctatccaccacaaaataagcaattattttctttagaggactttatctattgcacaccacactacatctttgagcaagtgccaaatttgtactgaagtgttgaccaagttcattttttctctttactttttccttttccttcttaagttaggacagtgttaaatcttagacaatcccttgaaaaacctgaaataccagcagctggtgagatttgacttttttttttaatggaaactgtaggtgctgttctcaggtgaaaagagagagagagagagagacataagaaatttagagaaaaatattttctgatcttggatttttgtgtgtatgtatgtatgtgattatggtactaataataggaataacgttggaccattgtgagttaaacccacatctggggatgaaatcccacatcctcccaagtgactggtctagaaataatcttgaccttgactttgcacttcaaatgacaacttaaccaagtatagggctcagaaattatatttttaaatgtctgattattattggatggatcaggtggccctgtgtaatagaggtgtgcatgtataacatggaagctactagcaaactgctcccagatgtcctttctccctggtcagttggttccattaacgtttgctacttagtgatttttgtttttcctgttgatattttgagcaaaacaatcattgttttcattgaatatatttggccattttttcagacaaatagaattagcttatttcttcaacattccatcctttcccgatcaggaaatgaaactgatgattttataaggtatttttcacccctccatgaagtgaggtggaggcctttagcatttcagaagtgtgggccatatgtagttcatgccataaaaagtaggatttaattaaaagtcattgcagcccaataaaatggagcctggctgcacccagggatccttgccactgctcttcccttgctgtcagattaatccactgaagtccaactttggttcaagcagagtatttgcaaagagcaacaactgaatgtgatgggactgcttatgtagattttgccagccaaatgccaaggcagttgtagggcctgtacaaataaatgcaaaatcatttcaagtcaattgccattatttgtattgaagtatcagatagatagtaaatactgcaactagtagcttgatgtgctatagttttcactccagtcatcattttcctatctcaccccccgaaacaccaccctaaagttggatttttacatataaataaaaaaagaatcccttttatttttctctctctcagaagacttgctctggggttttgcttggaggagctgatcatatcctgcatgtcagagatttcattttgtttgtttttctgtttgtttgtttttgatgactttatttacatttgaactgcctctttttgctagtgttgtaatgatgatgatgataaaataataataataatagtaataataataataatggtcagctgttcccagattagtaagttatgtataatttattttatttctccctttctattttattctgctctgatttggaagtgcagccaataagctgttagatatttaaaacaaatttccatctccaactcatatatgtatgtatatgtatatatatatatacatatatatacacacatatacacacacacacacacatttacccacaattttacttctctttccgtaagttttctcttttttaagaattttggccccaacaatatcagttctgatgtttaaaacaaaggagtgaattaataggagggtcgtgttcaatcttaattaacttatgctctcatcactcattttagttatttaattgccacagtcatctagagccaatttttttttgtttttgtttgttttgtttttaagcactctggataaggaaaaaatagacacttgtttttatatcatttttatgtacaatgtgaaaacagatttttaaaaaatttgttctctgtctttgttaacaaattccttccgatttatgtgggttcacctctcacgtttgctggatacttactttacaccatgttatgaaagatgctttgttttcatttcatgagtttgggctacaagaatactttgttttagctccaggtagatgccattgaaggcattcatggctgaaatcaattctaacacacttaccgatgaattgacaacactttggtgtttggtcttttttttgttatattttgttttatttgaaggggaaaacaaaattgttaatggtgacttttaactgctgaaattcaaaatttgattttagttaggtttatgtccgagactaaactgtgcatgaaccgaaacaaaaagcaagttcataccgctgcattctgttctcttgttctgacggttaattcactggacatcaaattttctttgccctagttttccccaaaagaaaacaaaagcaaaaatagttatattaatgttgaaagtgctttgaagtcacttgataaaaggtgctatgaatagcaacttactgtgttactacattgcctttttggcattggttgatttataattttggtaaaggatcctaaaaccctgtattctttttctgtgccccataatgaccaaaaaagataaagaaaatgagagtaagatcaaaagatcaaactaaaacataaacagtctccttcctgtctgctttcttacctatctgttcacactttatctctttccctttctctctctctctcacatgcgcgcgcgcgcgcgcgcacacacacacacacacacacttgccccaacactgagaaataatcttgccagaattctggtttttatagttgttgtagtccgtttctctaaaaatagtcctgttttcatatgaatctaagagaacattaccggagaaaataaagttactcatttatagttactaataataagttagtgattaacttaccacaattggataaaatataaaactattcttcagcacatttatacctaaattagtgaagtccatttgtgaagttcatttggcatctgcagttaagagttaaccatgtataaaatccctcccaaagaacataatcatcgttagaaccaaatcctcttataaagaacaaatataaaaaagttttctgtggtgaagctattttatagatttgatttccggagtagaattttaccttaattcacttaaagaaaattaaccattttttggtccaacttcagatattttcttaatccagaagctgtgactgttcccagaagaaacctcttatatcacatttaaaacataaaaaataattacactttcactcattctaatgggtaaattgttgaattgtaataaacaactgtatatttacaaacaggtttataaggtatttgtctatcaaattaataataaaataaaacttacggggtctgcaaggaaaactatgaaggccacttaaagtggttcaggtatccctttgtcttgtagggcatagctgttggtttagccaggcttttacagtatttaattttaaagtatcctataactatcaacttcccaggttgaagacgatgtgttgagtttcctactgattgattgattcctgtcctccccagtgtttccgtcactggttcactaaaacagtatttatatagctccactggctctaaagctcttagtccttctaatattttggattttacaagtaaaaatggaaaaaaaatagaaaagagacaatcaaatgcctggagcttaaaacaaagtatgtgcaacctaccatctcacttgaaatttaataaaataataagtaattatgtaaatataacatagagttatagatttatattttgttcataacacatagtgtaatataagttgtatattttcatgtttttggttttatgttatcattcatgccacaataaaaataaaacaggagtttatgtgctcttaaaaaaaagatgtgggttgccaccaacctgtttttcgtttttgttttttgtttattttattttatttttttgcattctcctttttcagtattactgccatgcaaggcaccaataaaaacagcaaatgtgttctt

SEQ ID NO: 29983 - DNA, 8808 bp, Homo sapiens
  source 1..8808: mol_type = unassigned DNA
ctgttttttttctgcagaagaatgtcttccaagcaagccacctctccatttgcctgtgcagctgatggagaggatgcaatgacccaggatttaacctcaagggaaaaggaagagggcagtgatcaacatgtggcctcccatctgcctctgcaccccataatgcacaacaaacctcactctgaggagctaccaacacttgtcagtaccattcaacaagatgctgactgggacagcgttctgtcatctcagcaaagaatggaatcagagaataataagttatgttccctatattccttccgaaatacctctacctcaccacataagcctgacgaagggagtcgggaccgtgagataatgaccagtgttacttttggaaccccagagcgccgcaaagggagtcttgccgatgtggtggacacactgaaacagaagaagcttgaggaaatgactcggactgaacaagaggattcctcctgcatggaaaaactactttcaaaagattggaaggaaaaaatggaaagactaaataccagtgaacttcttggagaaattaaaggtacacctgagagcctggcagaaaaagaacggcagctctccaccatgattacccagctgatcagtttacgggagcagctactggcagcgcatgatgaacagaaaaaactggcagcgtcacaaattgagaaacaacggcagcaaatggaccttgctcgccaacagcaagaacagattgcgagacaacagcagcaacttctgcaacagcagcacaaaattaatctcctgcagcaacagatccaggttcagggtcacatgcctccgctcatgatcccaatttttccacatgaccagcggactctggcagcagctgctgctgcccaacagggattcctcttcccccctggaataacatacaaaccaggtgataactaccccgtacagttcattccatcaacaatggcagctgctgctgcttctggactcagccctttacagctccagaagggtcatgtctcccacccacaaattaaccaaaggctaaagggcctaagtgaccgttttggcaggaatttggacacctttgaacatggtggtggccactcttacaaccacaaacagattgagcagctctatgccgctcagctggccagcatgcaggtgtcacctggagcaaagatgccatcaactccacagccaccaaacacagcagggacggtctcacctactgggataaaaaatgaaaagagagggaccagccctgtaactcaagttaaggatgaagcagcagcacagcctctgaatctctcatcccgacccaagacagcagagcctgtaaagtccccaacgtctcccacccagaacctcttcccagccagcaaaaccagccctgtcaatctgccaaacaaaagcagcatccctagccccattggaggaagcctgggaagaggatcctctttagatatcctatctagtctcaactcccctgccctttttggggatcaggatacagtgatgaaagccattcaggaggcgcggaagatgcgagagcagatccagcgggagcaacagcagcaacagccacatggtgttgacgggaaactgtcctccataaataatatggggctgaacagctgcaggaatgaaaaggaaagaacgcgctttgagaatttggggccccagttaacgggaaagtcaaatgaagatggaaaactgggcccaggtgtcatcgaccttactcggccagaagatgcagagggaggtgccactgtggctgaagcacgagtctacagggacgcccgcggccgtgccagcagcgagccacacattaagcgaccaatgaatgcattcatggtttgggcaaaggatgagaggagaaaaatccttcaggccttccccgacatgcataactccaacattagcaaaatcttaggatctcgctggaaatcaatgtccaaccaggagaagcaaccttattatgaagagcaggcccggctaagcaagatccacttagagaagtacccaaactataaatacaaaccccgaccgaaacgcacctgcattgttgatggcaaaaagcttcggattggggagtataagcaactgatgaggtctcggagacaggagatgaggcagttctttactgtggggcaacagcctcagattccaatcaccacaggaacaggtgttgtgtatcctggtgctatcactatggcaactaccacaccatcgcctcagatgacatctgactgctctagcacctcggccagcccggagcccagcctcccggtcatccagagcacttatggtatgaagacagatggcggaagcctagctggaaatgaaatgatcaatggagaggatgaaatggaaatgtatgatgactatgaagatgaccccaaatcagactatagcagtgaaaatgaagccccggaggctgtcagtgccaactgaggagtttttgtttgctgaattaaagtactctgacatttcacccccctccccaacaaagagttattaaagagcccgcatgcatttgtggctccacaattacatcagcagaatggtcttaattgtttcgtaaagtgtgagacagattaagttttccctgatttttcatgaacttgagttttttgttgttattgttattgttgttgttgttgtttttttaatttaggtgaagacatattaaatatgagacaccaggacttgaaacttatctcaacccgtagatgtcttacaagtcttatatttttgtcttactttttttttcttttggatgttgataaaggtttaagttactgttttagatggggttaaacattctcactcaggtatgctgtgccggcctacaggttgtgaatgtgtttttattctgaattattttagaaaacaactgaggatttcatattgtgaaacagaacaagtccacggcgtgtgcagctgcatgtagagcatattcaaaaggcctcggaattccaattttccatttgtagagttaaactttgaatgtgccaaactttttcgtaacttttgaatcttaatattttgaaagtcttaaaggagacactgcaaagtcttagacaatctttggcatcttaaaataaaatagcaaaccaacatttttttttccagaaaatggtaaggtactcaggaatctggagacaagatattgtaaggaatgaacaaggttgccacagtgcatggacccaattgtgtttgcctgttgacgtgccatcagtgcgtgatgtggtatgacatacacacaccagagcaaccgccacaccagatatcgacagagtggtcttctctgcctgagaccacctctcactacatccattatccctttgcctttaaccctgacattcagtcttaacacattttatcttaaataatttattcattccagaatgtcaagggtccacttgctatttattttttttcaattgttggtggcattaatttaataattcttgtttttcaccttccttccccgaagaacttttccgtccttttcacctccttctcctgtgtacatagtgattttatgtccccagaacgcctggaagcatttctgaaaccaagatattattaaaaacctattattgtttttaatcatgagtatgtatctggctgcagggctgtgtattgggatataggtatatagtcttacacttaaacaggtatgcccctgaggttcactgtgacctcaagtcttttgccagaattttcccctaattcagttcacaagtggtagggtctgcatcagtggcatttccccctgaattccattcagcagcaaggttcaacagtggtgactgccaggcaggagagtcctgcggccaaacctgaagcccaaggctcgtgggccatgcaggaatctcagtgaagctgtcatgggctggcacctttacactgagttgccttgtcccagctggcacatctagggagttcattgcaaaatccccaggatgcaaaaagccacatgacagcctcagagcaaagatggtggcaaatagtcatgatacatctagagaatgaaagaaaactgtaagggaggagaaggaggggaatacattccctatatgggatgttcctactgttaactctggggaacagatagctccgggggcagcagatgagttcctctggctgactctatctgtagccacatggggacctgcctacgtgtgaacaaaatgaactgcacttatcacacaaggatttctttgaagacatgctactggggtgggaagcagtgaggttttattccccatctcctaactacagggagctctgccatgtcattttggccttcctgaaactaggacaggttgtctatcggggggcttcccccagagaggtttagtgggagaatgtcagtgaatgggatagttcacctcatgggacaacccagaatctgatcaccaggacataggaatggccccatcagatttcttgagccattttgtcacttggaagaaaatagtgtacctttgtatttatttaagagtgctcaaggcctaatagcaataaacaggtctagccaagaaattacaagctattctgttagctgggagtgctctctataagctgattaaggtactgataggaactctttgttattcatgttggttggggattagaaatttgtttttgtacatttatttcaaatgaggaggaggtcattttttctctcaaaaaatgagtatttattattgtcttactgatttctttgattatatacctctcctcctcagttcactcttgttttttttctttctctttggcttttgcttttgctctctctcacttctttcttattttgttgcattggtagagtgttgtatggctagcattgtattgtatgtaattaattttgcacaaaagcaaacatttagcatagtaggttaattttgtttgtttttatgaccatgccaaaataatattctgggctggtggagaacaaaggactgttctttaggactgaaacttgattttgctcatagtaagtaaaaaaaaacaaaaaacacacacactcacagatgttgtttcgtaagtgttataagcactggatataaatggtattttttatcacttctgactaatgtgaaactgttgtacgaaaactacatgaacaaaagtcatctgtttcgactcgtgtgggcttgcctcacagttgccggatttgagtcatttttatgtcttgttatttcatttatttatgcaaaatacatgtgtgtatgaacactttgttttagctccagctctgcctcagtactggggttcatttacttttagccatgttcttaaaaatgaaaggctattcaggaatgatctgattgtaaacgtctttttcattggatcaaacagtaatgctgtatttgaatctaaattttgtgtataagcagtttatttattagccaagtttggctctaaatatccatggaaattaagaatgacaatcatagggatcaattcattttattttcagtggggcttaaacaaagtttatatgactttaccatctcattttagatttttctaattgtgtaaatataacatagaaatagaatttatttttggttcatgaatacttagtgagatataagttatgtatttcctttttgttctctatccatagatgttggtccaaactgaaagttgatgagtcactgtgcctctcggggtagtgagttatcagctacagtgagagagcagtgtttggcctgcagctgggacagcaaaacgtttcaccagggttctcatgcagttcagaacccactgtccacagatccagacatttcccttttttcttacagaaagttgatgattggacatactaaatttccactacagttaggagacagtcagtttgctttgggagtctacataaatcttctaagatagttctgtgaccatttaatagcaagaagcatgaatgccactacaaaggcaaaaatccacctctgagatcggccgttaataaacgtcccgtcatgtcagtttagattcaagaatgttaagcaactttgtttttgcggtgctccctatttcatagtatcttcaaatcaaaaataaaaattatctccattttgttaaagaacttacagggtcagggttctccttgtcacttagaattgggacactgccaggcaatcctctcccaaaaaaaaaaaaaaaaaaaaatagccatatggaatggaaggaaaaggagaaaagaaggaagaaaggaaaaaagtaggaagggagagagaaaaaaaaggtcgctttgcggatacgagccgctaggctgacaacttttctatttcattggcagatatgaagcagtgtcttttccagtaaggtacggaagctttgttgttttcatgtgtacccagctcagccttttagaagcacctcggtttgcttcattaggtatttgatactctccagccttgtcctcaggcctgatttgatttgccagggtcctgacaccaaagcccaggccaagttctaaattcaggtgtgggctcacagtgctattgagcttgtcgaattctggcctcccctgaacattagccccacgggagcctgagggtgtttgaaaagggcgtgatcactctagggctgaaattaaaggctgctttcttttccttctgaagccaggctgcttcttcggagtacaccctcctgagccaggagcacaagcactagcagaaagcagggattgtttcaggaaagcccatttaccctcagtaggaaggcagcctggtcacttgaacagcacagctgaggctgcttctctcaatttactcattttgcaaagaattgacctctaccaactcattagggagaggaaaaagaatcacttagtaattttaaatcatatgagaagtcctgtaccaagtgccaacaactgcaaagaaatgcagctagaggaatgtattgaaattactactgggtcttcctttttaatgagaaaatgacaaaaatggttgctgtagccctgcctgattttgtacacgtttgtctaagaattgagttggcacttaagctcacttctcaaagtataataatattgtatgacctcatttgtcctttcacaaaagcacttgcatcatttccttaagtcatctgctccctgacatgttttcttccctaataaacaacttctgtctgttattcctgccaatgatgttctgtttctgatgccatatcctattgagcgtgcccctgtactaatatcattgaaaatattgatatgcaaacacatttccttttcatccccattctatctttccctttggggacagattgctttccaaaagctcatgaacaaatatttggaatgctggtacctttggggcagaggtaagggtgggcggggtgggggcagaaaggtaatgcttaatgcagataactcttctaatcagtgtccatggcaatatgaacgcttgaagaaaactcagtgacatatcttgctcagtagtttcttattcctgaagaaccacaagcataaagtgaggcctcagtgctggtgctcttggagtatggggaatgtgcaaatatttaactgttttgtatgctgcacattgcaggtctgctcatgtgcattctccctttgtcttcctttgtcatatgtgtttttgcttttttgaaagtgcagtctttattgtaccctcctccagcttgtagcaaattagaatgcttagcatttatgttcattcattattgtatttgccatgtaaaatttttattaccttagacaagcttataagctgttactacataacttatcttactgtaactcttttatttcccccgacgttgtaatttgtttgtgatgtatattgtgaaattgtattctatgttaatttaatcagcacaattcactgacatgctggactgacatgctggctgctgtttcaaagtgtaaagtttgtgtagggctgttgggacaactgcaactctgttgtcaaggtactgtgctttggttcctatagcaacactgggtgtggcccttgaattgctaagggcatttaatacatcctggagcaaattttaactgcagattttctttgtagaaattctatgtataatgcaggtacctacttggcccatggctggtaactatttgggcaattagaaaaaaagaaaaaaacataaaaactagtgtctattgctgctttgaatatgtttgaaagtctgaaaatgtaaatagtttatcaaaaaaaaatcttgtacagtccagtgtaaagtttttaaatgaccttaagggttgccatcacatctttctcacactctcctcttgataataataataataaaaagtttgctaaggattaaagaaatgggaaaaataaaaaaaatctcttcaaatttacaggaatgaatcattgttcttagctttgttgcatacacaaacttcttggattttgttgtgcagtattgacgtgagataaagctcaacattgaataatctttcagtggtacttttcaaagtcttcccctcctctgcctcataattaagggaaaagacaaaattgaaagacacactgtctttatctatcctggtgtatgttggcaccttagctactttttttttttcctttttgcacaaggtgctttcctgatatgttcaacatgccatctttgggtgataatgtatatgccgtgatggggctcaggccccttaggggagtgtctataagaactgcctatttatgctcatttacctcaagactgtcctctctaccctaatctagttgtcatcactccatcttttgtactgctgttgacacttacaaattaaagataaattttgttttatga

SEQ ID NO: 29984 - DNA, 8925 bp, Homo sapiens
  source 1..8925: mol_type = unassigned DNA
gtcactttcatgaattcaaaggcaatttaccagtgatttctgggtgctggggctgatattttttgtgcatatttaagaatgtcttccaagcaagccacctctccatttgcctgtgcagctgatggagaggatgcaatgacccaggatttaacctcaagggaaaaggaagagggcagtgatcaacatgtggcctcccatctgcctctgcaccccataatgcacaacaaacctcactctgaggagctaccaacacttgtcagtaccattcaacaagatgctgactgggacagcgttctgtcatctcagcaaagaatggaatcagagaataataagttatgttccctatattccttccgaaatacctctacctcaccacataagcctgacgaagggagtcgggaccgtgagataatgaccagtgttacttttggaaccccagagcgccgcaaagggagtcttgccgatgtggtggacacactgaaacagaagaagcttgaggaaatgactcggactgaacaagaggattcctcctgcatggaaaaactactttcaaaagattggaaggaaaaaatggaaagactaaataccagtgaacttcttggagaaattaaaggtacacctgagagcctggcagaaaaagaacggcagctctccaccatgattacccagctgatcagtttacgggagcagctactggcagcgcatgatgaacagaaaaaactggcagcgtcacaaattgagaaacaacggcagcaaatggaccttgctcgccaacagcaagaacagattgcgagacaacagcagcaacttctgcaacagcagcacaaaattaatctcctgcagcaacagatccaggttcagggtcacatgcctccgctcatgatcccaatttttccacatgaccagcggactctggcagcagctgctgctgcccaacagggattcctcttcccccctggaataacatacaaaccaggtgataactaccccgtacagttcattccatcaacaatggcagctgctgctgcttctggactcagccctttacagctccagaagggtcatgtctcccacccacaaattaaccaaaggctaaagggcctaagtgaccgttttggcaggaatttggacacctttgaacatggtggtggccactcttacaaccacaaacagattgagcagctctatgccgctcagctggccagcatgcaggtgtcacctggagcaaagatgccatcaactccacagccaccaaacacagcagggacggtctcacctactgggataaaaaatgaaaagagagggaccagccctgtaactcaagttaaggatgaagcagcagcacagcctctgaatctctcatcccgacccaagacagcagagcctgtaaagtccccaacgtctcccacccagaacctcttcccagccagcaaaaccagccctgtcaatctgccaaacaaaagcagcatccctagccccattggaggaagcctgggaagaggatcctctttagatatcctatctagtctcaactcccctgccctttttggggatcaggatacagtgatgaaagccattcaggaggcgcggaagatgcgagagcagatccagcgggagcaacagcagcaacagccacatggtgttgacgggaaactgtcctccataaataatatggggctgaacagctgcaggaatgaaaaggaaagaacgcgctttgagaatttggggccccagttaacgggaaagtcaaatgaagatggaaaactgggcccaggtgtcatcgaccttactcggccagaagatgcagagggaagtaaagcaatgaatggctctgcagctaaactacagcagtattattgttggccaacaggaggtgccactgtggctgaagcacgagtctacagggacgcccgcggccgtgccagcagcgagccacacattaagcgaccaatgaatgcattcatggtttgggcaaaggatgagaggagaaaaatccttcaggccttccccgacatgcataactccaacattagcaaaatcttaggatctcgctggaaatcaatgtccaaccaggagaagcaaccttattatgaagagcaggcccggctaagcaagatccacttagagaagtacccaaactataaatacaaaccccgaccgaaacgcacctgcattgttgatggcaaaaagcttcggattggggagtataagcaactgatgaggtctcggagacaggagatgaggcagttctttactgtggggcaacagcctcagattccaatcaccacaggaacaggtgttgtgtatcctggtgctatcactatggcaactaccacaccatcgcctcagatgacatctgactgctctagcacctcggccagcccggagcccagcctcccggtcatccagagcacttatggtatgaagacagatggcggaagcctagctggaaatgaaatgatcaatggagaggatgaaatggaaatgtatgatgactatgaagatgaccccaaatcagactatagcagtgaaaatgaagccccggaggctgtcagtgccaactgaggagtttttgtttgctgaattaaagtactctgacatttcacccccctccccaacaaagagttattaaagagcccgcatgcatttgtggctccacaattacatcagcagaatggtcttaattgtttcgtaaagtgtgagacagattaagttttccctgatttttcatgaacttgagttttttgttgttattgttattgttgttgttgttgtttttttaatttaggtgaagacatattaaatatgagacaccaggacttgaaacttatctcaacccgtagatgtcttacaagtcttatatttttgtcttactttttttttcttttggatgttgataaaggtttaagttactgttttagatggggttaaacattctcactcaggtatgctgtgccggcctacaggttgtgaatgtgtttttattctgaattattttagaaaacaactgaggatttcatattgtgaaacagaacaagtccacggcgtgtgcagctgcatgtagagcatattcaaaaggcctcggaattccaattttccatttgtagagttaaactttgaatgtgccaaactttttcgtaacttttgaatcttaatattttgaaagtcttaaaggagacactgcaaagtcttagacaatctttggcatcttaaaataaaatagcaaaccaacatttttttttccagaaaatggtaaggtactcaggaatctggagacaagatattgtaaggaatgaacaaggttgccacagtgcatggacccaattgtgtttgcctgttgacgtgccatcagtgcgtgatgtggtatgacatacacacaccagagcaaccgccacaccagatatcgacagagtggtcttctctgcctgagaccacctctcactacatccattatccctttgcctttaaccctgacattcagtcttaacacattttatcttaaataatttattcattccagaatgtcaagggtccacttgctatttattttttttcaattgttggtggcattaatttaataattcttgtttttcaccttccttccccgaagaacttttccgtccttttcacctccttctcctgtgtacatagtgattttatgtccccagaacgcctggaagcatttctgaaaccaagatattattaaaaacctattattgtttttaatcatgagtatgtatctggctgcagggctgtgtattgggatataggtatatagtcttacacttaaacaggtatgcccctgaggttcactgtgacctcaagtcttttgccagaattttcccctaattcagttcacaagtggtagggtctgcatcagtggcatttccccctgaattccattcagcagcaaggttcaacagtggtgactgccaggcaggagagtcctgcggccaaacctgaagcccaaggctcgtgggccatgcaggaatctcagtgaagctgtcatgggctggcacctttacactgagttgccttgtcccagctggcacatctagggagttcattgcaaaatccccaggatgcaaaaagccacatgacagcctcagagcaaagatggtggcaaatagtcatgatacatctagagaatgaaagaaaactgtaagggaggagaaggaggggaatacattccctatatgggatgttcctactgttaactctggggaacagatagctccgggggcagcagatgagttcctctggctgactctatctgtagccacatggggacctgcctacgtgtgaacaaaatgaactgcacttatcacacaaggatttctttgaagacatgctactggggtgggaagcagtgaggttttattccccatctcctaactacagggagctctgccatgtcattttggccttcctgaaactaggacaggttgtctatcggggggcttcccccagagaggtttagtgggagaatgtcagtgaatgggatagttcacctcatgggacaacccagaatctgatcaccaggacataggaatggccccatcagatttcttgagccattttgtcacttggaagaaaatagtgtacctttgtatttatttaagagtgctcaaggcctaatagcaataaacaggtctagccaagaaattacaagctattctgttagctgggagtgctctctataagctgattaaggtactgataggaactctttgttattcatgttggttggggattagaaatttgtttttgtacatttatttcaaatgaggaggaggtcattttttctctcaaaaaatgagtatttattattgtcttactgatttctttgattatatacctctcctcctcagttcactcttgttttttttctttctctttggcttttgcttttgctctctctcacttctttcttattttgttgcattggtagagtgttgtatggctagcattgtattgtatgtaattaattttgcacaaaagcaaacatttagcatagtaggttaattttgtttgtttttatgaccatgccaaaataatattctgggctggtggagaacaaaggactgttctttaggactgaaacttgattttgctcatagtaagtaaaaaaaaacaaaaaacacacacactcacagatgttgtttcgtaagtgttataagcactggatataaatggtattttttatcacttctgactaatgtgaaactgttgtacgaaaactacatgaacaaaagtcatctgtttcgactcgtgtgggcttgcctcacagttgccggatttgagtcatttttatgtcttgttatttcatttatttatgcaaaatacatgtgtgtatgaacactttgttttagctccagctctgcctcagtactggggttcatttacttttagccatgttcttaaaaatgaaaggctattcaggaatgatctgattgtaaacgtctttttcattggatcaaacagtaatgctgtatttgaatctaaattttgtgtataagcagtttatttattagccaagtttggctctaaatatccatggaaattaagaatgacaatcatagggatcaattcattttattttcagtggggcttaaacaaagtttatatgactttaccatctcattttagatttttctaattgtgtaaatataacatagaaatagaatttatttttggttcatgaatacttagtgagatataagttatgtatttcctttttgttctctatccatagatgttggtccaaactgaaagttgatgagtcactgtgcctctcggggtagtgagttatcagctacagtgagagagcagtgtttggcctgcagctgggacagcaaaacgtttcaccagggttctcatgcagttcagaacccactgtccacagatccagacatttcccttttttcttacagaaagttgatgattggacatactaaatttccactacagttaggagacagtcagtttgctttgggagtctacataaatcttctaagatagttctgtgaccatttaatagcaagaagcatgaatgccactacaaaggcaaaaatccacctctgagatcggccgttaataaacgtcccgtcatgtcagtttagattcaagaatgttaagcaactttgtttttgcggtgctccctatttcatagtatcttcaaatcaaaaataaaaattatctccattttgttaaagaacttacagggtcagggttctccttgtcacttagaattgggacactgccaggcaatcctctcccaaaaaaaaaaaaaaaaaaaaatagccatatggaatggaaggaaaaggagaaaagaaggaagaaaggaaaaaagtaggaagggagagagaaaaaaaaggtcgctttgcggatacgagccgctaggctgacaacttttctatttcattggcagatatgaagcagtgtcttttccagtaaggtacggaagctttgttgttttcatgtgtacccagctcagccttttagaagcacctcggtttgcttcattaggtatttgatactctccagccttgtcctcaggcctgatttgatttgccagggtcctgacaccaaagcccaggccaagttctaaattcaggtgtgggctcacagtgctattgagcttgtcgaattctggcctcccctgaacattagccccacgggagcctgagggtgtttgaaaagggcgtgatcactctagggctgaaattaaaggctgctttcttttccttctgaagccaggctgcttcttcggagtacaccctcctgagccaggagcacaagcactagcagaaagcagggattgtttcaggaaagcccatttaccctcagtaggaaggcagcctggtcacttgaacagcacagctgaggctgcttctctcaatttactcattttgcaaagaattgacctctaccaactcattagggagaggaaaaagaatcacttagtaattttaaatcatatgagaagtcctgtaccaagtgccaacaactgcaaagaaatgcagctagaggaatgtattgaaattactactgggtcttcctttttaatgagaaaatgacaaaaatggttgctgtagccctgcctgattttgtacacgtttgtctaagaattgagttggcacttaagctcacttctcaaagtataataatattgtatgacctcatttgtcctttcacaaaagcacttgcatcatttccttaagtcatctgctccctgacatgttttcttccctaataaacaacttctgtctgttattcctgccaatgatgttctgtttctgatgccatatcctattgagcgtgcccctgtactaatatcattgaaaatattgatatgcaaacacatttccttttcatccccattctatctttccctttggggacagattgctttccaaaagctcatgaacaaatatttggaatgctggtacctttggggcagaggtaagggtgggcggggtgggggcagaaaggtaatgcttaatgcagataactcttctaatcagtgtccatggcaatatgaacgcttgaagaaaactcagtgacatatcttgctcagtagtttcttattcctgaagaaccacaagcataaagtgaggcctcagtgctggtgctcttggagtatggggaatgtgcaaatatttaactgttttgtatgctgcacattgcaggtctgctcatgtgcattctccctttgtcttcctttgtcatatgtgtttttgcttttttgaaagtgcagtctttattgtaccctcctccagcttgtagcaaattagaatgcttagcatttatgttcattcattattgtatttgccatgtaaaatttttattaccttagacaagcttataagctgttactacataacttatcttactgtaactcttttatttcccccgacgttgtaatttgtttgtgatgtatattgtgaaattgtattctatgttaatttaatcagcacaattcactgacatgctggactgacatgctggctgctgtttcaaagtgtaaagtttgtgtagggctgttgggacaactgcaactctgttgtcaaggtactgtgctttggttcctatagcaacactgggtgtggcccttgaattgctaagggcatttaatacatcctggagcaaattttaactgcagattttctttgtagaaattctatgtataatgcaggtacctacttggcccatggctggtaactatttgggcaattagaaaaaaagaaaaaaacataaaaactagtgtctattgctgctttgaatatgtttgaaagtctgaaaatgtaaatagtttatcaaaaaaaaatcttgtacagtccagtgtaaagtttttaaatgaccttaagggttgccatcacatctttctcacactctcctcttgataataataataataaaaagtttgctaaggattaaagaaatgggaaaaataaaaaaaatctcttcaaatttacaggaatgaatcattgttcttagctttgttgcatacacaaacttcttggattttgttgtgcagtattgacgtgagataaagctcaacattgaataatctttcagtggtacttttcaaagtcttcccctcctctgcctcataattaagggaaaagacaaaattgaaagacacactgtctttatctatcctggtgtatgttggcaccttagctactttttttttttcctttttgcacaaggtgctttcctgatatgttcaacatgccatctttgggtgataatgtatatgccgtgatggggctcaggccccttaggggagtgtctataagaactgcctatttatgctcatttacctcaagactgtcctctctaccctaatctagttgtcatcactccatcttttgtactgctgttgacacttacaaattaaagataaattttgttttatga

SEQ ID NO: 29985 - DNA, 8865 bp, Homo sapiens
  source 1..8865: mol_type = unassigned DNA
gtcactttcatgaattcaaaggcaatttaccagtgatttctgggtgctggggctgatattttttgtgcatatttaagaatgtcttccaagcaagccacctctccatttgcctgtgcagctgatggagaggatgcaatgacccaggatttaacctcaagggaaaaggaagagggcagtgatcaacatgtggcctcccatctgcctctgcaccccataatgcacaacaaacctcactctgaggagctaccaacacttgtcagtaccattcaacaagatgctgactgggacagcgttctgtcatctcagcaaagaatggaatcagagaataataagttatgttccctatattccttccgaaatacctctacctcaccacataagcctgacgaagggagtcgggaccgtgagataatgaccagtgttacttttggaaccccagagcgccgcaaagggagtcttgccgatgtggtggacacactgaaacagaagaagcttgaggaaatgactcggactgaacaagaggattcctcctgcatggaaaaactactttcaaaagattggaaggaaaaaatggaaagactaaataccagtgaacttcttggagaaattaaaggtacacctgagagcctggcagaaaaagaacggcagctctccaccatgattacccagctgatcagtttacgggagcagctactggcagcgcatgatgaacagaaaaaactggcagcgtcacaaattgagaaacaacggcagcaaatggaccttgctcgccaacagcaagaacagattgcgagacaacagcagcaacttctgcaacagcagcacaaaattaatctcctgcagcaacagatccaggttcagggtcacatgcctccgctcatgatcccaatttttccacatgaccagcggactctggcagcagctgctgctgcccaacagggattcctcttcccccctggaataacatacaaaccaggtgataactaccccgtacagttcattccatcaacaatggcagctgctgctgcttctggactcagccctttacagctccagaagggtcatgtctcccacccacaaattaaccaaaggctaaagggcctaagtgaccgttttggcaggaatttggacacctttgaacatggtggtggccactcttacaaccacaaacagattgagcagctctatgccgctcagctggccagcatgcaggtgtcacctggagcaaagatgccatcaactccacagccaccaaacacagcagggacggtctcacctactgggataaaaaatgaaaagagagggaccagccctgtaactcaagttaaggatgaagcagcagcacagcctctgaatctctcatcccgacccaagacagcagagcctgtaaagtccccaacgtctcccacccagaacctcttcccagccagcaaaaccagccctgtcaatctgccaaacaaaagcagcatccctagccccattggaggaagcctgggaagaggatcctctttagatatcctatctagtctcaactcccctgccctttttggggatcaggatacagtgatgaaagccattcaggaggcgcggaagatgcgagagcagatccagcgggagcaacagcagcaacagccacatggtgttgacgggaaactgtcctccataaataatatggggctgaacagctgcaggaatgaaaaggaaagaacgcgctttgagaatttggggccccagttaacgggaaagtcaaatgaagatggaaaactgggcccaggtgtcatcgaccttactcggccagaagatgcagagggaggtgccactgtggctgaagcacgagtctacagggacgcccgcggccgtgccagcagcgagccacacattaagcgaccaatgaatgcattcatggtttgggcaaaggatgagaggagaaaaatccttcaggccttccccgacatgcataactccaacattagcaaaatcttaggatctcgctggaaatcaatgtccaaccaggagaagcaaccttattatgaagagcaggcccggctaagcaagatccacttagagaagtacccaaactataaatacaaaccccgaccgaaacgcacctgcattgttgatggcaaaaagcttcggattggggagtataagcaactgatgaggtctcggagacaggagatgaggcagttctttactgtggggcaacagcctcagattccaatcaccacaggaacaggtgttgtgtatcctggtgctatcactatggcaactaccacaccatcgcctcagatgacatctgactgctctagcacctcggccagcccggagcccagcctcccggtcatccagagcacttatggtatgaagacagatggcggaagcctagctggaaatgaaatgatcaatggagaggatgaaatggaaatgtatgatgactatgaagatgaccccaaatcagactatagcagtgaaaatgaagccccggaggctgtcagtgccaactgaggagtttttgtttgctgaattaaagtactctgacatttcacccccctccccaacaaagagttattaaagagcccgcatgcatttgtggctccacaattacatcagcagaatggtcttaattgtttcgtaaagtgtgagacagattaagttttccctgatttttcatgaacttgagttttttgttgttattgttattgttgttgttgttgtttttttaatttaggtgaagacatattaaatatgagacaccaggacttgaaacttatctcaacccgtagatgtcttacaagtcttatatttttgtcttactttttttttcttttggatgttgataaaggtttaagttactgttttagatggggttaaacattctcactcaggtatgctgtgccggcctacaggttgtgaatgtgtttttattctgaattattttagaaaacaactgaggatttcatattgtgaaacagaacaagtccacggcgtgtgcagctgcatgtagagcatattcaaaaggcctcggaattccaattttccatttgtagagttaaactttgaatgtgccaaactttttcgtaacttttgaatcttaatattttgaaagtcttaaaggagacactgcaaagtcttagacaatctttggcatcttaaaataaaatagcaaaccaacatttttttttccagaaaatggtaaggtactcaggaatctggagacaagatattgtaaggaatgaacaaggttgccacagtgcatggacccaattgtgtttgcctgttgacgtgccatcagtgcgtgatgtggtatgacatacacacaccagagcaaccgccacaccagatatcgacagagtggtcttctctgcctgagaccacctctcactacatccattatccctttgcctttaaccctgacattcagtcttaacacattttatcttaaataatttattcattccagaatgtcaagggtccacttgctatttattttttttcaattgttggtggcattaatttaataattcttgtttttcaccttccttccccgaagaacttttccgtccttttcacctccttctcctgtgtacatagtgattttatgtccccagaacgcctggaagcatttctgaaaccaagatattattaaaaacctattattgtttttaatcatgagtatgtatctggctgcagggctgtgtattgggatataggtatatagtcttacacttaaacaggtatgcccctgaggttcactgtgacctcaagtcttttgccagaattttcccctaattcagttcacaagtggtagggtctgcatcagtggcatttccccctgaattccattcagcagcaaggttcaacagtggtgactgccaggcaggagagtcctgcggccaaacctgaagcccaaggctcgtgggccatgcaggaatctcagtgaagctgtcatgggctggcacctttacactgagttgccttgtcccagctggcacatctagggagttcattgcaaaatccccaggatgcaaaaagccacatgacagcctcagagcaaagatggtggcaaatagtcatgatacatctagagaatgaaagaaaactgtaagggaggagaaggaggggaatacattccctatatgggatgttcctactgttaactctggggaacagatagctccgggggcagcagatgagttcctctggctgactctatctgtagccacatggggacctgcctacgtgtgaacaaaatgaactgcacttatcacacaaggatttctttgaagacatgctactggggtgggaagcagtgaggttttattccccatctcctaactacagggagctctgccatgtcattttggccttcctgaaactaggacaggttgtctatcggggggcttcccccagagaggtttagtgggagaatgtcagtgaatgggatagttcacctcatgggacaacccagaatctgatcaccaggacataggaatggccccatcagatttcttgagccattttgtcacttggaagaaaatagtgtacctttgtatttatttaagagtgctcaaggcctaatagcaataaacaggtctagccaagaaattacaagctattctgttagctgggagtgctctctataagctgattaaggtactgataggaactctttgttattcatgttggttggggattagaaatttgtttttgtacatttatttcaaatgaggaggaggtcattttttctctcaaaaaatgagtatttattattgtcttactgatttctttgattatatacctctcctcctcagttcactcttgttttttttctttctctttggcttttgcttttgctctctctcacttctttcttattttgttgcattggtagagtgttgtatggctagcattgtattgtatgtaattaattttgcacaaaagcaaacatttagcatagtaggttaattttgtttgtttttatgaccatgccaaaataatattctgggctggtggagaacaaaggactgttctttaggactgaaacttgattttgctcatagtaagtaaaaaaaaacaaaaaacacacacactcacagatgttgtttcgtaagtgttataagcactggatataaatggtattttttatcacttctgactaatgtgaaactgttgtacgaaaactacatgaacaaaagtcatctgtttcgactcgtgtgggcttgcctcacagttgccggatttgagtcatttttatgtcttgttatttcatttatttatgcaaaatacatgtgtgtatgaacactttgttttagctccagctctgcctcagtactggggttcatttacttttagccatgttcttaaaaatgaaaggctattcaggaatgatctgattgtaaacgtctttttcattggatcaaacagtaatgctgtatttgaatctaaattttgtgtataagcagtttatttattagccaagtttggctctaaatatccatggaaattaagaatgacaatcatagggatcaattcattttattttcagtggggcttaaacaaagtttatatgactttaccatctcattttagatttttctaattgtgtaaatataacatagaaatagaatttatttttggttcatgaatacttagtgagatataagttatgtatttcctttttgttctctatccatagatgttggtccaaactgaaagttgatgagtcactgtgcctctcggggtagtgagttatcagctacagtgagagagcagtgtttggcctgcagctgggacagcaaaacgtttcaccagggttctcatgcagttcagaacccactgtccacagatccagacatttcccttttttcttacagaaagttgatgattggacatactaaatttccactacagttaggagacagtcagtttgctttgggagtctacataaatcttctaagatagttctgtgaccatttaatagcaagaagcatgaatgccactacaaaggcaaaaatccacctctgagatcggccgttaataaacgtcccgtcatgtcagtttagattcaagaatgttaagcaactttgtttttgcggtgctccctatttcatagtatcttcaaatcaaaaataaaaattatctccattttgttaaagaacttacagggtcagggttctccttgtcacttagaattgggacactgccaggcaatcctctcccaaaaaaaaaaaaaaaaaaaaatagccatatggaatggaaggaaaaggagaaaagaaggaagaaaggaaaaaagtaggaagggagagagaaaaaaaaggtcgctttgcggatacgagccgctaggctgacaacttttctatttcattggcagatatgaagcagtgtcttttccagtaaggtacggaagctttgttgttttcatgtgtacccagctcagccttttagaagcacctcggtttgcttcattaggtatttgatactctccagccttgtcctcaggcctgatttgatttgccagggtcctgacaccaaagcccaggccaagttctaaattcaggtgtgggctcacagtgctattgagcttgtcgaattctggcctcccctgaacattagccccacgggagcctgagggtgtttgaaaagggcgtgatcactctagggctgaaattaaaggctgctttcttttccttctgaagccaggctgcttcttcggagtacaccctcctgagccaggagcacaagcactagcagaaagcagggattgtttcaggaaagcccatttaccctcagtaggaaggcagcctggtcacttgaacagcacagctgaggctgcttctctcaatttactcattttgcaaagaattgacctctaccaactcattagggagaggaaaaagaatcacttagtaattttaaatcatatgagaagtcctgtaccaagtgccaacaactgcaaagaaatgcagctagaggaatgtattgaaattactactgggtcttcctttttaatgagaaaatgacaaaaatggttgctgtagccctgcctgattttgtacacgtttgtctaagaattgagttggcacttaagctcacttctcaaagtataataatattgtatgacctcatttgtcctttcacaaaagcacttgcatcatttccttaagtcatctgctccctgacatgttttcttccctaataaacaacttctgtctgttattcctgccaatgatgttctgtttctgatgccatatcctattgagcgtgcccctgtactaatatcattgaaaatattgatatgcaaacacatttccttttcatccccattctatctttccctttggggacagattgctttccaaaagctcatgaacaaatatttggaatgctggtacctttggggcagaggtaagggtgggcggggtgggggcagaaaggtaatgcttaatgcagataactcttctaatcagtgtccatggcaatatgaacgcttgaagaaaactcagtgacatatcttgctcagtagtttcttattcctgaagaaccacaagcataaagtgaggcctcagtgctggtgctcttggagtatggggaatgtgcaaatatttaactgttttgtatgctgcacattgcaggtctgctcatgtgcattctccctttgtcttcctttgtcatatgtgtttttgcttttttgaaagtgcagtctttattgtaccctcctccagcttgtagcaaattagaatgcttagcatttatgttcattcattattgtatttgccatgtaaaatttttattaccttagacaagcttataagctgttactacataacttatcttactgtaactcttttatttcccccgacgttgtaatttgtttgtgatgtatattgtgaaattgtattctatgttaatttaatcagcacaattcactgacatgctggactgacatgctggctgctgtttcaaagtgtaaagtttgtgtagggctgttgggacaactgcaactctgttgtcaaggtactgtgctttggttcctatagcaacactgggtgtggcccttgaattgctaagggcatttaatacatcctggagcaaattttaactgcagattttctttgtagaaattctatgtataatgcaggtacctacttggcccatggctggtaactatttgggcaattagaaaaaaagaaaaaaacataaaaactagtgtctattgctgctttgaatatgtttgaaagtctgaaaatgtaaatagtttatcaaaaaaaaatcttgtacagtccagtgtaaagtttttaaatgaccttaagggttgccatcacatctttctcacactctcctcttgataataataataataaaaagtttgctaaggattaaagaaatgggaaaaataaaaaaaatctcttcaaatttacaggaatgaatcattgttcttagctttgttgcatacacaaacttcttggattttgttgtgcagtattgacgtgagataaagctcaacattgaataatctttcagtggtacttttcaaagtcttcccctcctctgcctcataattaagggaaaagacaaaattgaaagacacactgtctttatctatcctggtgtatgttggcaccttagctactttttttttttcctttttgcacaaggtgctttcctgatatgttcaacatgccatctttgggtgataatgtatatgccgtgatggggctcaggccccttaggggagtgtctataagaactgcctatttatgctcatttacctcaagactgtcctctctaccctaatctagttgtcatcactccatcttttgtactgctgttgacacttacaaattaaagataaattttgttttatga

SEQ ID NO: 29986 - DNA, 534 bp, Homo sapiens
  source 1..534: mol_type = unassigned DNA
gtggaggtagaggatgatttcaattagaaataatgacagcaatagacgcttccaatgaagatatcgtggccaccaaaggacaaaggcaagaagttaattcctgaagtcgagaagaatgtcttccaagcaagccacctctccatttgcctgtgcagctgatggagaggatgcaatgacccaggatttaacctcaagggaaaaggaagagggcagtgatcaacatgtggcctcccatctgcctctgcaccccataatgcacaacaaacctcactctgaggagctaccaacacttgtcagtaccattcaacaagatgctgactgggacagcgttctgtcatctcagcaaagaatggaatcagagaataataagttatgttccctatattccttccgaaatacctctacctcaccacataagcctgacgaagggagtcgggaccgtgagataatgaccagtgttacttttggaaccccagagcgccgcaaagggagtcttgccgatgtggtggacacactgaaacagaagaagcttga

SEQ ID NO: 29987 - DNA, 2707 bp, Homo sapiens
  source 1..2707: mol_type = unassigned DNA
ccttggggttagttttagtcatatttttatctctataaaacatcaggctgggaggtggtgtgtgcctgtagtctcaactgctagggagcctgaggcaggaagactccttgagcacaggagttcaaggccagcctgtgcaacatagtgagaccctatcactctggaaaaaaaaaaaaaatctgcggagaagaatgtcttccaagcaagccacctctccatttgcctgtgcagctgatggagaggatgcaatgacccaggatttaacctcaagggaaaaggaagagggcagtgatcaacatgtggcctcccatctgcctctgcaccccataatgcacaacaaacctcactctgaggagctaccaacacttgtcagtaccattcaacaagatgctgactgggacagcgttctgtcatctcagcaaagaatggaatcagagaataataagttatgttccctatattccttccgaaatacctctacctcaccacataagcctgacgaagggagtcgggaccgtgagataatgaccagtgttacttttggaaccccagagcgccgcaaagggagtcttgccgatgtggtggacacactgaaacagaagaagcttgaggaaatgactcggactgaacaagaggattcctcctgcatggaaaaactactttcaaaagattggaaggaaaaaatggaaagactaaataccagtgaacttcttggagaaattaaaggtacacctgagagcctggcagaaaaagaacggcagctctccaccatgattacccagctgatcagtttacgggagcagctactggcagcgcatgatgaacagaaaaaactggcagcgtcacaaattgagaaacaacggcagcaaatggaccttgctcgccaacagcaagaacagattgcgagacaacagcagcaacttctgcaacagcagcacaaaattaatctcctgcagcaacagatccaggttcagggtcacatgcctccgctcatgatcccaatttttccacatgaccagcggactctggcagcagctgctgctgcccaacagggattcctcttcccccctggaataacatacaaaccaggtgataactaccccgtacagttcattccatcaacaatggcagctgctgctgcttctggactcagccctttacagctccagcagctctatgccgctcagctggccagcatgcaggtgtcacctggagcaaagatgccatcaactccacagccaccaaacacagcagggacggtctcacctactgggataaaaaatgaaaagagagggaccagccctgtaactcaagttaaggatgaagcagcagcacagcctctgaatctctcatcccgacccaagacagcagagcctgtaaagtccccaacgtctcccacccagaacctcttcccagccagcaaaaccagccctgtcaatctgccaaacaaaagcagcatccctagccccattggaggaagcctgggaagaggatcctctttaggtaaatggaaaagtcaacaccaggaagagacttacgaattagatatcctatctagtctcaactcccctgccctttttggggatcaggatacagtgatgaaagccattcaggaggcgcggaagatgcgagagcagatccagcgggagcaacagcagcaacagccacatggtgttgacgggaaactgtcctccataaataatatggggctgaacagctgcaggaatgaaaaggaaagaacgcgctttgagaatttggggccccagttaacgggaaagtcaaatgaagatggaaaactgggcccaggtgtcatcgaccttactcggccagaagatgcagagggaagtaaagcaatgaatggctctgcagctaaactacagcagtattattgttggccaacaggaggtgccactgtggctgaagcacgagtctacagggacgcccgcggccgtgccagcagcgagccacacattaagcgaccaatgaatgcattcatggtttgggcaaaggatgagaggagaaaaatccttcaggccttccccgacatgcataactccaacattagcaaaatcttaggatctcgctggaaatcaatgtccaaccaggagaagcaaccttattatgaagagcaggcccggctaagcaagatccacttagagaagtacccaaactataaatacaaaccccgaccgaaacgcacctgcattgttgatggcaaaaagcttcggattggggagtataagcaactgatgaggtctcggagacaggagatgaggcagttctttactgtggggcaacagcctcagattccaatcaccacaggaacaggtgttgtgtatcctggtgctatcactatggcaactaccacaccatcgcctcagatgacatctgactgctctagcacctcggccagcccggagcccagcctcccggtcatccagagcacttatggtatgaagacagatggcggaagcctagctggaaatgaaatgatcaatggagaggatgaaatggaaatgtatgatgactatgaagatgaccccaaatcagactatagcagtgaaaatgaagccccggaggctgtcagtgccaactgaggagtttttgtttgctgaattaaagtactctgacatttcacccccctccccaacaaagagttattaaagagcccgcatgcatttgtggctccacaattacatcagcagaa

SEQ ID NO: 29988 - DNA, 2656 bp, Homo sapiens
  source 1..2656: mol_type = unassigned DNA
gttaggagagaccattggggataggaaagatgaaaggtcatggtgagcttcaaggacatgaaagaagaatgtcttccaagcaagccacctctccatttgcctgtgcagctgatggagaggatgcaatgacccaggatttaacctcaagggaaaaggaagagggcagtgatcaacatgtggcctcccatctgcctctgcaccccataatgcacaacaaacctcactctgaggagctaccaacacttgtcagtaccattcaacaagatgctgactgggacagcgttctgtcatctcagcaaagaatggaatcagagaataataagttatgttccctatattccttccgaaatacctctacctcaccacataagcctgacgaagggagtcgggaccgtgagataatgaccagtgttacttttggaaccccagagcgccgcaaagggagtcttgccgatgtggtggacacactgaaacagaagaagcttgaggaaatgactcggactgaacaagaggattcctcctgcatggaaaaactactttcaaaagattggaaggaaaaaatggaaagactaaataccagtgaacttcttggagaaattaaaggtacacctgagagcctggcagaaaaagaacggcagctctccaccatgattacccagctgatcagtttacgggagcagctactggcagcgcatgatgaacagaaaaaactggcagcgtcacaaattgagaaacaacggcagcaaatggaccttgctcgccaacagcaagaacagattgcgagacaacagcagcaacttctgcaacagcagcacaaaattaatctcctgcagcaacagatccaggttcagggtcacatgcctccgctcatgatcccaatttttccacatgaccagcggactctggcagcagctgctgctgcccaacagggattcctcttcccccctggaataacatacaaaccaggtgataactaccccgtacagttcattccatcaacaatggcagctgctgctgcttctggactcagccctttacagctccagaagggtcatgtctcccacccacaaattaaccaaaggctaaagggcctaagtgaccgttttggcaggaatttggacacctttgaacatggtggtggccactcttacaaccacaaacagattgagcagctctatgccgctcagctggccagcatgcaggtgtcacctggagcaaagatgccatcaactccacagccaccaaacacagcagggacggtctcacctactgggataaaaaatgaaaagagagggaccagccctgtaactcaagttaaggatgaagcagcagcacagcctctgaatctctcatcccgacccaagacagcagagcctgtaaagtccccaacgtctcccacccagaacctcttcccagccagcaaaaccagccctgtcaatctgccaaacaaaagcagcatccctagccccattggaggaagcctgggaagaggatcctctttagatatcctatctagtctcaactcccctgccctttttggggatcaggatacagtgatgaaagccattcaggaggcgcggaagatgcgagagcagatccagcgggagcaacagcagcaacagccacatggtgttgacgggaaactgtcctccataaataatatggggctgaacagctgcaggaatgaaaaggaaagaacgcgctttgagaatttggggccccagttaacgggaaagtcaaatgaagatggaaaactgggcccaggtgtcatcgaccttactcggccagaagatgcagagggaagtaaagcaatgaatggctctgcagctaaactacagcagtattattgttggccaacaggaggtgccactgtggctgaagcacgagtctacagggacgcccgcggccgtgccagcagcgagccacacattaagcgaccaatgaatgcattcatggtttgggcaaaggatgagaggagaaaaatccttcaggccttccccgacatgcataactccaacattagcaaaatcttaggatctcgctggaaatcaatgtccaaccaggagaagcaaccttattatgaagagcaggcccggctaagcaagatccacttagagaagtacccaaactataaatacaaaccccgaccgaaacgcacctgcattgttgatggcaaaaagcttcggattggggagtataagcaactgatgaggtctcggagacaggagatgaggcagttctttactgtggggcaacagcctcagattccaatcaccacaggaacaggtgttgtgtatcctggtgctatcactatggcaactaccacaccatcgcctcagatgacatctgactgctctagcacctcggccagcccggagcccagcctcccggtcatccagagcacttatggtatgaagacagatggcggaagcctagctggaaatgaaatgatcaatggagaggatgaaatggaaatgtatgatgactatgaagatgaccccaaatcagactatagcagtgaaaatgaagccccggaggctgtcagtgccaactgaggagtttttgtttgctgaattaaagtactctgacatttcacccccctccccaacaaagagttattaaagagcccgcatgcatttgtggctccacaattaca

SEQ ID NO: 29989 - DNA, 549 bp, Homo sapiens
  source 1..549: mol_type = unassigned DNA
aaagaaagagcaagccccataatggcagcatctttatcttgcacactagtctgtctcttgtgcctgtaacaatgccaggaactttagtaactatttttttttgaattttgacaatcttggtcgacaagggtaaaaaaggacattccagaagcagaaaaacatgagcaaaagtatggagacatcaaaggtcatggcatatgttcgtttatcatggctggaatgaggggtatgaggaagatgactgagagtgtgtactttggagtcagtcagagcagagttgacttcattttatgctacctttatgattaagaatgtcttccaagcaagccacctctccatttgcctgtgcagctgatggagaggatgcaatgacccaggatttaacctcaagggaaaaggaagagggcagtgatcaacatgtggcctcccatctgcctctgcaccccataatgcacaacaaacctcactctgaggagctaccaacacttgtcagtaccattcaacaagatgctgactgggacagcgttctgtcatctcagcaaagaatgg

SEQ ID NO: 29990 - DNA, 586 bp, Homo sapiens
  source 1..586: mol_type = unassigned DNA
gattattaatccagctagagaagaaatatgcttttacttagcaagaatgagtatccaaagagctgataatattgttaaggcagcggggtggaatggcagagcttgaagaatgtcttccaagcaagccacctctccatttgcctgtgcagctgatggagaggatgcaatgacccaggatttaacctcaagggaaaaggaagagggcagtgatcaacatgtggcctcccatctgcctctgcaccccataatgcacaacaaacctcactctgaggagctaccaacacttgtcagtaccattcaacaagatgctgactgggacagcgttctgtcatctcagcaaagaatggaatcagagaataataagttatgttccctatattccttccgaaatacctctacctcaccacataagcctgacgaagggagtcgggaccgtgagataatgaccagtgttacttttggaaccccagagcgccgcaaagggagtcttgccgatgtggtggacacactgaaacagaagaagcttgaggaaatgactcggactgaacaagaggattcctcctgcatggaaaaactactttcaaaa

SEQ ID NO: 29991 - DNA, 2699 bp, Homo sapiens
  source 1..2699: mol_type = unassigned DNA
gggataggaaagatgaaaggtcatggtgagcttcaaggacatgaaaggttgttgtctcatgtaacaatagtagattgttttttttcctaatatttctagccagcccctaagtcaggtgatggaacaaatacctacagtttagtcaggtgaaacaggagtgggtggaggaaggaaagaagaaaaatgggaagaatgtcttccaagcaagccacctctccatttgcctgtgcagctgatggagaggatgcaatgacccaggatttaacctcaagggaaaaggaagagggcagtgatcaacatgtggcctcccatctgcctctgcaccccataatgcacaacaaacctcactctgaggagctaccaacacttgtcagtaccattcaacaagatgctgactgggacagcgttctgtcatctcagcaaagaatggaatcagagaataataagttatgttccctatattccttccgaaatacctctacctcaccacataagcctgacgaagggagtcgggaccgtgagataatgaccagtgttacttttggaaccccagagcgccgcaaagggagtcttgccgatgtggtggacacactgaaacagaagaagcttgaggaaatgactcggactgaacaagaggattcctcctgcatggaaaaactactttcaaaagattggaaggaaaaaatggaaagactaaataccagtgaacttcttggagaaattaaaggtacacctgagagcctggcagaaaaagaacggcagctctccaccatgattacccagctgatcagtttacgggagcagctactggcagcgcatgatgaacagaaaaaactggcagcgtcacaaattgagaaacaacggcagcaaatggaccttgctcgccaacagcaagaacagattgcgagacaacagcagcaacttctgcaacagcagcacaaaattaatctcctgcagcaacagatccaggttcagggtcacatgcctccgctcatgatcccaatttttccacatgaccagcggactctggcagcagctgctgctgcccaacagggattcctcttcccccctggaataacatacaaaccaggtgataactaccccgtacagttcattccatcaacaatggcagctgctgctgcttctggactcagccctttacagctccagcagctctatgccgctcagctggccagcatgcaggtgtcacctggagcaaagatgccatcaactccacagccaccaaacacagcagggacggtctcacctactgggataaaaaatgaaaagagagggaccagccctgtaactcaagttaaggatgaagcagcagcacagcctctgaatctctcatcccgacccaagacagcagagcctgtaaagtccccaacgtctcccacccagaacctcttcccagccagcaaaaccagccctgtcaatctgccaaacaaaagcagcatccctagccccattggaggaagcctgggaagaggatcctctttaggtaaatggaaaagtcaacaccaggaagagacttacgaattagatatcctatctagtctcaactcccctgccctttttggggatcaggatacagtgatgaaagccattcaggaggcgcggaagatgcgagagcagatccagcgggagcaacagcagcaacagccacatggtgttgacgggaaactgtcctccataaataatatggggctgaacagctgcaggaatgaaaaggaaagaacgcgctttgagaatttggggccccagttaacgggaaagtcaaatgaagatggaaaactgggcccaggtgtcatcgaccttactcggccagaagatgcagagggaagtaaagcaatgaatggctctgcagctaaactacagcagtattattgttggccaacaggaggtgccactgtggctgaagcacgagtctacagggacgcccgcggccgtgccagcagcgagccacacattaagcgaccaatgaatgcattcatggtttgggcaaaggatgagaggagaaaaatccttcaggccttccccgacatgcataactccaacattagcaaaatcttaggatctcgctggaaatcaatgtccaaccaggagaagcaaccttattatgaagagcaggcccggctaagcaagatccacttagagaagtacccaaactataaatacaaaccccgaccgaaacgcacctgcattgttgatggcaaaaagcttcggattggggagtataagcaactgatgaggtctcggagacaggagatgaggcagttctttactgtggggcaacagcctcagattccaatcaccacaggaacaggtgttgtgtatcctggtgctatcactatggcaactaccacaccatcgcctcagatgacatctgactgctctagcacctcggccagcccggagcccagcctcccggtcatccagagcacttatggtatgaagacagatggcggaagcctagctggaaatgaaatgatcaatggagaggatgaaatggaaatgtatgatgactatgaagatgaccccaaatcagactatagcagtgaaaatgaagccccggaggctgtcagtgccaactgaggagtttttgtttgctgaattaaagtactctgacatttcacccccctccccaacaaagagttattaaagagcccgcatgcatttgtggctccacaattaca

SEQ ID NO: 29992 - DNA, 3216 bp, Homo sapiens
  source 1..3216: mol_type = unassigned DNA
aagttggacgccccgacccgtgcgagggccaggtccgcgcctgccccgccaggcgaagcgaggcgacccgcgtgcggccatggcttcgctgctgggagcctacccttggcccgagggtctcgagtgcccggccctggacgccgagctgtcggatggacaatcgccgccggccgtcccccggcccccgggggacaagggctccgagagccgtatccggcggcccatgaacgccttcatggtttgggccaaggacgagaggaaacggctggcagtgcagaacccggacctgcacaacgccgagctcagcaagatgctgggaaagtcgtggaaggcgctgacgctgtcccagaagaggccgtacgtggacgaggcggagcggctgcgcctgcagcacatgcaggactaccccaactacaagtaccggccgcgcaggaagaagcaggccaagcggctgtgcaagcgcgtggacccgggcttccttctgagctccctctcccgggaccagaacgccctgccggagaagagaagcggcagccggggggcgctgggggagaaggaggacaggggtgagtactcccccggcactgccctgcccagcctccggggctgctaccacgaggggccggctggtggtggcggcggcggcaccccgagcagtgtggacacgtacccgtacgggctgcccacacctcctgaaatgtctcccctggacgtgctggagccggagcagaccttcttctcctccccctgccaggaggagcatggccatccccgccgcatcccccacctgccagggcacccgtactcaccggagtacgccccaagccctctccactgtagccaccccctgggctccctggcccttggccagtcccccggcgtctccatgatgtcccctgtacccggctgtcccccatctcctgcctattactccccggccacctaccacccactccactccaacctccaagcccacctgggccagctttccccgcctcctgagcaccctggcttcgacgccctggatcaactgagccaggtggaactcctgggggacatggatcgcaatgaattcgaccagtatttgaacactcctggccacccagactccgccacaggggccatggccctcagtgggcatgttccggtctcccaggtgacaccaacgggtcccacagagaccagcctcatctccgtcctggctgatgccacggccacgtactacaacagctacagtgtgtcatagagctggaggcgccccgtccggtcagccctcgcgccctctccttcttgtgccttgagtggcagaggagccgtccagccacaccagctttcctcccaccgctcagggcagggaggtctgaactgcggccccagagcctttggcctaagctggactctccttatccgagtgccgcctctatccccttccccacgttccagcccctgcagcccacattttaagtatattccttcaagtgagttttcctccagcccctgagagttgctgtctcccagtggaatgttcactgacgtcttttcttggtagccatcatcgaaactaatggggggacagacttgatagccaaggtcccttctggtccagttttctgatttagggttctctcaagattaataaaggaagatggggaaatttgactcattaatgagctcgctaacctacgatctggtgataattttgtgtgcacagcccaaggaccacgaggctttctgcactttctgcacccccttccaaagtgaccacaaaatttcaaagggactcatacaatttgagaaaaaacagtcaacctgatttgagaaattaaccagtatggctaactatatcacagaaaatgggattgagttaaaactattttattttaaatatacattttaaagcagttctttttttttgttaatttgtttattatacacacacttcaagagaatatgcacagtctaggccgggcacggtggctcacgcctgtaatcccagcactttgggaggccgaggcatgtggatcacctgaggtcaggagtttgagaccagcctagacaacatggtgaaaccttgtctctatgaaaaatacaaaatttgctgggagtggtggtgcatgcctgtaatcccagctacttggaaggctgaggcaggagaatgtcttgaacctaggaggtggaggttgcagtgagctgagattgcaccattgcactccagcctgtgcaacaagagtgaaactccatttcaagaaaaaaaaaaaaaaaagaatatgcacagtctgaatgtataccaggagtgtgagagacacatgcccacttcatgcaactcctaaactcaaagtctaaatcagatatttttattaacaatgacaacttgttgccaactccctgtttctaatgaccaaagacccagggtacctaaaaggactttgcaaccaagcaaagtcactgtcttcaaatctggatacacactttcccctctgtagattcaaaaggtgcttccttcccggctgtctccagcttccttactctcttttctgggatttctttttctcttctttctgctcttcctccactgctgaactggtccctaactgaaacagcccctgacttatcccaagcatgcttcctttagctgctgtgagaatttgtcttcctcaccagccaggtcctcaggcaaagtcctcagccagtgctttagagcaacttcccgcaaatcagaaactcactgtgattccaaaaatgtttctgagccctggacccctgcccccaaaatattttcatctttcccccaaacctcctttaaaggagcatgcataacagtgtgctgaaagacagttgttggttttttgattttagcatattatttcctgtatgaaatatgttttatataatctcctattatttttatcttatgttttgtattgttgataaatcctttttgtccttctaagatgtcctattgtaaaatcacttataaggtatgattactctttatgctattactttatatgccatttggtaataaatagtaaattgttgatgatatgattgactgatgcgcagtccagagcatgtatgaataatctcataaaacagtatcacagacattaagctaaactgtttcgtttttttgaaagaacaactcatactttggaacagttgtcaatattaatttgttgcaaatatttaatttaaataaacatttttgtaccatga

SEQ ID NO: 29993 - DNA, 1753 bp, Homo sapiens
  source 1..1753: mol_type = unassigned DNA
tacgcacgtcctgattctcctggagtctccagcccgcccagtggccgcagtcacccaggtccagaggcggcggtatcacaggctctccgacatgtctatgctggctgaacgtcggcggaagcagaagtgggctgtggatcctcagaacactgcctggagtaatgacgattccaagtttggccagcggatgctagagaagatggggtggtctaaaggaaagggtttaggggctcaggagcaaggagccacagatcatattaaagttcaagtgaaaaataaccacctgggactcggagctaccatcaataatgaagacaactggattgcccatcaggatgattttaaccagcttctggccgaactgaacacttgccatgggcaggaaaccacagattcctcggacaagaaggaaaagaaatcttttagccttgaggaaaagtccaaaatctccaaaaaccgtgttcactatatgaaattcacaaaaggaaagtcgtggaaggcgctgacgctgtcccagaagaggccgtacgtggacgaggcggagcggctgcgcctgcagcacatgcaggactaccccaactacaagtaccggccgcgcaggaagaagcaggccaagcggctgtgcaagcgcgtggacccgggcttccttctgagctccctctcccgggaccagaacgccctgccggagaagagaagcggcagccggggggcgctgggggagaaggaggacaggggtgagtactcccccggcactgccctgcccagcctccggggctgctaccacgaggggccggctggtggtggcggcggcggcaccccgagcagtgtggacacgtacccgtacgggctgcccacacctcctgaaatgtctcccctggacgtgctggagccggagcagaccttcttctcctccccctgccaggaggagcatggccatccccgccgcatcccccacctgccagggcacccgtactcaccggagtacgccccaagccctctccactgtagccaccccctgggctccctggcccttggccagtcccccggcgtctccatgatgtcccctgtacccggctgtcccccatctcctgcctattactccccggccacctaccacccactccactccaacctccaagcccacctgggccagctttccccgcctcctgagcaccctggcttcgacgccctggatcaactgagccaggtggaactcctgggggacatggatcgcaatgaattcgaccagtatttgaacactcctggccacccagactccgccacaggggccatggccctcagtgggcatgttccggtctcccaggtgacaccaacgggtcccacagagaccagcctcatctccgtcctggctgatgccacggccacgtactacaacagctacagtgtgtcatagagctggaggcgccccgtccggtcagccctcgcgccctctccttcttgtgccttgagtggcagaggagccgtccagccacaccagctttcctcccaccgctcagggcagggaggtctgaactgcggccccagagcctttggcctaagctggactctccttatccgagtgccgcctctatccccttccccacgttccagcccctgcagcccacattttaagtatattccttcaagtgagttttcctccagcccctgagagttgctgtctcccagtggaatgttcactgacgtcttttcttggtagccatcatcgaaactaatggggggacagacttgatag

SEQ ID NO: 29994 - DNA, 3049 bp, Homo sapiens
  source 1..3049: mol_type = unassigned DNA
ggcgagggtcggggccaccgcgcggcgacctcgggtcccggagcgaccgcagggcagccccgggcgccggccccggtgcgcgtctcctgtgcgcgcccctccgcgcgcggccccgatgctggacatgagcgaggcccgctcccagccgccctgcagcccgtccggcaccgccagctccatgtcgcacgtggaggactcggactcggacgcgccgccgtctcccgccggctccgagggcctgggccgcgcgggggtcgcggtggggggcgcccggggcgacccggcggaggcggcggacgagcgcttcccggcctgcatccgcgacgccgtgtcgcaggtgctcaagggctacgactggagtctggtgcccatgccggtgcgcggcggcggcggcggcgcgctcaaagccaagccgcatgtgaagcggcccatgaacgcattcatggtgtgggcgcaggcggcgcgccgcaagctggccgaccagtacccgcacctgcacaacgccgagctcagcaagacgctgggcaagctgtggcgcttgctgagcgagagcgagaagcggcccttcgtggaggaggcagagcgccttcgcgtgcagcacaagaaggaccaccccgactacaagtaccagccacggcgcaggaagagcgccaaagccggccacagcgactccgactcgggcgcggagctgggaccccaccctggcggcggtgccgtgtacaaggctgaagcagggcttggagatgggcaccaccatggcgaccacacagggcagacccacgggccgcccaccccgcccaccacccccaagacggagctgcagcaggcgggcgccaagccggagctgaagctggagggacgccggccggtggacagcgggcgccagaacatcgacttcagcaatgtggacatctcggagctcagcagcgaggtcatgggcaccatggacgccttcgacgtccacgagttcgaccagtacctgcccctgggcggccccgccccacccgagccgggccaggcctatgggggcgcctacttccacgccggggcgtcccccgtgtgggcccacaagagtgccccgtcggcctccgcgtcgcccaccgagacgggtcccccacggccgcacatcaagacggagcagccgagccccggccactacggcgaccagccccgaggctcgcccgactacggttcctgcagcggccagtccagcgccaccccggccgcccccgccggccccttcgccggctcacagggcgactatggcgacctgcaggcctccagctactatggtgcctaccctggctacgcacccggcctctaccagtacccctgcttccactcgccgcgccggccctacgcctcacccctgctcaacggcctggccctgccgcccgcccacagccccaccagtcactgggaccagccggtgtacaccaccctgaccaggccctgagggcccagccgcggggagggactcgcaggcgtcagggggcagccttgtcccggcccagtgtgtgtgaccagggcgggaggggccccagtggctgagctccaagtgcctgctgaagtctgcagggaaacacgcttgctgcccgtggccctcggcctccagatggccacacctctgccgacgacggaccagctccctctcccttctatctttctttttgaggtggtgggattattccacaaagaagggctgccgtttggtccctcttccgtgaggactggcggcaccagcaccttcgctttgcatctcggtagaggagaaacggcagcacagcccaaggaccaaaggagggggtggcaggggccttgcagggcgctgtgaggtccaggccggtcttggcgccgagagcccctgcactcaaggccacattccctcgacaacggctgcacgggctgtccgggatccggggtgtctgtccgcagactgggatgagtctactcgagcatctccgggacctgcctgtcagatctgaggtgtctccttgctggcagagtgcgctcacgcgagggctggctgtgatgaacacatctctcttttatttttatgtttttgataatttttatttttgaagcttaaatgtgtttcttctgaaagctgttaaagatgtatttatgttctgtgttattttatctttaattaatgaggtaattcgggcaaagagtagaatttaagacaaaacggaagctgggaagcttcccttgagggcaggcaggaggtggagttgcagctgttggccggcatcacgttgctcgttgctcggcttatgggaggccgccctggagggcccggaggtcccaaggtccctgggaggactgggcccctcatgcctcgagcttggcaaccgaaaacccgagggaggagaagggacctgccttgtgacatctctgatcaggttggggtgccccagcacccagtaccagtttggggtttgggaagcaggactccgtccctgtccccgactgtgccacgtggtaggacacataggacacaggaattcctgggtccttgcccatgactgtgccatgtggtaggacacaggacacaggaattcctggaaagtggtggcttcagaagtgatcttggctcgcaggcaccagtgccacctaccaagctgtgaaactaaaccttctccactaaacgtcgttagggcctcagttctagacgagtcatacctgattcacctgcactgcttcccctgtgtgctgagcatagagcatacaatagcgcctacttcacggaaacttgtgcctttaaactttgtaaacttaaacacagccgagaagttgcttctttgtactttttctacttttcctacttttttgtagaaaaaaaagataatgcctctgcttctatttctctgggggtgggggtgggggccgggagccgtcgcagacccgtttcatgcagcgtctcccttggcaccgcgttcggaggacgcaccctcactcccctgctgccttcactcctttctgaccaagcaacgctaacttttgtacagatcgatttgataaaattaaacaaagtgctttttatgga

SEQ ID NO: 29995 - DNA, 3935 bp, Homo sapiens
  source 1..3935: mol_type = unassigned DNA
ggagagccgaaagcggagctcgaaactgactggaaacttcagtggcgcggagactcgccagtttcaaccccggaaacttttctttgcaggaggagaagagaaggggtgcaagcgcccccacttttgctctttttcctcccctcctcctcctctccaattcgcctccccccacttggagcgggcagctgtgaactggccaccccgcgccttcctaagtgctcgccgcggtagccggccgacgcgccagcttccccgggagccgcttgctccgcatccgggcagccgaggggagaggagcccgcgcctcgagtccccgagccgccgcggcttctcgcctttcccggccaccagccccctgccccgggcccgcgtatgaatctcctggaccccttcatgaagatgaccgacgagcaggagaagggcctgtccggcgcccccagccccaccatgtccgaggactccgcgggctcgccctgcccgtcgggctccggctcggacaccgagaacacgcggccccaggagaacacgttccccaagggcgagcccgatctgaagaaggagagcgaggaggacaagttccccgtgtgcatccgcgaggcggtcagccaggtgctcaaaggctacgactggacgctggtgcccatgccggtgcgcgtcaacggctccagcaagaacaagccgcacgtcaagcggcccatgaacgccttcatggtgtgggcgcaggcggcgcgcaggaagctcgcggaccagtacccgcacttgcacaacgccgagctcagcaagacgctgggcaagctctggagacttctgaacgagagcgagaagcggcccttcgtggaggaggcggagcggctgcgcgtgcagcacaagaaggaccacccggattacaagtaccagccgcggcggaggaagtcggtgaagaacgggcaggcggaggcagaggaggccacggagcagacgcacatctcccccaacgccatcttcaaggcgctgcaggccgactcgccacactcctcctccggcatgagcgaggtgcactcccccggcgagcactcggggcaatcccagggcccaccgaccccacccaccacccccaaaaccgacgtgcagccgggcaaggctgacctgaagcgagaggggcgccccttgccagaggggggcagacagccccctatcgacttccgcgacgtggacatcggcgagctgagcagcgacgtcatctccaacatcgagaccttcgatgtcaacgagtttgaccagtacctgccgcccaacggccacccgggggtgccggccacgcacggccaggtcacctacacgggcagctacggcatcagcagcaccgcggccaccccggcgagcgcgggccacgtgtggatgtccaagcagcaggcgccgccgccacccccgcagcagcccccacaggccccgccggccccgcaggcgcccccgcagccgcaggcggcgcccccacagcagccggcggcacccccgcagcagccacaggcgcacacgctgaccacgctgagcagcgagccgggccagtcccagcgaacgcacatcaagacggagcagctgagccccagccactacagcgagcagcagcagcactcgccccaacagatcgcctacagccccttcaacctcccacactacagcccctcctacccgcccatcacccgctcacagtacgactacaccgaccaccagaactccagctcctactacagccacgcggcaggccagggcaccggcctctactccaccttcacctacatgaaccccgctcagcgccccatgtacacccccatcgccgacacctctggggtcccttccatcccgcagacccacagcccccagcactgggaacaacccgtctacacacagctcactcgaccttgaggaggcctcccacgaagggcgaagatggccgagatgatcctaaaaataaccgaagaaagagaggaccaaccagaattccctttggacatttgtgtttttttgtttttttattttgttttgttttttcttcttcttcttcttccttaaagacatttaagctaaaggcaactcgtacccaaatttccaagacacaaacatgacctatccaagcgcattacccacttgtggccaatcagtggccaggccaaccttggctaaatggagcagcgaaatcaacgagaaactggactttttaaaccctcttcagagcaagcgtggaggatgatggagaatcgtgtgatcagtgtgctaaatctctctgcctgtttggactttgtaattatttttttagcagtaattaaagaaaaaagtcctctgtgaggaatattctctattttaaatatttttagtatgtactgtgtatgattcattaccattttgaggggatttatacatatttttagataaaattaaatgctcttatttttccaacagctaaactactcttagttgaacagtgtgccctagcttttcttgcaaccagagtatttttgtacagatttgctttctcttacaaaaagaaaaaaaaaatcctgttgtattaacatttaaaaacagaattgtgttatgtgatcagttttgggggttaactttgcttaattcctcaggctttgcgatttaaggaggagctgccttaaaaaaaaataaaggccttattttgcaattatgggagtaaacaatagtctagagaagcatttggtaagctttatcatatatatattttttaaagaagagaaaaacaccttgagccttaaaacggtgctgctgggaaacatttgcactcttttagtgcatttcctcctgcctttgcttgttcactgcagtcttaagaaagaggtaaaaggcaagcaaaggagatgaaatctgttctgggaatgtttcagcagccaataagtgcccgagcacactgcccccggttgcctgcctgggccccatgtggaaggcagatgcctgctcgctctgtcacctgtgcctctcagaacaccagcagttaaccttcaagacattccacttgctaaaattatttattttgtaaggagaggttttaattaaaacaaaaaaaaattcttttttttttttttttccaattttaccttctttaaaataggttgttggagctttcctcaaagggtatggtcatctgttgttaaattatgttcttaactgtaaccagtttttttttatttatctctttaatctttttttattattaaaagcaagtttctttgtattcctcaccctagatttgtataaatgcctttttgtccatcccttttttctttgttgtttttgttgaaaacaaactggaaacttgtttctttttttgtataaatgagagattgcaaatgtagtgtatcactgagtcatttgcagtgttttctgccacagacctttgggctgccttatattgtgtgtgtgtgtgggtgtgtgtgtgttttgacacaaaaacaatgcaagcatgtgtcatccatatttctctgcatcttctcttggagtgagggaggctacctggaggggatcagcccactgacagaccttaatcttaattactgctgtggctagagagtttgaggattgctttttaaaaaagacagcaaacttttttttttatttaaaaaaagatatattaacagttttagaagtcagtagaataaaatcttaaagcactcataatatggcatccttcaatttctgtataaaagcagatctttttaaaaagatacttctgtaacttaagaaacctggcatttaaatcatattttgtctttaggtaaaagctttggtttgtgttcgtgttttgtttgtttcacttgtttccctcccagccccaaaccttttgttctctccgtgaaacttacctttccctttttctttctcttttttttttttgtatattattgtttacaataaatatacattgcattaaaaagaaa

SEQ ID NO: 29996 - DNA, 1906 bp, Homo sapiens
  source 1..1906: mol_type = unassigned DNA
gagccgaaagcggagctcgaaactgactggaaacttcagtggcgcggagactcgccagtttcaaccccggaaacttttctttgcaggaggagaagagaaggggtgcaagcgcccccacttttgctctttttcctcccctcctcctcctctccaattcgcctccccccacttggagcgggcagctgtgaactggccaccccgcgccttcctaagtgctcgccgcggtagccggccgacgcgccagcttccccgggagccgcttgctccgcatccgggcagccgaggggagaggagcccgcgcctcgagtccccgagccgccgcggcttctcgcctttcccggccaccagccccctgccccgggcccgcgtatgaatctcctggaccccttcatgaagatgaccgacgagcaggagaagggcctgtccggcgcccccagccccaccatgtccgaggactccgcgggctcgccctgcccgtcgggctccggctcggacaccgagaacacgcggccccaggagaacacgttccccaagggcgagcccgatctgaagaaggagagcgaggaggacaagttccccgtgtgcatccgcgaggcggtcagccaggtgctcaaaggctacgactggacgctggtgcccatgccggtgcgcgtcaacggctccagcaagaacaagccgcacgtcaagcggcccatgaacgccttcatggtgtgggcgcaggcggcgcgcaggaagctcgcggaccagtacccgcacttgcacaacgccgagctcagcaagacgctgggcaagctctggagacttctgaacgagagcgagaagcggcccttcgtggaggaggcggagcggctgcgcgtgcagcacaagaaggaccacccggattacaagtaccagccgcggcggaggaagtcggtgaagaacgggcaggcggaggcagaggaggccacggagcagacgcacatctcccccaacgccatcttcaaggcgctgcaggccgactcgccacactcctcctccggcatgagcgaggtgcactcccccggcgagcactcggggcaatcccagggcccaccgaccccacccaccacccccaaaaccgacgtgcagccgggcaaggctgacctgaagcgagaggggcgccccttgccagaggggggcagacagccccctatcgacttccgcgacgtggacatcggcgagctgagcagcgacgtcatctccaacatcgagaccttcgatgtcaacgagtttgaccagtacctgccgcccaacggccacccgggggtgccggccacgcacggccaggtcacctacacgggcagctacggcatcagcagcaccgcggccaccccggcgagcgcgggccacgtgtggatgtccaagcagcaggcgccgccgccacccccgcagcagcactcgccccaacagatcgcctacagccccttcaacctcccacactacagcccctcctacccgcccatcacccgctcacagtacgactacaccgaccaccagaactccagctcctactacagccacgcggcaggccagggcaccggcctctactccaccttcacctacatgaaccccgctcagcgccccatgtacacccccatcgccgacacctctggggtcccttccatcccgcagacccacagcccccagcactgggaacaacccgtctacacacagctcactcgaccttgaggaggcctcccacgaagggcgaagatggccgagatgatcctaaaaataaccgaagaaagagaggaccaaccagaattccctttggacatttgtgtttttttgtttttttattttgttttgttttttcttcttcttcttcttccttaaagacatttaagctaaaggcaactcgtacccaaatttccaagacacaaacatg

SEQ ID NO: 29997 - DNA, 2837 bp, Homo sapiens
  source 1..2837: mol_type = unassigned DNA
agtccgcggcgccacaagcctcagtgtttacttctgccgcctgccagccgggcggggaaggggagtacccggccacccctcactttagctcctgcagctttccaaacaaaccagggcgggatgggagtgtcttcttggctgtggaaatcgatcctcctaccttgtcctgaagccacccgccgcctttcctcgtccctcccttcgcggtgattttccggtcccggcgcccggcgagggcgcgcggctggtgtccgccccgcccgaaaggtgagccagccatgagagggtatcttgtggccatattcctgagtgctgtcttcctctattatgtactgcattgcatattatggggaacgaatgtctattgggtggcacctgtggaaatgaaacggagaaataagatccagccttgtttatcaaagccagcttttgcctctctgctgagtcagagctctgcatatattttaagaaaaggcattgaggaactcaatcaaaccagtattcttttcacacaggtttcatcagtttcacccttttctgtgtgcggctgattttagaaagattgcttccttgtatggtagcgataagtttgatttgccctatgggatgagaacatcagcggaatattttcgacttgctctttcaaaactgcagagttgtgatctctttgatgagtttgacaacataccctgtaaaaagtgtgtggtggttggtaatggaggagttttgaagaataagacattaggagaaaaaatcgactcctatgatgtaataataagaatgaataatggtcctgttttaggacatgaagaagaagttgggagaaggacaaccttccgacttttttatccagaatctgttttttcagatcctattcacaatgaccctaatacgacagtgattctcactgcttttaagccacatgatttaaggtggctgttggaattgttgatgggtgacaaaataaacactaatggtttttggaagaaaccagccttaaacctgatttataaaccttatcaaatccgaatattagatcctttcattatcagaacagcagcttatgaactgcttcattttccaaaagtgtttcccaaaaatcagaaacctaaacacccaacaacaggaattattgccatcacattggcgttttacatatgtcacgaagttcacctagctggttttaaatacaacttttctgacctcaagagtcctttgcactactatgggaatgccaccatgtctttgatgaataagaacgcgtatcacaatgtgactgcagagcagctctttttgaaggacattatagaaaaaaacctcgtaatcaacttgactcaagattgactctacagactcagaagatgatgctaacagtgttagttttatttttgtactgcaatttttagtttaaaatatgttggatgcactcgtcaaataattatgtatactgtctgttgctgcctggtgattcataaccaccagcttaatttctgtgaatactgtatatttaacttatgaaaaccaagaaatgtaaagataacaggaaaataagttttgattgcattgtttttaaaataagctagttttctgaggtgttttcacacgtctttttatagttacttcatcttagatttttgaagggatatgacttcctactaaggatttagtttaccacaacaattctgactacaataagacattttgaggaggatatttggctactgtaaacatggctggtggaaaatcacgattgtggcttgatgtggcaagccgaaaccacttggctctggaaatctaagttcatactggtttaattaagctctctcctgacaacccccagaattaaatgaaccatgattgtgaagagtaatttggtacaatgaaggcagtgtttgtttttaagttaaaggaaatgggctaaacataaagttcttattagataagtaaataactaaagaaagaatacaattactaaactctgatggctttgtattattttaaagaaatgaagtttaactttatacagtgaagctaagctaggcaagctcaagaaggaaaaaaaaatcttgaacattatttttttttgcctgacttacttattcattaaattttgaaggttttccacttgaagtaaattaggaaaggtaaagaagataacagaacaagtaaacacttaagaaaagtcaagctgaggccgggcagggtggctcacacctgtaatcctaacaaacactttgggaggccgagggaggcagctggattgcctgaactcaggagttcaagaccagcctggccaacatggtgaaacctcatctctactaaaatacaaaataattagctgggcgtggtggtatgcgctgtagtcccaggtactcgggaggctgaggcacgagaattgcttgagcccgggaggcagaggttgcagtgagccaagatcgcgccactgcacttcagcctgggtgacagagtgaggctgtcttctaaaaaatataaaaagtgaagttgggatttttggatttaaatggtacaaaaagaatatctcattttcccatgattaaagctaatcttcagatggaaagcttgcctggctacctagggtgcaccagagaatctgatccaatgcaagccagtcaatcctacaaatgtggtgagctagtcttccttcctatattttaataaatgtaaccaaaggccatctggaggtaggggaatgagaggtgaagaaacagaaaaatagaggttataaggatggaactaaaagttgtcagaagaggtatgagctgaagaaagaattactctcttttgaccaataaatacaattgggaaacactggaaaa

SEQ ID NO: 29998 - DNA, 3148 bp, Homo sapiens
  source 1..3148: mol_type = unassigned DNA
tttcctcgtccctcccttcgcggtgattttccggtcccggcgcccggcgagggcgcgcggctggtgtccgccccgcccgaaaggtgagccagccatgagagggtatcttgtggccatattcctgagtgctgtcttcctctattatgtactgcattgcatattatggggaacgaatgtctattgggtggcacctgtggaaatgaaacggagaaataagatccagccttgtttatcaaagccagcttttgcctctctgctgagtcagagctctgcatatattttaagaaaaggcattgaggaactcaatcaaaccagtattcttttcacacaggtttcatcagtttcacccttttctgtgtgcggctgattttagaaagattgcttccttgtatggtagcgataagtttgatttgccctatgggatgagaacatcagcggaatattttcgacttgctctttcaaaactgcagagttgtgatctctttgatgagtttgacaaaatgaataatggtcctgttttaggacatgaagaagaagttgggagaaggacaaccttccgacttttttatccagaatctgttttttcagatcctattcacaatgaccctaatacgacagtgattctcactgcttttaagccacatgatttaaggtggctgttggaattgttgatgggtgacaaaataaacactaatggtttttggaagaaaccagccttaaacctgatttataaaccttatcaaatccgaatattagatcctttcattatcagaacagcagcttatgaactgcttcattttccaaaagtgtttcccaaaaatcagaaacctaaacacccaacaacaggaattattgccatcacattggcgttttacatatgtcacgaagttcacctagctggttttaaatacaacttttctgacctcaagagtcctttgcactactatgggaatgccaccatgtctttgatgaataagaacgcgtatcacaatgtgactgcagagcagctctttttgaaggacattatagaaaaaaacctcgtaatcaacttgactcaagattgactctacagactcagaagatgatgctaacagtgttagttttatttttgtactgcaatttttagtttaaaatatgttggatgcactcgtcaaataattatgtatactgtctgttgctgcctggtgattcataaccaccagcttaatttctgtgaatactgtatatttaacttatgaaaaccaagaaatgtaaagataacaggaaaataagttttgattgcattgtttttaaaataagctagttttctgaggtgttttcacacgtctttttatagttacttcatcttagatttttgaagggatatgacttcctactaaggatttagtttaccacaacaattctgactacaataagacattttgaggaggatatttggctactgtaaacatggctggtggaaaatcacgattgtggcttgatgtggcaagccgaaaccacttggctctggaaatctaagttcatactggtttaattaagctctctcctgacaacccccagaattaaatgaaccatgattgtgaagagtaatttggtacaatgaaggcagtgtttgtttttaagttaaaggaaatgggctaaacataaagttcttattagataagtaaataactaaagaaagaatacaattactaaactctgatggctttgtattattttaaagaaatgaagtttaactttatacagtgaagctaagctaggcaagctcaagaaggaaaaaaaaatcttgaacattatttttttttgcctgacttacttattcattaaattttgaaggttttccacttgaagtaaattaggaaaggtaaagaagataacagaacaagtaaacacttaagaaaagtcaagctgaggccgggcagggtggctcacacctgtaatcctaacaaacactttgggaggccgagggaggcagctggattgcctgaactcaggagttcaagaccagcctggccaacatggtgaaacctcatctctactaaaatacaaaataattagctgggcgtggtggtatgcgctgtagtcccaggtactcgggaggctgaggcacgagaattgcttgagcccgggaggcagaggttgcagtgagccaagatcgcgccactgcacttcagcctgggtgacagagtgaggctgtcttctaaaaaatataaaaagtgaagttgggatttttggatttaaatggtacaaaaagaatatctcattttcccatgattaaagctaatcttcagatggaaagcttgcctggctacctagggtgcaccagagaatctgatccaatgcaagccagtcaatcctacaaatgtggtgagctagtcttccttcctatattttaataaatgtaaccaaaggccatctggaggtaggggaatgagaggtgaagaaacagaaaaatagaggttataaggatggaactaaaagttgtcagaagaggtatgagctgaagaaagaattactctcttttgaccaataaatacaattgggaaacactggaaaaccatggcttgattactgacaaccaacctgcctctctaaagagggtgtataaagggtgaaatacattagatttggctcagaaacagaatgcggtacttataaagcagaataaaggggagaacagtagtagttgatctaacccagattagacatgaataccagcatatgtttgcagagtcccacagttttgattcctcttataactttttgaggtgcaaaaggaaggtaccagaactggaatcacatgtaatcaatcagtgtgattttcccctcataccacacagccataggctgcagtgtggctgctgaagttcaattgatataaagtaaatcaggcttcaaaaagaatggtgctgtgggtacacaaggacataaagatgggaacgatagacactgaggactgcggcggggggagcgaggggagcggggagggcaagggctgaaagactatgtattgggtactatgctcacaacctggatgatgggatcattcataccacaaacctcagtatcacacaatatacccatgtaacaacctgcactctgcacatgtacccttagaatctaaaataaaagttgaaattattttttt

SEQ ID NO: 29999 - DNA, 2449 bp, Homo sapiens
  source 1..2449: mol_type = unassigned DNA
actatggcggcgcccatgcagcccagcgcgttgtgggctcccgccggggtcccccgcggctgtcgccgccgcctacgccgctgcctccgccttcctgccccgcgtcgggccgggcgccacctcccccctgcctccctctccgctgtggtcatttaggaaatcgtaaatcatgtgaagatgggactcttggtatttgtgcgcaatctgctgctagccctctgcctctttctggtactgggatttttgtattattctgcgtggaagctacacttactccagtgggaggaggactccagtaagtatagtcactctagctcaccccaggagaagcctgttgcagattcagtggttctttcctttgactccgctggacaaacactaggctcagagtatgatcggttgggcttcctcctgaatctggactctaaactctcaccgaggactctctgcacggtggtttttggccttgactgcatattggaatcacctggagagcctaaaaaattactgatgcctgcatcccaccctctagagattttgaagtcactgagcgaggacacagcctttgcattaggatttttaaagctgcccaggcctgctgaattagccaccaagtacgcaaacttttcagagggagcttgcaagcctggctatgcttcagccttgatgacggccatcttcccccggttctccaagccagcacccatgttcctggatgactcctttcgcaagtgggctagaatccgggagttcgtgccgccttttgggatcaaaggtcaagacaatctgatcaaagccatcttgtcagtcaccaaagagtaccgcctgacccctgccttggacagcctccgctgccgccgctgcatcatcgtgggcaatggaggcgttcttgccaacaagtctctggggtcacgaattgacgactatgacattgtggtgagactgaattcagcaccagtgaaaggctttgagaaggacgtgggcagcaaaacgacactgcgcatcacctaccccgagggcgccatgcagcggcctgagcagtacgagcgcgattctctctttgtcctcgccggcttcaagtggcaggactttaagtggttgaaatacatcgtctacaaggagagagtgagtgcatcggatggcttctggaaatctgtggccactcgagtgcccaaggagccccctgagattcgaatcctcaacccatatttcatccaggaggccgccttcaccctcattggcctgcccttcaacaatggcctcatgggccgggggaacatccctacccttggcagtgtggcagtgaccatggcactacacggctgtgacgaggtggcagtcgcaggatttggctatgacatgagcacacccaacgcacccctgcactactatgagaccgttcgcatggcagccatcaaagagtcctggacgcacaatatccagcgagagaaagagtttctgcggaagctggtgaaagctcgcgtcatcactgatctaagcagtggcatctgagtgggcccagcacatggccatagaggcccaggcaccaccaggagcagcagccagcaccacctacacaggagtcttcagacccagagaaggacggtgccaagggccccaggggcagcaaggccttggtggagcagccagagctgtgcctgctcagcagccagtctcagagaccagcactcagcctcattcagcatgggtccttgatgccagagggccagcaggctcctggctgtgcccagcaggcccagcatgcaggtggtgggacactgggcagcaaggctgctgccggaatcacttctccaatcagtgtttggtgtattatcattttgtgaatttgggtaggggggagggtagggataatttatttttaaataaggttggagatgtcaagttgggttcacttgccatgcaggaagaggcccactagagggcccatcaggcagtgttacctgttagctccctgtggggcaggagtgccaggaccagcctgtaccttgctgtggggctacaggatggtgggcaggatctcaagccagccccctccagctcatgacactgtttggcctttcttggggagaaggcggggtattcccactcaccagccctagctgtcccatggggaaaccctggagccatcccttcggagccaacaagaccgccccagggctatagcagaaagaactttaaagctcaggagggtgacgcccagctccgcctgctgggaagagctcccctccacagctgcagctgatccataggactaccgcaggcccggactcaccaacttgccacatgttctaggtttcagcaacaagactgccaggtggttgggttctgcctttagcctggaccaaagggaagtgaggcccaaggagcttacccaagctgtggcagccgtcccaggccacccccatggaagcaataaagctcttccctg

SEQ ID NO: 30000 - DNA, 1601 bp, Homo sapiens
  source 1..1601: mol_type = unassigned DNA
actatggcggcgcccatgcagcccagcgcgttgtgggctcccgccggggtcccccgcggctgtcgccgccgcctacgccgctgcctccgccttcctgccccgcgtcgggccgggcgccacctcccccctgcctccctctccgctgtggtcatttaggaaatcgtaaatcatgtgaagatgggactcttggtatttgtgcgcaatctgctgctagccctctgcctctttctggtactgggatttttgtattattctgcgtggaagctacacttactccagtgggaggaggactccaattcagtggttctttcctttgactccgctggacaaacactaggctcagagtatgatcggttgggcttcctcctgaatctggactctaaactgcctgctgaattagccaccaagtacgcaaacttttcagagggagcttgcaagcctggctatgcttcagccttgatgacggccatcttcccccggttctccaagccagcacccatgttcctggatgactcctttcgcaagtgggctagaatccgggagttcgtgccgccttttgggatcaaaggtcaagtcctggacgcacaatatccagcgagagaaagagtttctgcggaagctggtgaaagctcgcgtcatcactgatctaagcagtggcatctgagtgggcccagcacatggccatagaggcccaggcaccaccaggagcagcagccagcaccacctacacaggagtcttcagacccagagaaggacggtgccaagggccccaggggcagcaaggccttggtggagcagccagagctgtgcctgctcagcagccagtctcagagaccagcactcagcctcattcagcatgggtccttgatgccagagggccagcaggctcctggctgtgcccagcaggcccagcatgcaggtggtgggacactgggcagcaaggctgctgccggaatcacttctccaatcagtgtttggtgtattatcattttgtgaatttgggtaggggggagggtagggataatttatttttaaataaggttggagatgtcaagttgggttcacttgccatgcaggaagaggcccactagagggcccatcaggcagtgttacctgttagctccctgtggggcaggagtgccaggaccagcctgtaccttgctgtggggctacaggatggtgggcaggatctcaagccagccccctccagctcatgacactgtttggcctttcttggggagaaggcggggtattcccactcaccagccctagctgtcccatggggaaaccctggagccatcccttcggagccaacaagaccgccccagggctatagcagaaagaactttaaagctcaggagggtgacgcccagctccgcctgctgggaagagctcccctccacagctgcagctgatccataggactaccgcaggcccggactcaccaacttgccacatgttctaggtttcagcaacaagactgccaggtggttgggttctgcctttagcctggaccaaagggaagtgaggcccaaggagcttacccaagctgtggcagccgtcccaggccacccccatggaagcaataaagctcttccctg

SEQ ID NO: 30001 - DNA, 1035 bp, Homo sapiens
  source 1..1035: mol_type = unassigned DNA
atgggactcttggtatttgtgcgcaatctgctgctagccctctgcctctttctggtactgggatttttgtattattctgcgtggaagctacacttactccagtgggaggaggactccaattcagtggttctttcctttgactccgctggacaaacactaggctcagagtatgatcggttgggcttcctcctgaatctggactctaaactgttctccaagccagcacccatgttcctggatgactcctttcgcaagtgggctagaatccgggagttcgtgccgccttttgggatcaaaggtcaagacaatctgatcaaagccatcttgtcagtcaccaaagagtaccgcctgacccctgccttggacagcctccgctgccgccgctgcatcatcgtgggcaatggaggcgttcttgccaacaagtctctggggtcacgaattgacgactatgacattgtggtgagactgaattcagcaccagtgaaaggctttgagaaggacgtgggcagcaaaacgacactgcgcatcacctaccccgagggcgccatgcagcggcctgagcagtacgagcgcgattctctctttgtcctcgccggcttcaagtggcaggactttaagtggttgaaatacatcgtctacaaggagagagtgagtgcatcggatggcttctggaaatctgtggccactcgagtgcccaaggagccccctgagattcgaatcctcaacccatatttcatccaggaggccgccttcaccctcattggcctgcccttcaacaatggcctcatgggccgggggaacatccctacccttggcagtgtggcagtgaccatggcactacacggctgtgacgaggtggcagtcgcaggatttggctatgacatgagcacacccaacgcacccctgcactactatgagaccgttcgcatggcagccatcaaagagtcctggacgcacaatatccagcgagagaaagagtttctgcggaagctggtgaaagctcgcgtcatcactgatctaagcagtggcatctga

SEQ ID NO: 30002 - DNA, 2007 bp, Homo sapiens
  source 1..2007: mol_type = unassigned DNA
actatggcggcgcccatgcagcccagcgcgttgtgggctcccgccggggtcccccgcggctgtcgccgccgcctacgccgctgcctccgccttcctgccccgcgtcgggccgggcgccacctcccccctgcctccctctccgctgtggtcatttaggaaatcgtaaatcatgtgaagatgggactcttggtatttgtgcgcaatctgctgctagccctctgcctctttctggtactgggatttttgtattattctgcgtggaagctacacttactccagtgggaggaggactccaagtatgatcggttgggcttcctcctgaatctggactctaaactgcctgctgaattagccaccaagtacgcaaacttttcagagggagcttgcaagcctggctatgcttcagccttgatgacggccatcttcccccggttctccaagccagcacccatgttcctggatgactcctttcgcaagtgggctagaatccgggagttcgtgccgccttttgggatcaaaggtcaagacaatctgatcaaagccatcttgtcagtcaccaaagagtaccgcctgacccctgccttggacagcctccgctgccgccgctgcatcatcgtgggcaatggaggcgttcttgccaacaagtctctggggtcacgaattgacgactatgacattgtggtgagagtgcatcggatggcttctggaaatctgtggccactcgagtgcccaaggagccccctgagattcgaatcctcaacccatatttcatccaggaggccgccttcaccctcattggcctgcccttcaacaatggcctcatgggccgggggaacatccctacccttggcagtgtggcagtgaccatggcactacacggctgtgacgaggtggcagtcgcaggatttggctatgacatgagcacacccaacgcacccctgcactactatgagaccgttcgcatggcagccatcaaagagtcctggacgcacaatatccagcgagagaaagagtttctgcggaagctggtgaaagctcgcgtcatcactgatctaagcagtggcatctgagtgggcccagcacatggccatagaggcccaggcaccaccaggagcagcagccagcaccacctacacaggagtcttcagacccagagaaggacggtgccaagggccccaggggcagcaaggccttggtggagcagccagagctgtgcctgctcagcagccagtctcagagaccagcactcagcctcattcagcatgggtccttgatgccagagggccagcaggctcctggctgtgcccagcaggcccagcatgcaggtggtgggacactgggcagcaaggctgctgccggaatcacttctccaatcagtgtttggtgtattatcattttgtgaatttgggtaggggggagggtagggataatttatttttaaataaggttggagatgtcaagttgggttcacttgccatgcaggaagaggcccactagagggcccatcaggcagtgttacctgttagctccctgtggggcaggagtgccaggaccagcctgtaccttgctgtggggctacaggatggtgggcaggatctcaagccagccccctccagctcatgacactgtttggcctttcttggggagaaggcggggtattcccactcaccagccctagctgtcccatggggaaaccctggagccatcccttcggagccaacaagaccgccccagggctatagcagaaagaactttaaagctcaggagggtgacgcccagctccgcctgctgggaagagctcccctccacagctgcagctgatccataggactaccgcaggcccggactcaccaacttgccacatgttctaggtttcagcaacaagactgccaggtggttgggttctgcctttagcctggaccaaagggaagtgaggcccaaggagcttacccaagctgtggcagccgtcccaggccacccccatggaagcaataaagctcttccctg

SEQ ID NO: 30003 - DNA, 1324 bp, Homo sapiens
  source 1..1324: mol_type = unassigned DNA
cgcgttgtgggctcccgccggggtcccccgcggctgtcgccgccgcctacgccgctgcctccgccttcctgccccgcgtcgggccgggcgccacctcccccctgcctccctctccgctgtggtcatttaggaaatcgtaaatcatgtgaagatgggactcttggtatttgtgcgcaatctgctgctagccctctgcctctttctggtactgggatttttgtattattctgcgtggaagctacacttactccagtgggaggaggactccagtaagtatagtcactctagctcaccccaggagaagcctgttgcagattcagtggttctttcctttgactccgctggacaaacactaggctcagagtatgatcggttgggcttcctcctgaatctggactctaaactgcctgctgaattagccaccaagtacgcaaacttttcagagggagcttgcaagcctggctatgcttcagccttgatgacggccatcttcccccggttctccaagccagcacccatgttcctggatgactcctttcgcaagtgggctagaatccgggagttcgtgccgccttttgggatcaaaggtcaagacaatctgatcaaagccatcttgtcagtcaccaaagagtaccgcctgacccctgccttggacagcctccgctgccgccgctgcatcatcgtgggcaatggaggcgttcttgccaacaagtctctggggtcacgaattgacgactatgacattgtggtgagactgaattcagcaccagtgaaaggctttgagaaggacgtgggcagcaaaacgacactgcgcatcacctaccccgagggcgccatgcagcggcctgagcagtacgagcgcgattctctctttgtcctcgccggcttcaagtggcaggactttaagtggttgaaatacatcgtctacaaggagagagtgagtgcatcggatggcttctggaaatctgtggccactcgagtgcccaaggagccccctgagattcgaatcctcaacccatatttcatccaggaggccgccttcaccctcattggcctgcccttcaacaatggcctcatgggccgggggaacatccctacccttggcagtgtggcagtgaccatggcactacacggctgtgacgaggtggcagtcgcaggatttggctatgacatgagcacacccaacgcacccctgcactactatgagaccgttcgcatggcagccatcaaagagtcctggacgcacaatatccagcgagagaaagagtttctgcggaagctggtgaaagctcgcgtcatcactgatctaagcagtggcatctga

SEQ ID NO: 30004 - DNA, 2356 bp, Homo sapiens
  source 1..2356: mol_type = unassigned DNA
actatggcggcgcccatgcagcccagcgcgttgtgggctcccgccggggtcccccgcggctgtcgccgccgcctacgccgctgcctccgccttcctgccccgcgtcgggccgggcgccacctcccccctgcctccctctccgctgtggtcatttaggaaatcgtaaatcatgtgaagatgggactcttggtatttgtgcgcaatctgctgctagccctctgcctctttctggtactgggatttttgtattattctgcgtggaagctacacttactccagtgggaggaggactccaagtatgatcggttgggcttcctcctgaatctggactctaaactctcaccgaggactctctgcacggtggtttttggccttgactgcatattggaatcacctggagagcctaaaaaattactgatgcctgcatcccaccctctagagattttgaagtcactgagcgaggacacagcctttgcattaggatttttaaagctgcccaggcctgctgaattagccaccaagtacgcaaacttttcagagggagcttgcaagcctggctatgcttcagccttgatgacggccatcttcccccggttctccaagccagcacccatgttcctggatgactcctttcgcaagtgggctagaatccgggagttcgtgccgccttttgggatcaaaggtcaagacaatctgatcaaagccatcttgtcagtcaccaaagagtaccgcctgacccctgccttggacagcctccgctgccgccgctgcatcatcgtgggcaatggaggcgttcttgccaacaagtctctggggtcacgaattgacgactatgacattgtggtgagactgaattcagcaccagtgaaaggctttgagaaggacgtgggcagcaaaacgacactgcgcatcacctaccccgagggcgccatgcagcggcctgagcagtacgagcgcgattctctctttgtcctcgccggcttcaagtggcaggactttaagtggttgaaatacatcgtctacaaggagagagtgagtgcatcggatggcttctggaaatctgtggccactcgagtgcccaaggagccccctgagattcgaatcctcaacccatatttcatccaggaggccgccttcaccctcattggcctgcccttcaacaatggcctcatgggccgggggaacatccctacccttggcagtgtggcagtgaccatggcactacacggctgtgacgaggtggcagtcgcaggatttggctatgacatgagcacacccaacgcacccctgcactactatgagaccgttcgcatggcagccatcaaagagtcctggacgcacaatatccagcgagagaaagagtttctgcggaagctggtgaaagctcgcgtcatcactgatctaagcagtggcatctgagtgggcccagcacatggccatagaggcccaggcaccaccaggagcagcagccagcaccacctacacaggagtcttcagacccagagaaggacggtgccaagggccccaggggcagcaaggccttggtggagcagccagagctgtgcctgctcagcagccagtctcagagaccagcactcagcctcattcagcatgggtccttgatgccagagggccagcaggctcctggctgtgcccagcaggcccagcatgcaggtggtgggacactgggcagcaaggctgctgccggaatcacttctccaatcagtgtttggtgtattatcattttgtgaatttgggtaggggggagggtagggataatttatttttaaataaggttggagatgtcaagttgggttcacttgccatgcaggaagaggcccactagagggcccatcaggcagtgttacctgttagctccctgtggggcaggagtgccaggaccagcctgtaccttgctgtggggctacaggatggtgggcaggatctcaagccagccccctccagctcatgacactgtttggcctttcttggggagaaggcggggtattcccactcaccagccctagctgtcccatggggaaaccctggagccatcccttcggagccaacaagaccgccccagggctatagcagaaagaactttaaagctcaggagggtgacgcccagctccgcctgctgggaagagctcccctccacagctgcagctgatccataggactaccgcaggcccggactcaccaacttgccacatgttctaggtttcagcaacaagactgccaggtggttgggttctgcctttagcctggaccaaagggaagtgaggcccaaggagcttacccaagctgtggcagccgtcccaggccacccccatggaagcaataaagctcttccctg

SEQ ID NO: 30005 - DNA, 1948 bp, Homo sapiens
  source 1..1948: mol_type = unassigned DNA
actatggcggcgcccatgcagcccagcgcgttgtgggctcccgccggggtcccccgcggctgtcgccgccgcctacgccgctgcctccgccttcctgccccgcgtcgggccgggcgccacctcccccctgcctccctctccgctgtggtcatttaggaaatcgtaaatcatgtgaagatgggactcttggtatttgtgcgcaatctgctgctagccctctgcctctttctggtactgggatttttgtattattctgcgtggaagctacacttactccagtgggaggaggactccaattcagtggttctttcctttgactccgctggacaaacactaggctcagagtatgatcggttgggcttcctcctgaatctggactctaaactgcctgctgaattagccaccaagtacgcaaacttttcagagggagcttgcaagcctggctatgcttcagccttgatgacggccatcttcccccggttctccaagccagcacccatgttcctggatgactcctttcgcaagtgggctagaatccgggagttcgtgccgccttttgggatcaaaggtcaagacaatctgatcaaagccatcttgtcagtcaccaaagagtaccgcctgacccctgccttggacagcctccgctgccgccgctgcatcatcgtgggcaatggaggcgttcttgccaacaagtctctggggtcacgaattgacgactatgacattgtggtgagactgaattcagcaccagtgaaaggctttgagaaggacgtgggcagcaaaacgacactgcgcatcacctaccccgagggcgccatgcagcggcctgagcagtacgagcgcgattctctctttgtcctcgccggcttcaagtggcaggactttaagtggttgaaatacatcgtctacaaggagagagtgtcctggacgcacaatatccagcgagagaaagagtttctgcggaagctggtgaaagctcgcgtcatcactgatctaagcagtggcatctgagtgggcccagcacatggccatagaggcccaggcaccaccaggagcagcagccagcaccacctacacaggagtcttcagacccagagaaggacggtgccaagggccccaggggcagcaaggccttggtggagcagccagagctgtgcctgctcagcagccagtctcagagaccagcactcagcctcattcagcatgggtccttgatgccagagggccagcaggctcctggctgtgcccagcaggcccagcatgcaggtggtgggacactgggcagcaaggctgctgccggaatcacttctccaatcagtgtttggtgtattatcattttgtgaatttgggtaggggggagggtagggataatttatttttaaataaggttggagatgtcaagttgggttcacttgccatgcaggaagaggcccactagagggcccatcaggcagtgttacctgttagctccctgtggggcaggagtgccaggaccagcctgtaccttgctgtggggctacaggatggtgggcaggatctcaagccagccccctccagctcatgacactgtttggcctttcttggggagaaggcggggtattcccactcaccagccctagctgtcccatggggaaaccctggagccatcccttcggagccaacaagaccgccccagggctatagcagaaagaactttaaagctcaggagggtgacgcccagctccgcctgctgggaagagctcccctccacagctgcagctgatccataggactaccgcaggcccggactcaccaacttgccacatgttctaggtttcagcaacaagactgccaggtggttgggttctgcctttagcctggaccaaagggaagtgaggcccaaggagcttacccaagctgtggcagccgtcccaggccacccccatggaagcaataaagctcttccctg

SEQ ID NO: 30006 - DNA, 2243 bp, Homo sapiens
  source 1..2243: mol_type = unassigned DNA
actatggcggcgcccatgcagcccagcgcgttgtgggctcccgccggggtcccccgcggctgtcgccgccgcctacgccgctgcctccgccttcctgccccgcgtcgggccgggcgccacctcccccctgcctccctctccgctgtggtcatttaggaaatcgtaaatcatgtgaagatgggactcttggtatttgtgcgcaatctgctgctagccctctgcctctttctggtactgggatttttgtattattctgcgtggaagctacacttactccagtgggaggaggactccaattcagtggttctttcctttgactccgctggacaaacactaggctcagagtatgatcggttgggcttcctcctgaatctggactctaaactgcctgctgaattagccaccaagtacgcaaacttttcagagggagcttgcaagcctggctatgcttcagccttgatgacggccatcttcccccggttctccaagccagcacccatgttcctggatgactcctttcgcaagtgggctagaatccgggagttcgtgccgccttttgggatcaaaggtcaagacaatctgatcaaagccatcttgtcagtcaccaaagagtaccgcctgacccctgccttggacagcctccgctgccgccgctgcatcatcgtgggcaatggaggcgttcttgccaacaagtctctggggtcacgaattgacgactatgacattgtggtgagactgaattcagcaccagtgaaaggctttgagaaggacgtgggcagcaaaacgacactgcgcatcacctaccccgagggcgccatgcagcggcctgagcagtacgagcgcgattctctctttgtcctcgccggcttcaagtggcaggactttaagtggttgaaatacatcgtctacaaggagagagtgagtgcatcggatggcttctggaaatctgtggccactcgagtgcccaaggagccccctgagattcgaatcctcaacccatatttcatccaggaggccgccttcaccctcattggcctgcccttcaacaatggcctcatgggccgggggaacatccctacccttggcagtgtggcagtgaccatggcactacacggctgtgacgaggtggcagtcgcaggatttggctatgacatgagcacacccaacgcacccctgcactactatgagaccgttcgcatggcagccatcaaagagtcctggacgcacaatatccagcgagagaaagagtttctgcggaagctggtgaaagctcgcgtcatcactgatctaagcagtggcatctgagtgggcccagcacatggccatagaggcccaggcaccaccaggagcagcagccagcaccacctacacaggagtcttcagacccagagaaggacggtgccaagggccccaggggcagcaaggccttggtggagcagccagagctgtgcctgctcagcagccagtctcagagaccagcactcagcctcattcagcatgggtccttgatgccagagggccagcaggctcctggctgtgcccagcaggcccagcatgcaggtggtgggacactgggcagcaaggctgctgccggaatcacttctccaatcagtgtttggtgtattatcattttgtgaatttgggtaggggggagggtagggataatttatttttaaataaggttggagatgtcaagttgggttcacttgccatgcaggaagaggcccactagagggcccatcaggcagtgttacctgttagctccctgtggggcaggagtgccaggaccagcctgtaccttgctgtggggctacaggatggtgggcaggatctcaagccagccccctccagctcatgacactgtttggcctttcttggggagaaggcggggtattcccactcaccagccctagctgtcccatggggaaaccctggagccatcccttcggagccaacaagaccgccccagggctatagcagaaagaactttaaagctcaggagggtgacgcccagctccgcctgctgggaagagctcccctccacagctgcagctgatccataggactaccgcaggcccggactcaccaacttgccacatgttctaggtttcagcaacaagactgccaggtggttgggttctgcctttagcctggaccaaagggaagtgaggcccaaggagcttacccaagctgtggcagccgtcccaggccacccccatggaagcaataaagctcttccctga

SEQ ID NO: 30007 - DNA, 2195 bp, Homo sapiens
  source 1..2195: mol_type = unassigned DNA
actatggcggcgcccatgcagcccagcgcgttgtgggctcccgccggggtcccccgcggctgtcgccgccgcctacgccgctgcctccgccttcctgccccgcgtcgggccgggcgccacctcccccctgcctccctctccgctgtggtcatttaggaaatcgtaaatcatgtgaagatgggactcttggtatttgtgcgcaatctgctgctagccctctgcctctttctggtactgggatttttgtattattctgcgtggaagctacacttactccagtgggaggaggactccaagtatgatcggttgggcttcctcctgaatctggactctaaactgcctgctgaattagccaccaagtacgcaaacttttcagagggagcttgcaagcctggctatgcttcagccttgatgacggccatcttcccccggttctccaagccagcacccatgttcctggatgactcctttcgcaagtgggctagaatccgggagttcgtgccgccttttgggatcaaaggtcaagacaatctgatcaaagccatcttgtcagtcaccaaagagtaccgcctgacccctgccttggacagcctccgctgccgccgctgcatcatcgtgggcaatggaggcgttcttgccaacaagtctctggggtcacgaattgacgactatgacattgtggtgagactgaattcagcaccagtgaaaggctttgagaaggacgtgggcagcaaaacgacactgcgcatcacctaccccgagggcgccatgcagcggcctgagcagtacgagcgcgattctctctttgtcctcgccggcttcaagtggcaggactttaagtggttgaaatacatcgtctacaaggagagagtgagtgcatcggatggcttctggaaatctgtggccactcgagtgcccaaggagccccctgagattcgaatcctcaacccatatttcatccaggaggccgccttcaccctcattggcctgcccttcaacaatggcctcatgggccgggggaacatccctacccttggcagtgtggcagtgaccatggcactacacggctgtgacgaggtggcagtcgcaggatttggctatgacatgagcacacccaacgcacccctgcactactatgagaccgttcgcatggcagccatcaaagagtcctggacgcacaatatccagcgagagaaagagtttctgcggaagctggtgaaagctcgcgtcatcactgatctaagcagtggcatctgagtgggcccagcacatggccatagaggcccaggcaccaccaggagcagcagccagcaccacctacacaggagtcttcagacccagagaaggacggtgccaagggccccaggggcagcaaggccttggtggagcagccagagctgtgcctgctcagcagccagtctcagagaccagcactcagcctcattcagcatgggtccttgatgccagagggccagcaggctcctggctgtgcccagcaggcccagcatgcaggtggtgggacactgggcagcaaggctgctgccggaatcacttctccaatcagtgtttggtgtattatcattttgtgaatttgggtaggggggagggtagggataatttatttttaaataaggttggagatgtcaagttgggttcacttgccatgcaggaagaggcccactagagggcccatcaggcagtgttacctgttagctccctgtggggcaggagtgccaggaccagcctgtaccttgctgtggggctacaggatggtgggcaggatctcaagccagccccctccagctcatgacactgtttggcctttcttggggagaaggcggggtattcccactcaccagccctagctgtcccatggggaaaccctggagccatcccttcggagccaacaagaccgccccagggctatagcagaaagaactttaaagctcaggagggtgacgcccagctccgcctgctgggaagagctcccctccacagctgcagctgatccataggactaccgcaggcccggactcaccaacttgccacatgttctaggtttcagcaacaagactgccaggtggttgggttctgcctttagcctggaccaaagggaagtgaggcccaaggagcttacccaagctgtggcagccgtcccaggccacccccatggaagcaataaagctcttccctga

SEQ ID NO: 30008 - DNA, 1335 bp, Homo sapiens
  source 1..1335: mol_type = unassigned DNA
atgggactcttggtatttgtgcgcaatctgctgctagccctctgcctctttctggtactgggatttttgtattattctgcgtggaagctacacttactccagtgggaggaggactccagtaagtatagtcactctagctcaccccaggagaagcctgttgcagattcagtggttctttcctttgactccgctggacaaacactaggctcagagtatgatcggttgggcttcctcctgaatctggactctaaactctcaccgaggactctctgcacggtggtttttggccttgactgcatattggaatcacctggagagcctaaaaaattactgatgcctgcatcccaccctctagagattttgaagtcactgagcgaggacacagcctttgcattaggatttttaaagctgcccaggcctgctgaattagccaccaagtacgcaaacttttcagagggagcttgcaagcctggctatgcttcagccttgatgacggccatcttcccccggttctccaagccagcacccatgttcctggatgactcctttcgcaagtgggctagaatccgggagttcgtgccgccttttgggatcaaaggtcaagacaatctgatcaaagccatcttgtcagtcaccaaagagtaccgcctgacccctgccttggacagcctccgctgccgccgctgcatcatcgtgggcaatggaggcgttcttgccaacaagtctctggggtcacgaattgacgactatgacattgtggtgagactgaattcagcaccagtgaaaggctttgagaaggacgtgggcagcaaaacgacactgcgcatcacctaccccgagggcgccatgcagcggcctgagcagtacgagcgcgattctctctttgtcctcgccggcttcaagtggcaggactttaagtggttgaaatacatcgtctacaaggagagagtgagtgcatcggatggcttctggaaatctgtggccactcgagtgcccaaggagccccctgagattcgaatcctcaacccatatttcatccaggaggccgccttcaccctcattggcctgcccttcaacaatggcctcatgggccgggggaacatccctacccttggcagtgtggcagtgaccatggcactacacggctgtgacgaggtggcagtcgcaggatttggctatgacatgagcacacccaacgcacccctgcactactatgagaccgttcgcatggcagccatcaaagagtcctggacgcacaatatccagcgagagaaagagtttctgcggaagctggtgaaagctcgcgtcatcactgatctaagcagtggcatctga

SEQ ID NO: 30009 - DNA, 513 bp, Homo sapiens
  source 1..513: mol_type = unassigned DNA
atgggactcttggtatttgtgcgcaatctgctgctagccctctgcctctttctggtactgggatttttgtattattctgcgtggaagctacacttactccagtgggaggaggactccagtaagtatagtcactctagctcaccccaggagaagcctgttgcagattcagtggttctttcctttgactccgctggacaaacactaggctcagagtatgatcggttgggcttcctcctgaatctggactctaaactgcctgctgaattagccaccaagtacgcaaacttttcagagggagcttgcaagcctggctatgcttcagccttgatgacggccatcttcccccggttctccaagccagcacccatgttcctggatgactcctttcgcaagtgggctagaatccgggagttcgtgccgccttttgggatcaaaggtcaagtcctggacgcacaatatccagcgagagaaagagtttctgcggaagctggtgaaagctcgcgtcatcactga

SEQ ID NO: 30010 - DNA, 468 bp, Homo sapiens
  source 1..468: mol_type = unassigned DNA
atgggactcttggtatttgtgcgcaatctgctgctagccctctgcctctttctggtactgggatttttgtattattctgcgtggaagctacacttactccagtgggaggaggactccaattcagtggttctttcctttgactccgctggacaaacactaggctcagagtatgatcggttgggcttcctcctgaatctggactctaaactgcctgctgaattagccaccaagtacgcaaacttttcagagggagcttgcaagcctggctatgcttcagccttgatgacggccatcttcccccggttctccaagccagcacccatgttcctggatgactcctttcgcaagtgggctagaatccgggagttcgtgccgccttttgggatcaaaggtcaagtcctggacgcacaatatccagcgagagaaagagtttctgcggaagctggtgaaagctcgcgtcatcactga

SEQ ID NO: 30011 - DNA, 673 bp, Homo sapiens
  source 1..673: mol_type = unassigned DNA
atgggactcttggtatttgtgcgcaatctgctgctagccctctgcctctttctggtactgggatttttgtattattctgcgtggaagctacacttactccagtgggaggaggactccaattcagtggttctttcctttgactccgctggacaaacactaggctcagagtatgatcggttgggcttcctcctgaatctggactctaaactgcctgctgaattagccaccaagtacgcaaacttttcagagggagcttgcaagcctggctatgcttcagccttgatgacggccatcttcccccggttctccaagccagcacccatgttcctggatgactcctttcgcaagtgggctagaatccgggagttcgtgccgccttttgggatcaaaggtcaagacaatctgatcaaagccatcttgtcagtcaccaaagagtaccgcctgacccctgccttggacagcctccgctgccgccgctgcatcatcgtgggcaatggaggcgttcttgccaacaagtctctggggtcacgaattgacgactatgacattgtggtgaggtgagctccccaaaatggcacctcggtcctggacgcacaatatccagcgagagaaagagtttctgcggaagctggtgaaagctcgcgtcatcactgatctaagcagtggcatctga

SEQ ID NO: 30012 - DNA, 670 bp, Homo sapiens
  source 1..670: mol_type = unassigned DNA
atgggactcttggtatttgtgcgcaatctgctgctagccctctgcctctttctggtactgggatttttgtattattctgcgtggaagctacacttactccagtgggaggaggactccagtaagtatagtcactctagctcaccccaggagaagcctgttgcagagtatgatcggttgggcttcctcctgaatctggactctaaactgcctgctgaattagccaccaagtacgcaaacttttcagagggagcttgcaagcctggctatgcttcagccttgatgacggccatcttcccccggttctccaagccagcacccatgttcctggatgactcctttcgcaagtgggctagaatccgggagttcgtgccgccttttgggatcaaaggtcaagacaatctgatcaaagccatcttgtcagtcaccaaagagtaccgcctgacccctgccttggacagcctccgctgccgccgctgcatcatcgtgggcaatggaggcgttcttgccaacaagtctctggggtcacgaattgacgactatgacattgtggtgaggtgagctccccaaaatggcacctcggtcctggacgcacaatatccagcgagagaaagagtttctgcggaagctggtgaaagctcgcgtcatcactgatctaagcagtggcatctga

SEQ ID NO: 30013 - DNA, 644 bp, Homo sapiens
  source 1..644: mol_type = unassigned DNA
atgggactcttggtatttgtgcgcaatctgctgctagccctctgcctctttctggtactgggatttttgtattattctgcgtggaagctacacttactccagtgggaggaggactccagtaagtatagtcactctagctcaccccaggagaagcctgttgcagagtatgatcggttgggcttcctcctgaatctggactctaaactgcctgctgaattagccaccaagtacgcaaacttttcagagggagcttgcaagcctggctatgcttcagccttgatgacggccatcttcccccggttctccaagccagcacccatgttcctggatgactcctttcgcaagtgggctagaatccgggagttcgtgccgccttttgggatcaaaggtcaagacaatctgatcaaagccatcttgtcagtcaccaaagagtaccgcctgacccctgccttggacagcctccgctgccgccgctgcatcatcgtgggcaatggaggcgttcttgccaacaagtctctggggtcacgaattgacgactatgacattgtggtgagtcctggacgcacaatatccagcgagagaaagagtttctgcggaagctggtgaaagctcgcgtcatcactgatctaagcagtggcatctga

SEQ ID NO: 30014 - DNA, 1290 bp, Homo sapiens
  source 1..1290: mol_type = unassigned DNA
atgggactcttggtatttgtgcgcaatctgctgctagccctctgcctctttctggtactgggatttttgtattattctgcgtggaagctacacttactccagtgggaggaggactccaattcagtggttctttcctttgactccgctggacaaacactaggctcagagtatgatcggttgggcttcctcctgaatctggactctaaactctcaccgaggactctctgcacggtggtttttggccttgactgcatattggaatcacctggagagcctaaaaaattactgatgcctgcatcccaccctctagagattttgaagtcactgagcgaggacacagcctttgcattaggatttttaaagctgcccaggcctgctgaattagccaccaagtacgcaaacttttcagagggagcttgcaagcctggctatgcttcagccttgatgacggccatcttcccccggttctccaagccagcacccatgttcctggatgactcctttcgcaagtgggctagaatccgggagttcgtgccgccttttgggatcaaaggtcaagacaatctgatcaaagccatcttgtcagtcaccaaagagtaccgcctgacccctgccttggacagcctccgctgccgccgctgcatcatcgtgggcaatggaggcgttcttgccaacaagtctctggggtcacgaattgacgactatgacattgtggtgagactgaattcagcaccagtgaaaggctttgagaaggacgtgggcagcaaaacgacactgcgcatcacctaccccgagggcgccatgcagcggcctgagcagtacgagcgcgattctctctttgtcctcgccggcttcaagtggcaggactttaagtggttgaaatacatcgtctacaaggagagagtgagtgcatcggatggcttctggaaatctgtggccactcgagtgcccaaggagccccctgagattcgaatcctcaacccatatttcatccaggaggccgccttcaccctcattggcctgcccttcaacaatggcctcatgggccgggggaacatccctacccttggcagtgtggcagtgaccatggcactacacggctgtgacgaggtggcagtcgcaggatttggctatgacatgagcacacccaacgcacccctgcactactatgagaccgttcgcatggcagccatcaaagagtcctggacgcacaatatccagcgagagaaagagtttctgcggaagctggtgaaagctcgcgtcatcactgatctaagcagtggcatctga

SEQ ID NO: 30015 - DNA, 1038 bp, Homo sapiens
  source 1..1038: mol_type = unassigned DNA
atgggactcttggtatttgtgcgcaatctgctgctagccctctgcctctttctggtactgggatttttgtattattctgcgtggaagctacacttactccagtgggaggaggactccaattcagtggttctttcctttgactccgctggacaaacactaggctcagagtatgatcggttgggcttcctcctgaatctggactctaaactgcctgctgaattagccaccaagtacgcaaacttttcagagggagcttgcaagcctggctatgcttcagccttgatgacggccatcttcccccggttctccaagccagcacccatgttcctggatgactcctttcgcaagtgggctagaatccgggagttcgtgccgccttttgggatcaaaggtcaagacaatctgatcaaagccatcttgtcagtcaccaaagagtaccgcctgacccctgccttggacagcctccgctgccgccgctgcatcatcgtgggcaatggaggcgttcttgccaacaagtctctggggtcacgaattgacgactatgacattgtggtgagactgaattcagcaccagtgaaaggctttgagaaggacgtgggcagcaaaacgacactgcgcatcacctaccccgagggcgccatgcagcggcctgagcagtacgagcgcgattctctctttgtcctcgccggcttcaagtggcaggactttaagtggttgaaatacatcgtctacaaggagagagtggaggccgccttcaccctcattggcctgcccttcaacaatggcctcatgggccgggggaacatccctacccttggcagtgtggcagtgaccatggcactacacggctgtgacgaggtggcagtcgcaggatttggctatgacatgagcacacccaacgcacccctgcactactatgagaccgttcgcatggcagccatcaaagagtcctggacgcacaatatccagcgagagaaagagtttctgcggaagctggtgaaagctcgcgtcatcactgatctaagcagtggcatctga

SEQ ID NO: 30016 - DNA, 1242 bp, Homo sapiens
  source 1..1242: mol_type = unassigned DNA
atgggactcttggtatttgtgcgcaatctgctgctagccctctgcctctttctggtactgggatttttgtattattctgcgtggaagctacacttactccagtgggaggaggactccaagtatgatcggttgggcttcctcctgaatctggactctaaactctcaccgaggactctctgcacggtggtttttggccttgactgcatattggaatcacctggagagcctaaaaaattactgatgcctgcatcccaccctctagagattttgaagtcactgagcgaggacacagcctttgcattaggatttttaaagctgcccaggcctgctgaattagccaccaagtacgcaaacttttcagagggagcttgcaagcctggctatgcttcagccttgatgacggccatcttcccccggttctccaagccagcacccatgttcctggatgactcctttcgcaagtgggctagaatccgggagttcgtgccgccttttgggatcaaaggtcaagacaatctgatcaaagccatcttgtcagtcaccaaagagtaccgcctgacccctgccttggacagcctccgctgccgccgctgcatcatcgtgggcaatggaggcgttcttgccaacaagtctctggggtcacgaattgacgactatgacattgtggtgagactgaattcagcaccagtgaaaggctttgagaaggacgtgggcagcaaaacgacactgcgcatcacctaccccgagggcgccatgcagcggcctgagcagtacgagcgcgattctctctttgtcctcgccggcttcaagtggcaggactttaagtggttgaaatacatcgtctacaaggagagagtgagtgcatcggatggcttctggaaatctgtggccactcgagtgcccaaggagccccctgagattcgaatcctcaacccatatttcatccaggaggccgccttcaccctcattggcctgcccttcaacaatggcctcatgggccgggggaacatccctacccttggcagtgtggcagtgaccatggcactacacggctgtgacgaggtggcagtcgcaggatttggctatgacatgagcacacccaacgcacccctgcactactatgagaccgttcgcatggcagccatcaaagagtcctggacgcacaatatccagcgagagaaagagtttctgcggaagctggtgaaagctcgcgtcatcactgatctaagcagtggcatctga

SEQ ID NO: 30017 - DNA, 2149 bp, Homo sapiens
  source 1..2149: mol_type = unassigned DNA
actatggcggcgcccatgcagcccagcgcgttgtgggctcccgccggggtcccccgcggctgtcgccgccgcctacgccgctgcctccgccttcctgccccgcgtcgggccgggcgccacctcccccctgcctccctctccgctgtggtcatttaggaaatcgtaaatcatgtgaagatgggactcttggtatttgtgcgcaatctgctgctagccctctgcctctttctggtactgggatttttgtattattctgcgtggaagctacacttactccagtgggaggaggactccaattcagtggttctttcctttgactccgctggacaaacactaggctcagagtatgatcggttgggcttcctcctgaatctggactctaaactgttctccaagccagcacccatgttcctggatgactcctttcgcaagtgggctagaatccgggagttcgtgccgccttttgggatcaaaggtcaagacaatctgatcaaagccatcttgtcagtcaccaaagagtaccgcctgacccctgccttggacagcctccgctgccgccgctgcatcatcgtgggcaatggaggcgttcttgccaacaagtctctggggtcacgaattgacgactatgacattgtggtgagactgaattcagcaccagtgaaaggctttgagaaggacgtgggcagcaaaacgacactgcgcatcacctaccccgagggcgccatgcagcggcctgagcagtacgagcgcgattctctctttgtcctcgccggcttcaagtggcaggactttaagtggttgaaatacatcgtctacaaggagagagtgagtgcatcggatggcttctggaaatctgtggccactcgagtgcccaaggagccccctgagattcgaatcctcaacccatatttcatccaggaggccgccttcaccctcattggcctgcccttcaacaatggcctcatgggccgggggaacatccctacccttggcagtgtggcagtgaccatggcactacacggctgtgacgaggtggcagtcgcaggatttggctatgacatgagcacacccaacgcacccctgcactactatgagaccgttcgcatggcagccatcaaagagtcctggacgcacaatatccagcgagagaaagagtttctgcggaagctggtgaaagctcgcgtcatcactgatctaagcagtggcatctgagtgggcccagcacatggccatagaggcccaggcaccaccaggagcagcagccagcaccacctacacaggagtcttcagacccagagaaggacggtgccaagggccccaggggcagcaaggccttggtggagcagccagagctgtgcctgctcagcagccagtctcagagaccagcactcagcctcattcagcatgggtccttgatgccagagggccagcaggctcctggctgtgcccagcaggcccagcatgcaggtggtgggacactgggcagcaaggctgctgccggaatcacttctccaatcagtgtttggtgtattatcattttgtgaatttgggtaggggggagggtagggataatttatttttaaataaggttggagatgtcaagttgggttcacttgccatgcaggaagaggcccactagagggcccatcaggcagtgttacctgttagctccctgtggggcaggagtgccaggaccagcctgtaccttgctgtggggctacaggatggtgggcaggatctcaagccagccccctccagctcatgacactgtttggcctttcttggggagaaggcggggtattcccactcaccagccctagctgtcccatggggaaaccctggagccatcccttcggagccaacaagaccgccccagggctatagcagaaagaactttaaagctcaggagggtgacgcccagctccgcctgctgggaagagctcccctccacagctgcagctgatccataggactaccgcaggcccggactcaccaacttgccacatgttctaggtttcagcaacaagactgccaggtggttgggttctgcctttagcctggaccaaagggaagtgaggcccaaggagcttacccaagctgtggcagccgtcccaggccacccccatggaagcaataaagctcttccctg

SEQ ID NO: 30018 - DNA, 2404 bp, Homo sapiens
  source 1..2404: mol_type = unassigned DNA
actatggcggcgcccatgcagcccagcgcgttgtgggctcccgccggggtcccccgcggctgtcgccgccgcctacgccgctgcctccgccttcctgccccgcgtcgggccgggcgccacctcccccctgcctccctctccgctgtggtcatttaggaaatcgtaaatcatgtgaagatgggactcttggtatttgtgcgcaatctgctgctagccctctgcctctttctggtactgggatttttgtattattctgcgtggaagctacacttactccagtgggaggaggactccaattcagtggttctttcctttgactccgctggacaaacactaggctcagagtatgatcggttgggcttcctcctgaatctggactctaaactctcaccgaggactctctgcacggtggtttttggccttgactgcatattggaatcacctggagagcctaaaaaattactgatgcctgcatcccaccctctagagattttgaagtcactgagcgaggacacagcctttgcattaggatttttaaagctgcccaggcctgctgaattagccaccaagtacgcaaacttttcagagggagcttgcaagcctggctatgcttcagccttgatgacggccatcttcccccggttctccaagccagcacccatgttcctggatgactcctttcgcaagtgggctagaatccgggagttcgtgccgccttttgggatcaaaggtcaagacaatctgatcaaagccatcttgtcagtcaccaaagagtaccgcctgacccctgccttggacagcctccgctgccgccgctgcatcatcgtgggcaatggaggcgttcttgccaacaagtctctggggtcacgaattgacgactatgacattgtggtgagactgaattcagcaccagtgaaaggctttgagaaggacgtgggcagcaaaacgacactgcgcatcacctaccccgagggcgccatgcagcggcctgagcagtacgagcgcgattctctctttgtcctcgccggcttcaagtggcaggactttaagtggttgaaatacatcgtctacaaggagagagtgagtgcatcggatggcttctggaaatctgtggccactcgagtgcccaaggagccccctgagattcgaatcctcaacccatatttcatccaggaggccgccttcaccctcattggcctgcccttcaacaatggcctcatgggccgggggaacatccctacccttggcagtgtggcagtgaccatggcactacacggctgtgacgaggtggcagtcgcaggatttggctatgacatgagcacacccaacgcacccctgcactactatgagaccgttcgcatggcagccatcaaagagtcctggacgcacaatatccagcgagagaaagagtttctgcggaagctggtgaaagctcgcgtcatcactgatctaagcagtggcatctgagtgggcccagcacatggccatagaggcccaggcaccaccaggagcagcagccagcaccacctacacaggagtcttcagacccagagaaggacggtgccaagggccccaggggcagcaaggccttggtggagcagccagagctgtgcctgctcagcagccagtctcagagaccagcactcagcctcattcagcatgggtccttgatgccagagggccagcaggctcctggctgtgcccagcaggcccagcatgcaggtggtgggacactgggcagcaaggctgctgccggaatcacttctccaatcagtgtttggtgtattatcattttgtgaatttgggtaggggggagggtagggataatttatttttaaataaggttggagatgtcaagttgggttcacttgccatgcaggaagaggcccactagagggcccatcaggcagtgttacctgttagctccctgtggggcaggagtgccaggaccagcctgtaccttgctgtggggctacaggatggtgggcaggatctcaagccagccccctccagctcatgacactgtttggcctttcttggggagaaggcggggtattcccactcaccagccctagctgtcccatggggaaaccctggagccatcccttcggagccaacaagaccgccccagggctatagcagaaagaactttaaagctcaggagggtgacgcccagctccgcctgctgggaagagctcccctccacagctgcagctgatccataggactaccgcaggcccggactcaccaacttgccacatgttctaggtttcagcaacaagactgccaggtggttgggttctgcctttagcctggaccaaagggaagtgaggcccaaggagcttacccaagctgtggcagccgtcccaggccacccccatggaagcaataaagctcttccctg

SEQ ID NO: 30019 - DNA, 1895 bp, Homo sapiens
  source 1..1895: mol_type = unassigned DNA
actatggcggcgcccatgcagcccagcgcgttgtgggctcccgccggggtcccccgcggctgtcgccgccgcctacgccgctgcctccgccttcctgccccgcgtcgggccgggcgccacctcccccctgcctccctctccgctgtggtcatttaggaaatcgtaaatcatgtgaagatgggactcttggtatttgtgcgcaatctgctgctagccctctgcctctttctggtactgggatttttgtattattctgcgtggaagctacacttactccagtgggaggaggactccaattcagtggttctttcctttgactccgctggacaaacactaggctcagagtatgatcggttgggcttcctcctgaatctggactctaaactgcctgctgaattagccaccaagtacgcaaacttttcagagggagcttgcaagcctggctatgcttcagccttgatgacggccatcttcccccggttctccaagccagcacccatgttcctggatgactcctttcgcaagtgggctagaatccgggagttcgtgccgccttttgggatcaaaggtcaagagtgcatcggatggcttctggaaatctgtggccactcgagtgcccaaggagccccctgagattcgaatcctcaacccatatttcatccaggaggccgccttcaccctcattggcctgcccttcaacaatggcctcatgggccgggggaacatccctacccttggcagtgtggcagtgaccatggcactacacggctgtgacgaggtggcagtcgcaggatttggctatgacatgagcacacccaacgcacccctgcactactatgagaccgttcgcatggcagccatcaaagagtcctggacgcacaatatccagcgagagaaagagtttctgcggaagctggtgaaagctcgcgtcatcactgatctaagcagtggcatctgagtgggcccagcacatggccatagaggcccaggcaccaccaggagcagcagccagcaccacctacacaggagtcttcagacccagagaaggacggtgccaagggccccaggggcagcaaggccttggtggagcagccagagctgtgcctgctcagcagccagtctcagagaccagcactcagcctcattcagcatgggtccttgatgccagagggccagcaggctcctggctgtgcccagcaggcccagcatgcaggtggtgggacactgggcagcaaggctgctgccggaatcacttctccaatcagtgtttggtgtattatcattttgtgaatttgggtaggggggagggtagggataatttatttttaaataaggttggagatgtcaagttgggttcacttgccatgcaggaagaggcccactagagggcccatcaggcagtgttacctgttagctccctgtggggcaggagtgccaggaccagcctgtaccttgctgtggggctacaggatggtgggcaggatctcaagccagccccctccagctcatgacactgtttggcctttcttggggagaaggcggggtattcccactcaccagccctagctgtcccatggggaaaccctggagccatcccttcggagccaacaagaccgccccagggctatagcagaaagaactttaaagctcaggagggtgacgcccagctccgcctgctgggaagagctcccctccacagctgcagctgatccataggactaccgcaggcccggactcaccaacttgccacatgttctaggtttcagcaacaagactgccaggtggttgggttctgcctttagcctggaccaaagggaagtgaggcccaaggagcttacccaagctgtggcagccgtcccaggccacccccatggaagcaataaagctcttccctg

SEQ ID NO: 30020 - DNA, 599 bp, Homo sapiens
  source 1..599: mol_type = unassigned DNA
atgggactcttggtatttgtgcgcaatctgctgctagccctctgcctctttctggtactgggatttttgtattattctgcgtggaagctacacttactccagtgggaggaggactccaagtatgatcggttgggcttcctcctgaatctggactctaaactgcctgctgaattagccaccaagtacgcaaacttttcagagggagcttgcaagcctggctatgcttcagccttgatgacggccatcttcccccggttctccaagccagcacccatgttcctggatgactcctttcgcaagtgggctagaatccgggagttcgtgccgccttttgggatcaaaggtcaagacaatctgatcaaagccatcttgtcagtcaccaaagagtaccgcctgacccctgccttggacagcctccgctgccgccgctgcatcatcgtgggcaatggaggcgttcttgccaacaagtctctggggtcacgaattgacgactatgacattgtggtgagtcctggacgcacaatatccagcgagagaaagagtttctgcggaagctggtgaaagctcgcgtcatcactgatctaagcagtggcatctga

SEQ ID NO: 30021 - DNA, 420 bp, Homo sapiens
  source 1..420: mol_type = unassigned DNA
atgggactcttggtatttgtgcgcaatctgctgctagccctctgcctctttctggtactgggatttttgtattattctgcgtggaagctacacttactccagtgggaggaggactccaagtatgatcggttgggcttcctcctgaatctggactctaaactgcctgctgaattagccaccaagtacgcaaacttttcagagggagcttgcaagcctggctatgcttcagccttgatgacggccatcttcccccggttctccaagccagcacccatgttcctggatgactcctttcgcaagtgggctagaatccgggagttcgtgccgccttttgggatcaaaggtcaagtcctggacgcacaatatccagcgagagaaagagtttctgcggaagctggtgaaagctcgcgtcatcactga

SEQ ID NO: 30022 - DNA, 344 bp, Homo sapiens
  source 1..344: mol_type = unassigned DNA
atgggactcttggtatttgtgcgcaatctgctgctagccctctgcctctttctggtactgggatttttgtattattctgcgtggaagctacacttactccagtgggaggaggactccaagtatgatcggttgggcttcctcctgaatctggactctaaactgcctgctgaattagccaccaagtacgcaaacttttcagagggagcttgcaagcctggctatgcttcagccttgatgacggccatcttcccccgtcctggacgcacaatatccagcgagagaaagagtttctgcggaagctggtgaaagctcgcgtcatcactgatctaagcagtggcatctga

SEQ ID NO: 30023 - DNA, 786 bp, Homo sapiens
  source 1..786: mol_type = unassigned DNA
atgggactcttggtatttgtgcgcaatctgctgctagccctctgcctctttctggtactgggatttttgtattattctgcgtggaagctacacttactccagtgggaggaggactccaagtatgatcggttgggcttcctcctgaatctggactctaaactgcctgctgaattagccaccaagtacgcaaacttttcagagggagcttgcaagcctggctatgcttcagccttgatgacggccatcttcccccggttctccaagccagcacccatgttcctggatgactcctttcgcaagtgggctagaatccgggagttcgtgccgccttttgggatcaaaggtcaagacaatctgatcaaagccatcttgtcagtcaccaaagagtaccgcctgacccctgccttggacagcctccgctgccgccgctgcatcatcgtgggcaatggaggcgttcttgccaacaagtctctggggtcacgaattgacgactatgacattgtggtgagactgaattcagcaccagtgaaaggctttgagaaggacgtgggcagcaaaacgacactgcgcatcacctaccccgagggcgccatgcagcggcctgagcagtacgagcgcgattctctctttgtcctcgccggcttcaagtggcaggactttaagtggttgaaatacatcgtctacaaggagagagtgtcctggacgcacaatatccagcgagagaaagagtttctgcggaagctggtgaaagctcgcgtcatcactgatctaagcagtggcatctga

SEQ ID NO: 30024 - DNA, 834 bp, Homo sapiens
  source 1..834: mol_type = unassigned DNA
atgggactcttggtatttgtgcgcaatctgctgctagccctctgcctctttctggtactgggatttttgtattattctgcgtggaagctacacttactccagtgggaggaggactccaattcagtggttctttcctttgactccgctggacaaacactaggctcagagtatgatcggttgggcttcctcctgaatctggactctaaactgcctgctgaattagccaccaagtacgcaaacttttcagagggagcttgcaagcctggctatgcttcagccttgatgacggccatcttcccccggttctccaagccagcacccatgttcctggatgactcctttcgcaagtgggctagaatccgggagttcgtgccgccttttgggatcaaaggtcaagacaatctgatcaaagccatcttgtcagtcaccaaagagtaccgcctgacccctgccttggacagcctccgctgccgccgctgcatcatcgtgggcaatggaggcgttcttgccaacaagtctctggggtcacgaattgacgactatgacattgtggtgagactgaattcagcaccagtgaaaggctttgagaaggacgtgggcagcaaaacgacactgcgcatcacctaccccgagggcgccatgcagcggcctgagcagtacgagcgcgattctctctttgtcctcgccggcttcaagtggcaggactttaagtggttgaaatacatcgtctacaaggagagagtgtcctggacgcacaatatccagcgagagaaagagtttctgcggaagctggtgaaagctcgcgtcatcactgatctaagcagtggcatctga

SEQ ID NO: 30025 - DNA, 1646 bp, Homo sapiens
  source 1..1646: mol_type = unassigned DNA
actatggcggcgcccatgcagcccagcgcgttgtgggctcccgccggggtcccccgcggctgtcgccgccgcctacgccgctgcctccgccttcctgccccgcgtcgggccgggcgccacctcccccctgcctccctctccgctgtggtcatttaggaaatcgtaaatcatgtgaagatgggactcttggtatttgtgcgcaatctgctgctagccctctgcctctttctggtactgggatttttgtattattctgcgtggaagctacacttactccagtgggaggaggactccagtaagtatagtcactctagctcaccccaggagaagcctgttgcagattcagtggttctttcctttgactccgctggacaaacactaggctcagagtatgatcggttgggcttcctcctgaatctggactctaaactgcctgctgaattagccaccaagtacgcaaacttttcagagggagcttgcaagcctggctatgcttcagccttgatgacggccatcttcccccggttctccaagccagcacccatgttcctggatgactcctttcgcaagtgggctagaatccgggagttcgtgccgccttttgggatcaaaggtcaagtcctggacgcacaatatccagcgagagaaagagtttctgcggaagctggtgaaagctcgcgtcatcactgatctaagcagtggcatctgagtgggcccagcacatggccatagaggcccaggcaccaccaggagcagcagccagcaccacctacacaggagtcttcagacccagagaaggacggtgccaagggccccaggggcagcaaggccttggtggagcagccagagctgtgcctgctcagcagccagtctcagagaccagcactcagcctcattcagcatgggtccttgatgccagagggccagcaggctcctggctgtgcccagcaggcccagcatgcaggtggtgggacactgggcagcaaggctgctgccggaatcacttctccaatcagtgtttggtgtattatcattttgtgaatttgggtaggggggagggtagggataatttatttttaaataaggttggagatgtcaagttgggttcacttgccatgcaggaagaggcccactagagggcccatcaggcagtgttacctgttagctccctgtggggcaggagtgccaggaccagcctgtaccttgctgtggggctacaggatggtgggcaggatctcaagccagccccctccagctcatgacactgtttggcctttcttggggagaaggcggggtattcccactcaccagccctagctgtcccatggggaaaccctggagccatcccttcggagccaacaagaccgccccagggctatagcagaaagaactttaaagctcaggagggtgacgcccagctccgcctgctgggaagagctcccctccacagctgcagctgatccataggactaccgcaggcccggactcaccaacttgccacatgttctaggtttcagcaacaagactgccaggtggttgggttctgcctttagcctggaccaaagggaagtgaggcccaaggagcttacccaagctgtggcagccgtcccaggccacccccatggaagcaataaagctcttccctg

SEQ ID NO: 30026 - DNA, 3148 bp, Homo sapiens; identical to SEQ ID NO: 29998
  source 1..3148: mol_type = unassigned DNA

SEQ ID NO: 30027 - DNA, 2092 bp, Homo sapiens
  source 1..2092: mol_type = unassigned DNA
gagcctgagactccgggcagggctgctccctcctctgctcccccgccagatccgcggggaaggaatcgtgcccgcgccgcccctggcccgcgccaccttcctttggtttctgccggcctcgggcttctgcggcccgatgtggcaggcgccgcgagagaggcagcagccggctggagcagcggcccctcaggtctcggagcccggtgcgcctctgcggtcgtcgctcctgggcctcggcgggtcactcttgccggccggcttcgctgcgggtttgcactgcccggcatttgcaagtgaggaagcagcacaaccctgggttttagataatttctaacagagaggccccagcaattcagcaggcagcgtcctgagtctttggcagcctggtccctctttcgcaaattctccacctttgcgaacagagggtctttaggacacagattcttaaaagtgcaggtgagccagccatgagagggtatcttgtggccatattcctgagtgctgtcttcctctattatgtactgcattgcatattatggggaacgaatgtctattgggtggcacctgtggaaatgaaacggagaaataagatccagccttgtttatcaaagccagcttttgcctctctgctgaggtttcatcagtttcacccttttctgtgtgcggctgattttagaaagattgcttccttgtatggtagcgataagtttgatttgccctatgggatgagaacatcagcggaatattttcgacttgctctttcaaaactgcagagttgtgatctctttgatgagtttgacaacataccctgtaaaaagtgtgtggtggttggtaatggaggagttttgaagaataagacattaggagaaaaaatcgactcctatgatgtaataataagaatgaataatggtcctgttttaggacatgaagaagaagttgggagaaggacaaccttccgacttttttatccagaatctgttttttcagatcctattcacaatgaccctaatacgacagtgattctcactgcttttaagccacatgatttaaggtggctgttggaattgttgatgggtgacaaaataaacactaatggtttttggaagaaaccagccttaaacctgatttataaaccttatcaaatccgaatattagatcctttcattatcagaacagcagcttatgaactgcttcattttccaaaagtgtttcccaaaaatcagaaacctaaacacccaacaacaggaattattgccatcacattggcgttttacatatgtcacgaagttcacctagctggttttaaatacaacttttctgacctcaagagtcctttgcactactatgggaatgccaccatgtctttgatgaataagaacgcgtatcacaatgtgactgcagagcagctctttttgaaggacattatagaaaaaaacctcgtaatcaacttgactcaagattgactctacagactcagaagatgatgctaacagtgttagttttatttttgtactgcaatttttagtttaaaatatgttggatgcactcgtcaaataattatgtatactgtctgttgctgcctggtgattcataaccaccagcttaatttctgtgaatactgtatatttaacttatgaaaaccaagaaatgtaaagataacaggaaaataagttttgattgcattgtttttaaaataagctagttttctgaggtgttttcacacgtctttttatagttacttcatcttagatttttgaagggatatgacttcctactaaggatttagtttaccacaacaattctgactacaataagacattttgaggaggatatttggctactgtaaacatggctggtggaaaatcacgattgtggcttgatgtggcaagccgaaaccacttggctctggaaatctaagttcatactggtttaattaagctctctcctgacaacccccagaattaaatgaaccatgattgtgaagagtaatttggtacaatgaaggcagtgtttgtttttaagttaaaggaaatgggctaaacataaagttcttattagataagtaaataactaaagaaagaatacaattact

SEQ ID NO: 30028 - DNA, 1886 bp, Homo sapiens
  source 1..1886: mol_type = unassigned DNA
gtgtcacagtcagtccgcggcgccacaagcctcagtgtttacttctgccgcctgccagccgggcggggaaggggagtacccggccacccctcactttagctcctgcagctttccaaacaaaccagggcgggatgggagtgtcttcttggctgtggaaatcgatcctcctaccttgtcctgaagccacccgccgcctttcctcgtccctcccttcgcggtgattttccggtcccggcgcccggcgagggcgcgcggctggtgtccgccccgcccgaaaggtgagccagccatgagagggtatcttgtggccatattcctgagtgctgtcttcctctattatgtactgcattgcatattatggggaacgaatgtctattgggtggcacctgtggaaatgaaacggagaaataagatccagccttgtttatcaaagccagcttttgcctctctgctgaggtttcatcagtttcacccttttctgtgtgcggctgattttagaaagattgcttccttgtatggtagcgataagtttgatttgccctatgggatgagaacatcagcggaatattttcgacttgctctttcaaaactgcagagttgtgatctctttgatgagtttgacaacataccctgtaaaaagtgtgtggtggttggtaatggaggagttttgaagaataagacattaggagaaaaaatcgactcctatgatgtaataataagaatgaataatggtcctgttttaggacatgaagaagaagttgggagaaggacaaccttccgacttttttatccagaatctgttttttcagatcctattcacaatgaccctaatacgacagtgattctcactgcttttaagccacatgatttaaggtggctgttggaattgttgatgggtgacaaaataaacactaatggtttttggaagaaaccagccttaaacctgatttataaaccttatcaaatccgaatattagatcctttcattatcagaacagcagcttatgaactgcttcattttccaaaagtgtttcccaaaaatcagaaacctaaacacccaacaacaggaattattgccatcacattggcgttttacatatgtcacgaagttcacctagctggttttaaatacaacttttctgacctcaagagtcctttgcactactatgggaatgccaccatgtctttgatgaataagaacgcgtatcacaatgtgactgcagagcagctctttttgaaggacattatagaaaaaaacctcgtaatcaacttgactcaagattgactctacagactcagaagatgatgctaacagtgttagttttatttttgtactgcaatttttagtttaaaatatgttggatgcactcgtcaaataattatgtatactgtctgttgctgcctggtgattcataaccaccagcttaatttctgtgaatactgtatatttaacttatgaaaaccaagaaatgtaaagataacaggaaaataagttttgattgcattgtttttaaaataagctagttttctgaggtgttttcacacgtctttttatagttacttcatcttagatttttgaagggatatgacttcctactaaggatttagtttaccacaacaattctgactacaataagacattttgaggaggatatttggctactgtaaacatggctggtggaaaatcacgattgtggcttgatgtggcaagccgaaaccacttggctctggaaatctaagttcatactggtttaattaagctctctcctgacaacccccagaattaaatgaaccatgattgtgaagagtaatttggtacaatgaaggcagtgtttgtttttaagttaaaggaaatgggctaaacataaagttcttattagataagt

SEQ ID NO: 30029 - DNA, 750 bp, Homo sapiens
  source 1..750: mol_type = unassigned DNA
ggcgctcggcgcagtcgcccgggattggggctggcgggagcctgagactccggccatgagagggtatcttgtggccatattcctgagtgctgtcttcctctattatgtactgcattgcatattatggggaacgaatgtctattgggtggcacctgtggaaatgaaacggagaaataagatccagccttgtttatcaaagccagcttttgcctctctgctgaggtttcatcagtttcacccttttctgtgtgcggctgattttagaaagattgcttccttgtatggtagcgataagtttgatttgccctatgggatgagaacatcagcggaatattttcgacttgctctttcaaaactgcagagttgtgatctctttgatgagtttgacaacataccctgtaaaaagtgtgtggtggttggtaatggaggagttttgaagaataagacattaggagaaaaaatcgactcctatgatgtaataataagaatgaataatggtcctgttttaggacatgaagaagaagttgggagaaggacaaccttccgacttttttatccagaatctgttttttcagatcctattcacaatgaccctaatacgacagtgattctcactgcttttaagccacatgatttaaggtggctgttggaattgttgatgggtgacaaaataaacactaatggtttttggaagaaaccagccttaaacctgatttataaaccttatcaaatccgaatattagatccttt

SEQ ID NO: 30030 - DNA, 1291 bp, Homo sapiens
  source 1..1291: mol_type = unassigned DNA
gtctctaatctctgcaacagccgcgcttcccgggtcccgcggctcccgcgcgcgatctgccgcggccggctgctgggcaaaaatcagagccgcctccgccccattacccatcatggaaaccctccaggaaaaagtggccccggacgcgcgagcctgaggattctgcacaaaagaggtgcccaaaatgaagaccctgatgcgccatggtctggcagtgtgtttagcgctcaccaccatgtgcaccagcttgttgctagtgtacagcagcctcggcggccagaaggagcggcggagagcagcacccagcagcgccccggggtccccgcgggaccgcggccactggacggatacctcggagtggcggaccacaagcccctgaaaatgcactgcagggactgtgccctggtgaccagctcagggcatctgctgcacagtcggcaaggctcccagattgaccagacagagtgtgtcatccgcatgaatgacgcccccacacgcggctatgggcgtgacgtgggcaatcgcaccagcctgagggtcatcgcgcattccagcatccagaggatcctccgcaaccgccatgacctgctcaacgtgagccagggcaccgtgttcatcttctggggccccagcagctacatgcggcgggacggcaagggccaggtctacaacaacctgcatctcctgagccaggtgctgccccggctgaaggccttcatgattactcgccacaagatgctgcagtttgatgagctcttcaagcaggagactggcaaagacaggaagatatccaacacttggctcagcactggctggtttacaatgacaattgcactggagctctgtgacaggatcaatgtttatggcatggtgcccccagacttctgcagggatcccaatcacccttcagtaccttatcattattatgaaccttttggacctgatgaatgtacaatgtacctctcccatgagcgaggacgcaagggcagtcatcaccgctttatcacagagaaacgagtctttaagaactgggcacggacattcaatattcacttttttcaaccagactggaaaccagaatcacttgctataaatcatcctgagaataaacctgtgttctaaggaatgagcatgccagactgtaatcccaggtattcactgcatcagacaccgagacactgaacttcctgagccaccagacaggaaagggtagcagaaaacagcttcactcctcaggaagtaccatggacagacgcctaccaggggtgacaaagcagtgcagttggattgt

SEQ ID NO: 30031 - DNA, 3751 bp, Homo sapiens
  source 1..3751: mol_type = unassigned DNA
agttgtgtagatcgctgagagactacgagggtccggttcagttttaattctgtctctaatctctgcaacagccgcgcttcccgggtcccgcggctcccgcgcgcgatctgccgcggccggctgctgggcaaaaatcagagccgcctccgccccattacccatcatggaaaccctccaggaaaaagtggccccggacgcgcgagcctgaggattctgcacaaaagaggtgcccaaaatgaagaccctgatgcgccatggtctggcagtgtgtttagcgctcaccaccatgtgcaccagcttgttgctagtgtacagcagcctcggcggccagaaggagcggcccccgcagcagcagcagcagcagcagcaacagcagcagcaggcgtcggccaccggcagctcgcagccggcggcggagagcagcacccagcagcgccccggggtccccgcgggaccgcggccactggacggatacctcggagtggcggaccacaagcccctgaaaatgcactgcagggactgtgccctggtgaccagctcagggcatctgctgcacagtcggcaaggctcccagattgaccagacagagtgtgtcatccgcatgaatgacgcccccacacgcggctatgggcgtgacgtgggcaatcgcaccagcctgagggtcatcgcgcattccagcatccagaggatcctccgcaaccgccatgacctgctcaacgtgagccagggcaccgtgttcatcttctggggccccagcagctacatgcggcgggacggcaagggccaggtctacaacaacctgcatctcctgagccaggtgctgccccggctgaaggccttcatgattactcgccacaagatgctgcagtttgatgagctcttcaagcaggagactggcaaagacaggaagatatccaacacttggctcagcactggctggtttacaatgacaattgcactggagctctgtgacaggatcaatgtttatggcatggtgcccccagacttctgcagggatcccaatcacccttcagtaccttatcattattatgaaccttttggacctgatgaatgtacaatgtacctctcccatgagcgaggacgcaagggcagtcatcaccgctttatcacagagaaacgagtctttaagaactgggcacggacattcaatattcacttttttcaaccagactggaaaccagaatcacttgctataaatcatcctgagaataaacctgtgttctaaggaatgagcatgccagactgtaatcccaggtattcactgcatcagacaccgagacactgaacttcctgagccaccagacaggaaagggtagcagaaaacagcttcactcctcaggaagtaccatggacagacgcctaccaggggtgacaaagcagtgcagttggattgtaaggaaaaattccggaattaatgcatcctaatgaatgttgtccccttcaatggtgttaccttaggagctgaacattcaattcagttacaccactatgactaaaaacagtttggatctcttagtattgcctttgaaactgcaacataagcaactcaacaatattagttgcattcctttatagacataccatgtcaaagacgtttttctatcaagttgtattctttcctgttctataacctttgtcatctgttagactctgtatgtgtgatttgtaaaaagcaggctgaaactatggacatgatttctgaagagcacatctccactgactttcataaagcaaatgtccaatatttatttattgagagttttttagtgcaatctgggccagtatttttatagattatgattatgtggtaatttatccttcctaactctttaatcctgaatgatggttggaaatggcctagaattaggttactctgttcacaatgctcattgttagcatgcaattggtatttgacttggaagtgttgtgttgtattttttgaacccctaggcttcaggaaaactgctcttttgtaaaaagaatagcgatgacattttctaatgtgcagaaatgttccaaaaggacaaaattgaaaaccaaaaactatgttattaaaacaaaaaaatgctaacaagagaaatttaaaggtagttttctttagtaataatttatgtaagtgtcctctcttgagccctagtttcctttttggcagaatgatgtcactgtaccagacaacctcttaggtttcatcccaaatctaaacttgtggcctcttcttgacccatttgaagactctgcacttggagtgatggggccccaacagtagcaggaactttattttggggagccttatctacattcatattacttatatcactcttgtggttaaaactacacttcttcctgtgtccacatgggctaaaatctaccccctgcttctctcgaagcatcaccatccgcctcttccccagcctctcaacacaaaaacacaggatacacacacacacacacacacaaaagacatagctccaaggggttccctggctacaatagcaaacagctgcccttctgtgaggaaaagagactacaaggacatgccctatcattcaactcatttatgctatgaactgtttagactcactacaaatcttcttagattatattcattaccattccctggtctgaaggagtataaaggacttattttattcagagccaagataaattcatattatagatttttatttaaacaagtaatattgttcaaaaatagtctcttataaatatactagtgttttctttacacatgacttagaaggcattagtttctctaatgccaaatttgaaggcaccagcaaatattatgtatgaagactgacattgttttacagacatgacctggcttatgataaaagaagttttatcgcattaccacttcttttcccttttcttaattagtacactaactagtactattaattacacggagtattgttgttaaaatgcaaacacaatcagggtactcacataacataaacaaagttgatattgatgtgtatggcttgggctgttcaaagccagtaagattgaaatggccgtccaaaacatactggaatatgttctttaagttttctcatagtttttaaagggactatgaattttattccaacacattgtcttccacagcatggactctgaacacatcatactttatcaacatatgaaaaagtgtattaattttatacaatttacttataggccacctttataatcacttgaagacgttatgttgctcaaacataagtggctcctttggcaatttctatatttgtggaaatttggaaaggcatagtttcaacatgcaagaatgtaattatattgcttcatctaataatatctcacatatctgtctatcttcagattttagattttctttattaaaaaaaccatcatggtagctccatctcgtttgtaacttctccctctcaaatactcagaagaatgaagaggccaaattcagaaaatcatggcttcactgggaaatgttttaaatctacatgtagctaggatatgtgatttcatattttttaaaaatgtggtgtaaataagtgtaaaaaattaccacttgcaaagtggttttattacagcgttaaagaaaatgactagaattctgatagattgtgctgatgaacctggttgtgggcaattgaattcttgtcttcccactaccatttcatgactgtcgtctgaacactattcaacaccattaaatataaactctgatataaaa

SEQ ID NO: 30032 - DNA, 1949 bp, Homo sapiens
  source 1..1949: mol_type = unassigned DNA
acgtttccggaacctccgggtgtcatccgcggggaaagaacttggtcctgatgtctgaccatggagatgtgagcctcccgcccgaagaccgggtgagggctctctcccagctgggtagtgcggtagaggtgaatgaagacattccaccccgtcggtacttccgctctggagttgagattatccgaatggcatccatttactctgaggaaggcaacattgaacatgccttcatcctctataacaagtatatcacgctctttattgagaaactaccaaaacatcgagattacaaatctgctgtcattcctgaaaagaaagacacagtaaagaaattaaaggagattgcatttcccaaagcagaagagctgaaggcagagctgttaaaacgatataccaaagaatatacagaatataatgaagaaaagaagaaggaagcagaggaattggcccggaacatggccatccagcaagagctggaaaaggaaaaacagagggtagcacaacagaagcagcagcaattggaacaggaacagttccatgccttcgaggagatgatccggaaccaggagctagaaaaagagcgactgaaaattgtacaggagtttgggaaggtagaccctggcctaggtggcccgctagtgcctgacttggagaagccctccttagatgtgttccccaccttaacagtctcatccatacagccttcagactgtcacacaactgtaaggccagctaagccacctgtggtggacaggtccttgaaacctggagcactgagcaactcagaaagtattcccacaatcgatggattgcgccatgtggtggtgcctgggcggctgtgcccacagtttctccagttagccagtgccaacactgcccggggagtggagacatgtggaattctctgtggaaaactgatgaggaatgaatttaccattacccatgttctcatccccaagcaaagtgctgggtctgattactgcaacacagagaacgaagaagaacttttcctcatacaggatcagcagggcctcatcacactgggctggattcatactcaccccacacagaccgcgtttctctccagtgtcgacctacacactcactgctcttaccagatgatgttgccagagtcagtagccattgtttgctcccccaagttccaggaaactggattctttaaactaactgaccatggactagaggagatttcttcctgtcgccagaaaggatttcatccacacagcaaggatccacctctgttctgtagctgcagccacgtgactgttgtggacagagcagtgaccatcacagaccttcgatgagcgtttgagtccaacaccttccaagaacaacaaaaccatatcagtgtactgtagccccttaatttaagctttctagaaagctttggaagtttttgtagatagtagaaaggggggcatcacctgagaaagagctgattttgtatttcaggtttgaaaagaaataactgaacatattttttaggcaagtcagaaagagaacatggtcacccaaaagcaactgtaactcagaaattaagttactcagaaattaagtagctcagaaattaagaaagaatggtataatgaacccccatatacccttccttctggattcaccaattgttaacatttttttcctctcagctatccttctaatttctctctaatttcaatttgtttatatttacctctgggctcaataagggcatctgtgcagaaatttggaagccatttagaaaatcttttggattttcctgtggtttatggcaatatgaatggagcttattactggggtgagggacagcttactccatttgaccagattgtttggctaacacatcccgaagaatgattttgtcaggaattattgttatttaataaatatttcaggatatttttcctctacaataaagtaacaattaactt

SEQ ID NO: 30033 - DNA, 6691 bp, Homo sapiens
  source 1..6691: mol_type = unassigned DNA
ggtggggcagggcctccgagcgtggttggactttgaaggggatcggccgccgtgagtgtggggcctgcagcctactctccccgagtcccctgcccggcctgcctcgctcgaggcacccgacggcttctgtctccgcgggctggcgcctgaccagccaggcccagcggttccccgcctactgcatttgaaagatcccgaaaaccctggatgattgtgcctggggttggcaagttcgtcttgagtgccttcaagaagggttcctcaagcagttgtcgatagagccctccctactgtatacgccccctccgctcattcctgctacttcctttctcctcctcgtatttccccctcggtcctttacgccgcctttccccctcatttgcagatgctgcatcccctttttggaattgctcaaccaggtggtaaccggcgccgcttcctggccttgggaggtggttcctttcttaacccacaagaacctctcccaagagaacttggtcctgatgtctgaccatggagatgtgagcctcccgcccgaagaccgggtgagggctctctcccagctgggtagtgcggtagaggtgaatgaagacattccaccccgtcggtacttccgctctggagttgagattatccgaatggcatccatttactctgaggaaggcaacattgaacatgccttcatcctctataacaagtatatcacgctctttattgagaaactaccaaaacatcgagattacaaatctgctgtcattcctgaaaagaaagacacagtaaagaaattaaaggagattgcatttcccaaagcagaagagctgaaggcagagctgttaaaacgatataccaaagaatatacagaatataatgaagaaaagaagaaggaagcagaggaattggcccggaacatggccatccagcaagagctggaaaaggaaaaacagagggtagcacaacagaagcagcagcaattggaacaggaacagttccatgccttcgaggagatgatccggaaccaggagctagaaaaagagcgactgaaaattgtacaggagtttgggaaggtagaccctggcctaggtggcccgctagtgcctgacttggagaagccctccttagatgtgttccccaccttaacagtctcatccatacagccttcagactgtcacacaactgtaaggccagctaagccacctgtggtggacaggtccttgaaacctggagcactgagcaactcagaaagtattcccacaatcgatggattgcgccatgtggtggtgcctgggcggctgtgcccacagtttctccagttagccagtgccaacactgcccggggagtggagacatgtggaattctctgtggaaaactgatgaggaatgaatttaccattacccatgttctcatccccaagcaaagtgctgggtctgattactgcaacacagagaacgaagaagaacttttcctcatacaggatcagcagggcctcatcacactgggctggattcatactcaccccacacagaccgcgtttctctccagtgtcgacctacacactcactgctcttaccagatgatgttgccagagtcagtagccattgtttgctcccccaagttccaggaaactggattctttaaactaactgaccatggactagaggagatttcttcctgtcgccagaaaggatttcatccacacagcaaggatccacctctgttctgtagctgcagccacgtgactgttgtggacagagcagtgaccatcacagaccttcgatgagcgtttgagtccaacaccttccaagaacaacaaaaccatatcagtgtactgtagccccttaatttaagctttctagaaagctttggaagtttttgtagatagtagaaaggggggcatcacctgagaaagagctgattttgtatttcaggtttgaaaagaaataactgaacatattttttaggcaagtcagaaagagaacatggtcacccaaaagcaactgtaactcagaaattaagttactcagaaattaagtagctcagaaattaagaaagaatggtataatgaacccccatatacccttccttctggattcaccaattgttaacatttttttcctctcagctatccttctaatttctctctaatttcaatttgtttatatttacctctgggctcaataagggcatctgtgcagaaatttggaagccatttagaaaatcttttggattttcctgtggtttatggcaatatgaatggagcttattactggggtgagggacagcttactccatttgaccagattgtttggctaacacatcccgaagaatgattttgtcaggaattattgttatttaataaatatttcaggatatttttcctctacaataaagtaacaattaacttatgtttttgtgcttcagagtgatccatttgatcaagcattgtataaacaggttaaaaaaaaggtatggttgttttggaaaggtgaaggaaaaatggaatttgagatatactgacactgatggtgtgtcccagttcacttttaattactccttgttttttatctgcctgttgccatcttccagaggtgttgtgaagtcatctctgttcttttggtgctgtctcaaatgggtcaaccattcacttcctccttatgccctccatgcttttggctgaggataatgaagcctttgtttggagtaccaggttacactccaataaatgattacatttcccagccaccccaccctaccaatttcattgtgttggctgttcttttctgactaaggcaatacctaggaaaacgcttgaagcagcaattgttactgcaattttctgtgagctgagcctggtgttctaggtggcctagaaataatggtgtcatttgtgacacctcgagtgagggcaggagagtaaatactttggctaggagaagagtgatttattctttatcagaattctaggtgggggagggagaatctgtgaatgcataaagttttcttcatttttaaattttgtctcagtctttattgcttaggttagtggtccttgaacttgtcccctgaaagagcccagttctctatattctttttcttctcttgggttcttaattccccatatagtggaaattccttctttgctgttttggtatgggtgggtctgggggccagctgggcttggacaagccatttcctgctgcagcccagagcagcctggctgttccaccttgctctaaacagtcctgaaattgcccagtcctctgcttttgggaaatccatccccttcttcccattctttgtctaccacttagcttagggctttcttaccttttatttcgactgtagccgttggcttttaccaagtctctttgtttttagcatttcttcattccagtctgttctgcacactttgatcaggagaagcttctcacattccagccatgttcatgttttctctcttgctcaaaaacctgcaatagcttcccattgctgaaaatctaaatttagcttttagtcagaactttccacttaaagttcttacccctggctatatattcaaatatctagggagcaatttaaaaaatactgatgcctgtgttctaccccccaccaattaaagctgaatctctagggtggagcctcagatgttgtttctgcatttgtctttcaagctgctagaattctcaagtacaaccagggttgacaaccactgcattggtctttgatacctaagaattgtgagctctcttatccgtctctgcccaccaaagacattcagccaggtcaacaacatatcatacgttgcaaccacattgatcacagactgatcaccaaactgctatattttcttttctcttcctctaggcacaagatatcttagtggctagatgggtgcaggaaatcagtctgtagatccctcttcatatctgctgcagcctagccactgcagaggcactctgcataggatggtctaagtgtctctgtcttcatcttacctctgtggaggagacgtggaatcaagccagcccacaagccctgagactggataggccggagagaaagaggagtagccagagcggtcgggaaaagaggaaaggaatactgtgggtaaaagggacaaagaccacgcaacctgaggaaagacattgtattgaaagggtaatgactatttggctaaagggactgactcctgggttcccgaggctcaaagaccaggagacttttccactcttgcaagctgcacaagtaccatacttagtgttctgggctgagaggggagacaaaagcatcgtcaggttgccaaacaatgtcccagttgccctgggaggcacaaacctaccaaagtgccataggccaggtgcagagagaatcagaggagctgatttgcttggggtcagagcagagctgggttttttcagatgatcactttcacatactccttgttaaatgggaccaaaggggaagaagaagaaacccttaagcttttgtaatattgtcttgggtaccagataccataaaaggcagcatgagagaaacattcccttgggccagtgtcatggtggattttcttgcttgagaggcaaggatttcagctttcatttggtaccacagaatttaaaattgtaagtgcctatcccttttgactgttgatggcttctttggggttttagttaccccagttgaaagagaaatttttcatattggggttgagaagaatggaggctattaggagcaaagctttaatgagtgaaagtctggtgaatcctgcaattttgatatgtttccagtggattttgagaacacagttttaggaccagagtagatgttgttccctagaaaatagagtcagctattgatattgtgcctcccatccctcatatctcagtgttttaaccccacctgagtttggagaccagtttgtccaaggatctttcaaacatgtgagcccagagtagaacttctgagtcaaggatcatgtctttttctgaggagctttgcttggggcactggaaatcctgtttagatcaggactattggaatattatcctctccaggggaagtgccaggttgaacatttaaggctttgcttctaggcccagctatacattcaccagcaaatcacttaacttcctaaatttctttaaaatctgtaaaatgggatcagtctaatatgcctacctcaaatgatgacagaatgacatctatatgcatatgaggcctacgttagttgaaagatgctataaagatataagggatttgttacttgtctttcttgaaatgttacagttggggtgcggttgcttctatcttctggacctctgcccattcagcatacagctagaggaatctttgggcagatccacattctttagcactagctaggctttgactccaaagctatctggtctaccttgatgttctgagcaggaaaactgaggacctcaagaaccattccaaatttctactcattctccctaagacccagagcagacccaggacctaaagaaattacatcatctctattttcccttggctccagcccactcttgtttgaacctcccacttttgttgttccaactacttcttgagatgaaggaagggcagaacattggccctcttcactgaagtcttcaccccttaatccagggttcaatttttagttcaccttagcctgtttgagattagaagctgggccttaacttacaggtgtgtccggcatcattcaatcagcctgttagatccagaatccagcactgtgacgctacataaccatgggctctgtccttccagttcctttagtgccttccctcactggtaggttcactctgagggcttccttccttgaactccagtggcaactatagtctgtttcccacaatttgttgtgtgtgttttttgttgttttgcagcgttttcatattgtcttttatgtaagtcatgtttctgaactatcgtataaatttcattagggtaagaatcatgtttgctttatgcactgtgtaacatgccttgcagtcagtataggcacttaaccttattgatcagttgttccttggtgttgaataatgtgttaggtagccaggtggacctgtgtcctagcctggagaagctctatgtcaccttgtaggaagccatctgaatttgactcagcatcatatgctgggcctgtgctgcacttgagctttctttccagccgccaggagggatggttgtcctggccaacagcgaatttaatgggtggtcaaaagaagatgtgcctgcatagaaggctgaaagagggagctggaagtaggaggagacaaggagatagtgacaccagtatcttgtcacagaaatcaaggaaggcaacagtttaaaggaggggagggagatcagtggtgccaactggctcagaagaggtttgctgggttaaatctcaagatgagcccatgagatctggtggttagcagaggcctttcctgacaaccccattttaagcacctcttccccatcactctatctcatcactgttactgtctgtgtagccctgtcatgagctaaaatcatcctgtttgtttattgctagcttatgtgtctaaagtatactccttgagaacagcaactttgtctttttcacctttgtactgagtcccctgacatggaataagatatgaataaatgcacagacttgtccaaaatcatccaattaataaa

SEQ ID NO: 30034 - DNA, 2088 bp, Homo sapiens
  source 1..2088: mol_type = unassigned DNA
gggaagggtcccgggaacgtggtggggcagggcctccgagcgtggttggactttgaaggggatcggccgccatgctgcatcccctttttggaattgctcaaccaggtggtaaccggcgccgcttcctggccttgggaggtggttcctttcttaacccacaagaacctctcccaagagaacttggtcctgatgtctgaccatggagatgtgagcctcccgcccgaagaccgggtgagggctctctcccagctgggtagtgcggtagaggtgaatgaagacattccaccccgtcggtacttccgctctggagttgagattatccgaatggcatccatttactctgaggaaggcaacattgaacatgccttcatcctctataacaagtatatcacgctctttattgagaaactaccaaaacatcgagattacaaatctgctgtcattcctgaaaagaaagacacagtaaagaaattaaaggagattgcatttcccaaagcagaagagctgaaggcagagctgttaaaacgatataccaaagaatatacagaatataatgaagaaaagaagaaggaagcagaggaattggcccggaacatggccatccagcaagagctggaaaaggaaaaacagagggtagcacaacagaagcagcagcaattggaacaggaacagttccatgccttcgaggagatgatccggaaccaggagctagaaaaagagcgactgaaaattgtacaggagtttgggaaggtagaccctggcctaggtggcccgctagtgcctgacttggagaagccctccttagatgtgttccccaccttaacagtctcatccatacagccttcagactgtcacacaactgtaaggccagctaagccacctgtggtggacaggtccttgaaacctggagcactgagcaactcagaaagtattcccacaatcgatggattgcgccatgtggtggtgcctgggcggctgtgcccacagtttctccagttagccagtgccaacactgcccggggagtggagacatgtggaattctctgtggaaaactgatgaggaatgaatttaccattacccatgttctcatccccaagcaaagtgctgggtctgattactgcaacacagagaacgaagaagaacttttcctcatacaggatcagcagggcctcatcacactgggctggattcatactcaccccacacagaccgcgtttctctccagtgtcgacctacacactcactgctcttaccagatgatgttgccagagtcagtagccattgtttgctcccccaagttccaggaaactggattctttaaactaactgaccatggactagaggagatttcttcctgtcgccagaaaggatttcatccacacagcaaggatccacctctgttctgtagctgcagccacgtgactgttgtggacagagcagtgaccatcacagaccttcgatgagcgtttgagtccaacaccttccaagaacaacaaaaccatatcagtgtactgtagccccttaatttaagctttctagaaagctttggaagtttttgtagatagtagaaaggggggcatcacctgagaaagagctgattttgtatttcaggtttgaaaagaaataactgaacatattttttaggcaagtcagaaagagaacatggtcacccaaaagcaactgtaactcagaaattaagttactcagaaattaagtagctcagaaattaagaaagaatggtataatgaacccccatatacccttccttctggattcaccaattgttaacatttttttcctctcagctatccttctaatttctctctaatttcaatttgtttatatttacctctgggctcaataagggcatctgtgcagaaatttggaagccatttagaaaatcttttggattttcctgtggtttatggcaatatgaatggagcttattactggggtgagggacagcttactccatttgaccagattgtttggctaacacatcccgaagaatgattttgtcaggaattattgttatttaataaatatttcaggatatttttcctctacaataaagtaacaattaactt

SEQ ID NO: 30035 - DNA, 1649 bp, Homo sapiens
  source 1..1649: mol_type = unassigned DNA
tttccggaacctccgggtgtcatccgcggggaaagaacttggtcctgatgtctgaccatggagatgtgagcctcccgcccgaagaccgggtgagggctctctcccagctgggtagtgcggtagaggtgaatgaagacattccaccccgtcggtacttccgctctggagttgagattatccgaatggcatccatttactctgaggaaggcaacattgaacatgccttcatcctctataacaagtatatcacgctctttattgagaaactaccaaaacatcgagattacaaatctgctgtcattcctgaaaagaaagacacagtaaagaaattaaaggagattgcatttcccaaagcagaagagctgaaggcagagctgttaaaacgatataccaaagaatatacagaatataatgaagaaaagaagaaggaagcagaggaattggcccggaacatggccatccagcaagagctggaaaaggaaaaacagagggtagcacaacagaagcagcagcaattggaacaggaacagttccatgccttcgaggagatgatccggaaccaggagctagaaaaagagcgactgaaaattgtacaggagtttgggaaggtagaccctggcctaggtggcccgctagtgcctgacttggagaagccctccttagatgtgttccccaccttaacagtctcatccatacagccttcagactgtcacacaactgtaaggccagctaagccacctgtggtggacaggtccttgaaacctggagcactgagcaactcagaaagtattcccacaatcgatggattgcgccatgtggtggtgcctgggcggctgtgcccacagtttctccagttagccagtgccaacactgcccggggagtggagacatgtggaattctctgtggaaaactgatgaggaatgaatttaccattacccatgttctcatccccaagcaaagtgctgggtctgattactgcaacacagagaacgaagaagaacttttcctcatacaggatcagcagggcctcatcacactgggctggattcatactcaccccacacagaccgcgtttctctccagtgtcgacctacacactcactgctcttaccagatgatgttgccagagtcagtagccattgtttgctcccccaagttccaggaaactggattctttaaactaactgaccatggactagaggagatttcttcctgtcgccagaaaggatttcatccacacagcaaggatccacctctgttctgtagctgcagccacgtgactgttgtggacagagcagtgaccatcacagaccttcgatgagcgtttgagtccaacaccttccaagaacaacaaaaccatatcagtctcaccaagatggaggaacagagcccatggcccacttactacatggattcccactttacagtggagaaggagcttgcagtaaccacaaaagtttctgtataagcaaatttagggaattgaacttcagacagtgtggttgtctccttacttatgaacttgggaatacttacttaggtaacaactaacatcagaggtttttgatctgtagcctttctttctgtccataattagctaatagcttctgctgtacaaacacaaaccattccctgtccaagaaaatta

SEQ ID NO: 30036 - DNA, 583 bp, Homo sapiens
  source 1..583: mol_type = unassigned DNA
gggaaaggtggggaagggtcccgggaacgtggtggggcagggcctccgagcgtggttggactttgaaggggatcggccgccaacttggtcctgatgtctgaccatggagatgtgagcctcccgcccgaagaccgggtgagggctctctcccagctgggtagtgcggtagaggtgaatgaagacattccaccccgtcggtacttccgctctggagttgagattatccgaatggcatccatttactctgaggaaggcaacattgaacatgccttcatcctctataacaagtatatcacgctctttattgagaaactaccaaaacatcgagattacaaatctgctgtcattcctgaaaagaaagacacagtaaagaaattaaaggagattgcatttcccaaagcagaagagctgaaggcagagctgttaaaacgatataccaaagaatatacagaatataatgaagaaaagaagaaggaagcagaggaattggcccggaacatggccatccagcaagagctggaaaaggaaaaacagagggtagcacaacagaagcagcagcaattggaacaggaacagttccatg

SEQ ID NO: 30037 - DNA, 1156 bp, Homo sapiens
  source 1..1156: mol_type = unassigned DNA
gcggggaaaggtggggaagggtcccgggaacgtggtggggcagggcctccgagcgtggttggactttgaaggggatcggccgccatgctgcatcccctttttggaattgctcaaccaggtggtaaccggcgccgcttcctggccttgggaggtggttcctttcttaacccacaagaacctctcccaagagaacttggtcctgatgtctgaccatggagatgtgagcctcccgcccgaagaccgggtgagggctctctcccagctgggtagtgcggtagaggtgaatgaagacattccaccccgtcggtacttccgctctggagttgagattatccgaatggcatccatttactctgaggaaggcaacattgaacatgccttcatcctctataacaagtatatcacgctctttattgagaaactaccaaaacatcgagattacaaatctgctgtcattcctgaaaagaaagacacagtaaagaaattaaaggagattgcatttcccaaagcagaagagctgaaggcagagctgttaaaacgatataccaaagaatatacagaatataatgaagaaaagaagaaggaagcagaggaattggcccggaacatggccatccagcaagagctggaaaaggaaaaacagagggtagcacaacagaagcagcagcaattggaacaggaacagttccatgccttcgaggagatgatccggaaccaggagctagaaaaagagcgactgaaaattgtacaggagtttgggaaggtagaccctggcctaggtggcccgctagtgcctgacttggagaagccctccttagatgtgttccccaccttaacagtctcatccatacagccttcagactgtcacacaactgtaaggccagctaagccacctgtggtggacaggtccttgaaacctggagcactgagcaactcagaaagtattcccacaatcgatggattgcgccatgtggtggtgcctgggcggctgtgcccacagtttctccagttagccagtgccaacactgcccggggagtggagacatgtggaattctctgtggaaaactgatgaggaatgaatttaccattacccatgttctcatccccaagcaaagtgctgggtctgattactgcaacacagagaacgaagaagaa

SEQ ID NO: 30038 - DNA, 560 bp, Homo sapiens
  source 1..560: mol_type = unassigned DNA
ggaacctccgggtgtcatccgcggggaaagatgctgcatcccctttttggaattgctcaaccaggtggtaaccggcgccgcttcctggccttgggaggtggttcctttcttaacccacaagaacctctcccaagagaacttggtcctgatgtctgaccatggagatgtgagcctcccgcccgaagaccgggtgagggctctctcccagctgggtagtgcggtagaggtgaatgaagacattccaccccgtcggtacttccgctctggagttgagattatccgaatggcatccatttactctgaggaaggcaacattgaacatgccttcatcctctataacaagtatatcacgctctttattgagaaactaccaaaacatcgagattacaaatctgctgtcattcctgaaaagaaagacacagtaaagaaattaaaggagattgcatttcccaaagcagaagagctgaaggcagagctgttaaaacgatataccaaagaatatacagaatataatgaagaaaagaagaaggaagcagaggaattggcccggaacatggcca

SEQ ID NO: 30039 - DNA, 1097 bp, Homo sapiens
  source 1..1097: mol_type = unassigned DNA
acgtttccggaacctccgggtgtcatccgcggggaaagaacttggtcctgatgtctgaccatggagatgtgagcctcccgcccgaagaccgggtgagggctctctcccagctgggtagtgcggtagaggtgaatgaagacattccaccccgtcggtacttccgctctggagttgagattatccgaatggcatccatttactctgaggaaggcaacattgaacatgccttcatcctctataacaagtatatcacgctctttattgagaaactaccaaaacatcgagattacaaatctgctgtcattcctgaaaagaaagacacagtaaagaaattaaaggagattgcatttcccaaagcagaagagctgaaggcagagctgttaaaacgatataccaaagaatatacagaatataatgaagaaaagaagaaggaagcagaggaattggcccggaacatggccatccagcaagagctggaaaaggaaaaacagagggtagcacaacagaagcagcagcaattggaacaggaacagttccatgccttcgaggagatgatccggaaccaggagctagaaaaagagcgactgaaaattgtacaggagtttgggaaggtagaccctggcctaggtggcccgctagtgcctgacttggagaagccctccttagatgtgttccccaccttaacagtctcatccatacagccttcagactgtcacacaactgtaaggccagctaagccacctgtggtggacaggtccttgaaacctggagcactgagcaactcagaaagtattcccacaatcgatggattgcgccatgtggtggtgcctgggcggctgtgcccacagtttctccagttagccagtgccaacactgcccggggagtggagacatgtggaattctctgtggaaaactgatgaggaatgaatttaccattacccatgttctcatccccaagcaaagtgctgggtctgattactgcaacacagagaacgaagaagaacttttcctcatacaggatcagcagggcctcatcacactgggctggattcatgtagaaactttgtggtcactgaagtccttacatgccccatga

SEQ ID NO: 30040 - DNA, 1899 bp, Homo sapiens
  source 1..1899: mol_type = unassigned DNA
atattatctgacctaataagcctggatattttgttagaactggagagcttgggactcctcctttttagcaaaactctgggttagtggtgacagagaaggttggaacacattttaataaccattttttagtgattccttcttatccataaatttccagcagagtatgagttctagagtcaaatgcgaaaggttctagggcagcactgttcaatagaactcctgtgatgatggaagtgttctgtttggcactttccaatatggtatccactagccacatgtggcttctgggtacttaaatgtgactgactagtgtccctgaggtactgaatttctaattttgtttaattttaatcaagttcaaataaccacatgtggctagtggccactatattagaagtgcagtaggggtgagatattttgtttcatatggtcttgttggtctgactgagcaaacaaccttgacgttgattttccagtatttaaaagcattagggaatgaagggatcctgattgtcatggcctgtctctggtaaaatatcagtggatttagaactgctatgttaatcagatcaaggggcttttgccctgatgttatgtatttctctcactgttccatgagtgtccctgtgggcatatcacagtatctagcattttctctgtctgcttgaagactgaaaatgtctaattccagttcaatgtttctccttggaaactaaccttctcttctggctgccacactttttagaacaaatataaagctgaaattctcaaaaaattggagcatcagagattgatagaggcagaaaggaagcggattgctcagatgcgccagcagcagctagaatcggagcagtttctgtttttcgaagatcaactcaagaagcaagagttagcccgaggtcaaatgcgaagtcagcaaacctcagggctgtcagagcagattgatgggagcgctttgtcctgcttttccacacaccagaacaattccttgctgaatgtatttgcagatcaacctaataaaagtgatgcaaccaattatgctagccactctcctcctgtaaacagggccttaacgccagctgctactctaagtgctgttcagaatttagtggttgaaggactgcgatgtgtagttttgccagaagatctttgccacaaatttctgcaactggcagaatctaatacagtgagaggaatagaaacctgtggaatactctgtggaaaactgacacataatgaatttactattacccatgtaattgtgccaaagcagtctgcgggaccagactattgtgacatggagaatgtagaggaattattcaatgttcaggatcaacatgatctcctcactctaggatggatccatacacatcccactcaaactgcatttttatccagcgttgatcttcacactcactgttcctatcaactcatgttgccagaggccattgccattgtttgctcaccaaagcataaagacactggcatcttcaggctcaccaatgctggcatgcttgaggtttctgcttgtaaaaaaaagggctttcatccacacaccaaggagcccaggctgttcagtatatgcaaacatgtgttggtaaaagacataaaaataattgtgttggatctgaggtgatatgttctgaatgtaagcaccgtcaacatcagacacctactcatggacatgtggttgccggattttcttaagatgtttccagaaatgactgatattttatatttatacattttagatgacaaagcttgatatttattgctgttgcacattttaaagttttctttttgggttgctctgtgtcaagagaggttacatggtgttaaatcggtacctgataatgtacccaaatactatggccagataataaattgtgctgcaaacaa

SEQ ID NO: 30041 - DNA, 2208 bp, Homo sapiens
  source 1..2208: mol_type = unassigned DNA
ctcttcatctttgtcatgtgattcaacatattcatgggaataatattccatgacctttgctgtcttctattggttagaagccaactacaggtcttaaacacactcaagtggagaggattacacaaacctacagatatcaaggggcaggaatcacagagctatcttagaattctgcctgttatagttctaaggttgagtttaaatccagactggctctaagtttaacagtccatgcttctaatcagtattatcttctttattcctttgaagaaagcaaacctactttataaccttgcatagagttctaagtaaggtatcccgcagcagattcatactgggtgtcagtcaaatgtgaattattttcacaccttcacttttaaagatcagcttcaggaaactataaccacttgcagttttgtattttcaggaagagatttccaacagtctctctaaacactcaggttatataggttatttcaatttgttcctgtttgtctgaggcagagataaccctggggtttgggatttcaaacttgggtctcaaaaaataactttagttctgcttcttgtttttgaaacagatgaagtgattgagaagaaacagtgaacatcctcatttcacagataagacaacatggatcagccttttactgtgaattctctgaaaaagttagctgctatgcctgaccatacagatgtttccctaagcccagaagagcgagtccgtgccctaagcaagcttggttgtaatatcaccatcagtgaagacatcactccacgacgttactttaggtctggagtagagatggagaggatggcgtctgtgtatttggaagaaggaaatttggaaaatgcctttgttctttataataaatttataaccttatttgtagaaaagcttcctaaccatcgagattaccagcaatgtgcagtacctgaaaagcaggatattatgaagaaactgaaggagattgcattcccaaggacagatgaattgaaaaacgaccttttaaagaaatataacgtagaataccaagaatatttgcaaagcaaaaacaaatataaagctgaaattctcaaaaaattggagcatcagagattgatagaggcagaaaggaagcggattgctcagatgcgccagcagcagctagaatcggagcagtttctgtttttcgaagatcaactcaagaagcaagagttagcccgaggtcaaatgcgaagtcagcaaacctcagggctgtcagagcagattgatgggagcgctttgtcctgcttttccacacaccagaacaattccttgctgaatgtatttgcagatcaacctaataaaagtgatgcaaccaattatgctagccactctcctcctgtaaacagggccttaacgccagctgctactctaagtgctgttcagaatttagtggttgaaggactgcgatgtgtagttttgccagaagatctttgccacaaatttctgcaactggcagaatctaatacagtgagaggaatagaaacctgtggaatactctgtggaaaactgacacataatgaatttactattacccatgtaattgtgccaaagcagtctgcgggaccagactattgtgacatggagaatgtagaggaattattcaatgttcaggatcaacatgatctcctcactctaggatggatccatacacatcccactcaaactgcatttttatccagcgttgatcttcacactcactgttcctatcaactcatgttgccagaggccattgccattgtttgctcaccaaagcataaagacactggcatcttcaggctcaccaatgctggcatgcttgaggtttctgcttgtaaaaaaaagggctttcatccacacaccaaggagcccaggctgttcagtatatgcaaacatgtgttggtaaaagacataaaaataattgtgttggatctgaggtgatatgttctgaatgtaagcaccgtcaacatcagacacctactcatggacatgtggttgccggattttcttaagatgtttccagaaatgactgatattttatatttatacattttagatgacaaagcttgatatttattgctgttgcacattttaaagttttctttttgggttgctctgtgtcaagagaggttacatggtgttaaatcggtacctgataatgtacccaaatactatggccagataataaattgtgctgcaaacaa

SEQ ID NO: 30042 - DNA, 2532 bp, Homo sapiens
  source 1..2532: mol_type = unassigned DNA
taacatccaggagatattctaatacttcttattttccaagtacacacaaattgggggtagggggaagggctaagatgcttaatagtgggcgtagccagttgtggataaatatcaaaaagggaatcctaacatgaagtataagtgggattttcaccaaaaccctatccttccccagactccagtgacagtttaacggtcagctgcatcaaggcttgtgtactgtgcagtcttaaaaggcaccactcctgtccatctcggtgaaattgatggtggagcaaaagggagtttaggtggttccggtctggggagaagacgtgcagggtttcagatgcgaaagtcgcacccaaccgcttcactcgggctctaggccatccgcaggggccctgcttccttccacctgcgagctttttctgcagaatgcgggaagccgccgccgccgccacagaggagggggcggaggcagaggcggaggcggcacccaggggccggggcaggggaggccgggaccatcgcagtgacaatttattttcctgcagcagcggcagcagggacggttgctgcaggttcggggtcggccggcctgcgcgtgggcttgcgaggacgctgttcgtcccctgcgctggggtgtccgacagcgaggaggagaacgacgcacggagcccgcgcgactggaaccagcaaagctccatctgtcggcagaggagaagggggaggaggcacggccgaggcaaacgagcggacgcctcgtcgccgggtgccggtatcaccccgctgcaacgccttccagcaaaagccaccgcggcccgggttgcagcagccggacggatgccaaggccacacggcagccacgggggcagccgtcgcagtcgccgtcccacacgggctgcggacaccaagggttgctaatgaagtgattgagaagaaacagtgaacatcctcatttcacagataagacaacatggatcagccttttactgtgaattctctgaaaaagttagctgctatgcctgaccatacagatgtttccctaagcccagaagagcgagtccgtgccctaagcaagcttggttgtaatatcaccatcagtgaagacatcactccacgacgttactttaggtctggagtagagatggagaggatggcgtctgtgtatttggaagaaggaaatttggaaaatgcctttgttctttataataaatttataaccttatttgtagaaaagcttcctaaccatcgagattaccagcaatgtgcagtacctgaaaagcaggatattatgaagaaactgaaggagattgcattcccaaggacagatgaattgaaaaacgaccttttaaagaaatataacgtagaataccaagaatatttgcaaagcaaaaacaaatataaagctgaaattctcaaaaaattggagcatcagagattgatagaggcagaaaggaagcggattgctcagatgcgccagcagcagctagaatcggagcagtttctgtttttcgaagatcaactcaagaagcaagagttagcccgaggtcaaatgcgaagtcagcaaacctcagggctgtcagagcagattgatgggagcgctttgtcctgcttttccacacaccagaacaattccttgctgaatgtatttgcagatcaacctaataaaagtgatgcaaccaattatgctagccactctcctcctgtaaacagggccttaacgccagctgctactctaagtgctgttcagaatttagtggttgaaggactgcgatgtgtagttttgccagaagatctttgccacaaatttctgcaactggcagaatctaatacagtgagaggaatagaaacctgtggaatactctgtggaaaactgacacataatgaatttactattacccatgtaattgtgccaaagcagtctgcgggaccagactattgtgacatggagaatgtagaggaattattcaatgttcaggatcaacatgatctcctcactctaggatggatccatacacatcccactcaaactgcatttttatccagcgttgatcttcacactcactgttcctatcaactcatgttgccagaggccattgccattgtttgctcaccaaagcataaagacactggcatcttcaggctcaccaatgctggcatgcttgaggtttctgcttgtaaaaaaaagggctttcatccacacaccaaggagcccaggctgttcagtatatgcaaacatgtgttggtaaaagacataaaaataattgtgttggatctgaggtgatatgttctgaatgtaagcaccgtcaacatcagacacctactcatggacatgtggttgccggattttcttaagatgtttccagaaatgactgatattttatatttatacattttagatgacaaagcttgatatttattgctgttgcacattttaaagttttctttttgggttgctctgtgtcaagagaggttacatggtgttaaatcggtacctgataatgtacccaaatactatggccagataataaattgtgctgcaaacaa

SEQ ID NO: 30043 - DNA, 4184 bp, Homo sapiens
  source 1..4184: mol_type = unassigned DNA
taacatccaggagatattctaatacttcttattttccaagtacacacaaattgggggtagggggaagggctaagatgcttaatagtgggcgtagccagttgtggataaatatcaaaaagggaatcctaacatgaagtataagtgggattttcaccaaaaccctatccttccccagactccagtgacagtttaacggtcagctgcatcaaggcttgtgtactgtgcagtcttaaaaggcaccactcctgtccatctcggtgaaattgatggtggagcaaaagggagtttaggtggttccggtctggggagaagacgtgcagggtttcagatgcgaaagtcgcacccaaccgcttcactcgggctctaggccatccgcaggggccctgcttccttccacctgcgagctttttctgcagaatgcgggaagccgccgccgccgccacagaggagggggcggaggcagaggcggaggcggcacccaggggccggggcaggggaggccgggaccatcgcagtgacaatttattttcctgcagcagcggcagcagggacggttgctgcaggttcggggtcggccggcctgcgcgtgggcttgcgaggacgctgttcgtcccctgcgctggggtgtccgacagcgaggaggagaacgacgcacggagcccgcgcgactggaaccagcaaagctccatctgtcggcagaggagaagggggaggaggcacggccgaggcaaacgagcggacgcctcgtcgccgggtgccggtatcaccccgctgcaacgccttccagcaaaagccaccgcggcccgggttgcagcagccggacggatgccaaggccacacggcagccacgggggcagccgtcgcagtcgccgtcccacacgggctgcggacaccaagggttgctaatgaagtgattgagaagaaacagtgaacatcctcatttcacagataagacaacatggatcagccttttactgtgaattctctgaaaaagttagctgctatgcctgaccatacagatgtttccctaagcccagaagagcgagtccgtgccctaagcaagcttggttgtaatatcaccatcagtgaagacatcactccacgacgttactttaggtctggagtagagatggagaggatggcgtctgtgtatttggaagaaggaaatttggaaaatgcctttgttctttataataaatttataaccttatttgtagaaaagcttcctaaccatcgagattaccagcaatgtgcagtacctgaaaagcaggatattatgaagaaactgaaggagattgcattcccaaggacagatgaattgaaaaacgaccttttaaagaaatataacgtagaataccaagaatatttgcaaagcaaaaacaaatataaagctgaaattctcaaaaaattggagcatcagagattgatagaggcagaaaggaagcggattgctcagatgcgccagcagcagctagaatcggagcagtttctgtttttcgaagatcaactcaagaagcaagagttagcccgaggtcaaatgcgaagtcagcaaacctcagggctgtcagagcagattgatgggagcgctttgtcctgcttttccacacaccagaacaattccttgctgaatgtatttgcagatcaacctaataaaagtgatgcaaccaattatgctagccactctcctcctgtaaacagggccttaacgccagctgctactctaagtgctgttcagaatttagtggttgaaggactgcgatgtgtagttttgccagaagatctttgccacaaatttctgcaactggcagaatctaatacagtgagaggaatagaaacctgtggaatactctgtggaaaactgacacataatgaatttactattacccatgtaattgtgccaaagcagtctgcgggaccagactattgtgacatggagaatgtagaggaattattcaatgttcaggatcaacatgatctcctcactctaggatggatccatacacatcccactcaaactgcatttttatccagcgttgatcttcacactcactgttcctatcaactcatgttgccagaggccattgccattgtttgctcaccaaagcataaagacactggcatcttcaggctcaccaatgctggcatgcttgaggtttctgcttgtaaaaaaaagggctttcatccacacaccaaggagcccaggctgttcagtattcagaaattcctttctgggataatttctggcactgctttggagatggagcccctgaaaattggctatggaccaaatggattcccactcttggggatctctaggtcatcatcaccatctgaacagctctgagagagacaagaagtggaatggagaaggtgattaggtaatccaagaattgccaggcgaacaattgtgaaaatctttcatagagttcccgatgaaaacaactctttcttgttagccattatctctgcctttcctttctaaagaaaaacacgtcatttcatcttgattatcagtttctcaagtactcatggatgtgaggccaggtaccctgtcaccttggctctgtttgggatgcaatgttgtgtttgtcaccacttcccattccccaaaagcatctttaacatagaccattcattcttcagattcaaaatgcttaagctgaactaacctcaaagggccctcattaatttacagacatttgaataacacccatattcatttctgctactgaaccaaagccttttccaaaaaaatcatctagcaaactgtttttgccaggccaaatattaacaggtatatatatttgcatacataaatatttacctctatgtcttgtgtgtttttgttatgagacagagtctcactctgtcgcccaggctggagtgcagtggcacagtctcagctcactgcaacctccacctcccaggttcaagcgattctcatgcctcagcctcccgagtagcgaggactacaggcgtgcaccaccacgcccagctaatttttgtatttttagtagagatggggttttaccctgttggccagggtggtctcgaattcctgacctctgatgatctacccgcctggacctctcaaagtgctgggattacagacatgagccactgtgccctgcctctgttttgtgtatttacataaatacatgtctccagagctttaaattcttcttaaattttaaaactagaactaaaccagacattgagaggacccagaaatataccctgactaacgtgggtggaatttcatttggcttgactctttggtgaaaaaaaaaaaaatcaggctctcaaggactcaatttggtgaaccaatgccaaatagaaaaatgttcttgacattttccccaaaatagatgtctaaagattttgcacttcaaattggtactttatgtattaaaagtgatattgaaactaaattcctacccaattagttgaaaaatatgaaaaaagcaattgctagagaatgcaatttattaaatgttggtggtcttttaaaaaatgaattcctcttgtagccagtgagatcagttatttatttatttattttaatagtaacaaggtctcactatattgtccaggctgatcttgaactcctggcctcaagctgtcctcccatctcagcttcccaaagtgctgagattataggcatgagccaccatgcctggctagttaatggttattaagtaatacaaacatttctgtgaattccaccagatcattgactttggcatagttcacttaagactttgtttgataaaataaatctctttcactctaattaggaagcatttttgggatcctgattaatgctctaatattgtggggccaaaaaatatgtggaacgtggccctgcagttagatgagctgagatcactatagtactatatagcgctctaaatcctaaatgctagatcactgtaatactgtacagatcagccacttgctggcttgtgactctgggccatttacttcacctctcaaaaggcatatttaaagtgaggaaaataataagtttattttggaaattcagttagatgatgcaaattgtttactgtaatttctagcatgtagttcgtgctccatgcatttaactgttattacaggttgtattagtatcacattaaattacccactgaagtgaaagtgaaaccagaatgctgtcaacgatt

SEQ ID NO: 30044 - DNA, 3312 bp, Homo sapiens
  source 1..3312: mol_type = unassigned DNA
agccgggccccgcccgccgcagcgcggggctcctgcgtcccgagtgcgcggcggccggaccgggcgggcggagccgggcccgcggggctgctgcggggcgatcgggccgggccgctgccgcgccatggactcccgtgtccagcctgagttccagcctcactgagtggccacccccaaagtgctgccagccgaggaagcccccagcactgaccatgtctattatggaccacagccccaccacgggcgtggtcacagtcatcgtcatcctcattgccatcgcggccctgggggccttgatcctgggctgctggtgctacctgcggctgcagcgcatcagccagtcagaggacgaggagagcatcgtgggggatggggagaccaaggaacccttcctgctggtgcagtattcggccaagggaccgtgcgtggagagaaaggccaagctgatgactcccaacggcccggaagtccacggctgagccaggatgcaaggctcctggtcctgtttgcagccggccaagaggcgctgggaggggcaaaaccatacggatgcgctgctgtctgagaggaagggctgacacttgctggcatggcctctgcgggcttcgtcatcgcatgcactgatgcccggggacctggctgtcctgggcttcccctcggcctccaggtgaggctgcccattgcaggcactgggcaggcctgaccttgctggggctcatggccctgtagcgcttttgttacttgaatgtctagctgagcctgtttttgatggagctactactgtaatgcgtgaactaacaaacctgtgaactgtaaataggcccctggaagcacgtgcttaagcccttttgctgatttttaaaaatatcatctagcgcacacgggactggtattctggctgtactaatgacaagctgagtcaagaccctggagggtcataggcttgtaaaggcccacgccacactcggcaggggtctctcatgtgtgtccatctgcgtgtatgtcaaggaagtgagatgccaatttggggtcttgaggctgaccagttggggtgcttgggtgatctctgcttcattagtcatgggtggaagaaaaaccacaccccccgcacccctccgttctttctgcatagactcacttgttaaatagcagttctgttgagagtggagttactgcagggaagctaccggacctgcctgggagccagtgaagggcgagtcagggcacgcgtcctggaggctgccagcgtccttgtagcagagcagtttcttgccgcttgggtcttcagcacgccaagccccccaccaaccctccaccccgagtgaaggcttcgctgaaattgctttggtcctcatagagcctgtggtggctacttttggtctgaaacccacttggcccaggaaagagaaaaggttgtatgttttgtgttggtgtttcctattttctgcactggaggggaggggactgttgaggttctgtcttttttcttcttttcctcttccctcttcacatcacttggcttcctttcctctctgatgaccgtccgcctatggggttctgacttcactttcctcagcgggtctccagtcccctgacccagctctaaaggcacttaggacccagggaacatttctcacgtgcacattcccctaagagccaccagactgcttcctgccagcctgtgcttgcggcagggagccggggcagggcagaggtgaacttgaagttcaggacttgactctcccacaggtggtgagctggtggctctctggtgagctagtgtctccacagcctgtctccaaggcctcccctatgtacatttcagtgagctcactttgatttttaatcccaccacaagcacatactaattttatttatgattcaaatgtgactcgtgcctgcccatccctgtaatagatggaaggtcagccccggcttaaccacagagcactggcccttcatggctgagctcagagctctggcctcctgctcagactaaaggcacctcctctggcctcacccaagcctcttctaaaaaccatgttgaatgaatccacgttctggaaccccgaggcgggagaagtagggagctgttcgtttaagcagcatacacctaaattgggggtttaaacattaagtaggagcttggggtggaagagggacagccggctgggccacctgagcagaaggtggtaatgaaacacctcagctgggctcttgggagaccttaggaagcaggagaggcaacacctctggctactgatggtgtggcaagttcagaagaggtggtggtggggtaggcgtgatgtcagcagaagccctgcaggctgggtgggcaggacacgtggtgggggccactgaaaccaggcctaggagggagaacaagttccaaaggtgccgactggaagaagggggtaaaagtttgctttggtgagtgagaaaaggctggggcgtgtgatccatcccctcacgtttcagaacttccaggctttctacctcgactctcaccacagccagcacatacacctaggctgtttttccttcctccacacctgagggacgcagcaacagctaggatctgcattttcaggttccgagcctgacccctggaactgaccagcgctcgattgtcagccttggcctggggttttgaccttgccagtgaagtttcggttttgaagtgattaaatgtcacttcctcatcagtttcacttctggaggttttcttatcctactccctggtgccagggacgtacctgggagtttgaatcaggcccatttgagcgtggcagccgtgttgggtgaaggtccggggctcggtgaggcactgggggggttttcgggaggaaaatgaaaatgcttctagaatgagtgaaccacatcatagctctcactgttttttcaatagctactttttttagcagacaccagagccacactcaaatggctaagtaggttatgacctctctggattatttttgaatgcccaactgttgcattcaagttttctgactaataagaaattaagcattcatccttcgtatcactgcagaagcaacagtgggggcacagggagggaactcttgacactgagccactaaaatatggactaattttttggacaaatcttcaaacggactgtgctactgtatttgtctcaaagctaccaagtttgtgcaataagtggaagggatgtcatccttcttcaataaatgctgaatgacattcaagctgattttctagaccactgagaaaatctttatttacaataaatttcaataaaatttgcataaatatattcccaatgtacaa

SEQ ID NO: 30045 - DNA, 3883 bp, Homo sapiens
  source 1..3883: mol_type = unassigned DNA
cagtttgcaaaagccagaggtgcaagaagcagcgactgcagcagcagcagcagcagcggcggtggcagcagcagcagcagcggcggcagcagcagcagcagcggaggcaccggtggcagcagcagcatcaccagcaacaacaacaaaaaaaaatcctcatcaaatcctcacctaagctttcagtgtatccagatccacatcttcactcaagccaggagagggaaagaggaaaggggggcaggaaaaaaaaaaaacccaacaacttagcggaaacttctcagagaatgctccaaaactcagcagtgcttctggtgctggtgatcagtgcttctgcaacccatgaggcggagcagaatgactctgtgagccccaggaaatcccgagtggcggctcaaaactcagctgaagtggttcgttgcctcaacagtgctctacaggtcggctgcggggcttttgcatgcctggaaaactccacctgtgacacagatgggatgtatgacatctgtaaatccttcttgtacagcgctgctaaatttgacactcagggaaaagcattcgtcaaagagagcttaaaatgcatcgccaacggggtcacctccaaggtcttcctcgccattcggaggtgctccactttccaaaggatgattgctgaggtgcaggaagagtgctacagcaagctgaatgtgtgcagcatcgccaagcggaaccctgaagccatcactgaggtcgtccagctgcccaatcacttctccaacagatactataacagacttgtccgaagcctgctggaatgtgatgaagacacagtcagcacaatcagagacagcctgatggagaaaattgggcctaacatggccagcctcttccacatcctgcagacagaccactgtgcccaaacacacccacgagctgacttcaacaggagacgcaccaatgagccgcagaagctgaaagtcctcctcaggaacctccgaggtgaggaggactctccctcccacatcaaacgcacatcccatgagagtgcataaccagggagaggttattcacaacctcaccaaactagtatcattttaggggtgttgacacaccagttttgagtgtactgtgcctggtttgatttttttaaagtagttcctattttctatcccccttaaagaaaattgcatgaaactaggcttctgtaatcaatatcccaacattctgcaatggcagcattcccaccaacaaaatccatgtgaccattctgcctctcctcaggagaaagtaccctcttttaccaacttcctctgccatgtttttcccctgctcccctgagaccacccccaaacacaaaacattcatgtaactctccagccattgtaatttgaagatgtggatccctttagaacggttgccccagtagagttagctgataaggaaactttatttaaatgcatgtcttaaatgctcataaagatgttaaatggaattcgtgttatgaatctgtgctggccatggacgaatatgaatgtcacatttgaattcttgatctctaatgagctagtgtcttatggtcttgatcctccaatgtctaattttctttccgacacatttaccaaattgcttgagcctggctgtccaaccagactttgagcctgcatcttcttgcatctaatgaaaaacaaaaagctaacatctttacgtactgtaactgctcagagctttaaaagtatctttaacaattgtcttaaaaccagagaatcttaaggtctaactgtggaatataaatagctgaaaactaatgtactgtacataaattccagaggactctgcttaaacaaagcagtatataataactttattgcatatagatttagttttgtaacttagctttatttttcttttcctgggaatggaataactatctcacttccagatatccacataaatgctccttgtggccttttttataactaagggggtagaagtagttttaattcaacatcaaaacttaagatgggcctgtatgagacaggaaaaaccaacaggtttatctgaaggaccccaggtaagatgttaatctcccagcccacctcaacccagaggctactcttgacttagacctatactgaaagatctctgtcacatccaactggaaattccaggaaccaaaaagagcatccctatgggcttggaccacttacagtgtgataaggcctactatacattaggaagtggcagttctttactcgtcccctttcatcggtgcctggtactctggcaaatgatgatggggtgggagactttccattaaatcaatcaggaatgagtcaatcagcctttaggtctttagtccgggggacttggggctgagagagtataaataaccctgggctgtccagccttaatagacttctcttacattttcgtcctgtagcacgctgcctgccaaagtagtcctggcagctggaccatctctgtaggatcgtaaaaaaatagaaaaaaagaaaaaaaaaagaaagaaagagggaaaaagagctggtggtttgatcatttctgccatgatgtttacaagatggcgaccaccaaagtcaaacgactaacctatctatgaacaacagtagtttctcagggtcactgtccttgaacccaacagtcccttatgagcgtcactgcccaccaaaggtcaatgtcaagagaggaagagagggaggaggggtaggactgcaggggccactccaaactcgcttaggtagaaactattggtgcttgactctcactaggctaaactcaagatttgaccaaatcgagtgatagggatcctggtgggaggagagagggcacatctccagaaaaatgaaaagcaatacaactttaccataaagcctttaaaaccagtaacgtgctgctcaaggaccaagagcaattgcagcagacccagcagcagcagcagcagcacaaacattgctgcctttgtccccacacagcctctaagcgtgctgacatcagattgttaagggcatttttatactcagaactgtcccatccccaggtccccaaacttatggacactgccttagcctcttggaaatcaggtagaccatattctaagttagactcttcccctccctcccacacttcccacccccaggcaaggctgacttctctgaatcagaaaagctattaaagtttgtgtgttgtgtccattttgcaaacccaactaagccaggaccccaatgcgacaagtagttcatgagtattcctagcaaatttctctctttcttcagttcagtagatttccttttttcttttctttttttttttttttttttttggctgtgacctcttcaaaccgtggtacccccccttttctccccacgatgatatctatatatgtatctacaatacatatatctacacatacagaaagaagcagttctcacaatgttgctagttttttgcttctctttcccccaccctactccctccaattcccccttaaacttccaaagcttcgtcttgtgtttgctgcagagtgattcgggggctgacctagaccagtttgcatgattcttctcttgtgatttggttgcactttagacatttttgtgccattatatttgcattatgtatttataatttaaatgatatttaggtttttggctgagtactggaataaacagtgagcatatctggtatatgtcattatttattgttaaattacatttttaagctccatgtgcatataaaggttatgaaacatatcatggtaatgacagatgcaagttattttatttgcttatttttataattaaagatgccatagcataatatgaagcctttggtgaattccttctaagataaaaataataataaagtgttacgttttattggtttcccccca

SEQ ID NO: 30046 - DNA, 1748 bp, Homo sapiens
  source 1..1748: mol_type = unassigned DNA
aataaatgtgcttcatgcctgatggcaataaactgccagtgtaatccaatagccttaggcagtggagctcctttgtttaataaattgcatgcaactaaacgaagaagctggacgctctgctgagggtatttcattgcataagcctagcctgattgcctgaaatctggcacgtaccctcttggagggggaggggtgagaggggaggaaaggcttgaatgttggcatgcttcaaagcgctctctatactttccagaagctgatctaagctgaagtggttcgttgcctcaacagtgctctacaggtcggctgcggggcttttgcatgcctggaaaactccacctgtgacacagatgggatgtatgacatctgtaaatccttcttgtacagcgctgctaaatttgacactcagggaaaagcattcgtcaaagagagcttaaaatgcatcgccaacggggtcacctccaaggtcttcctcgccattcggaggtgctccactttccaaaggatgattgctgaggtgcaggaagagtgctacagcaagctgaatgtgtgcagcatcgccaagcggaaccctgaagccatcactgaggtcgtccagctgcccaatcacttctccaacagatactataacagacttgtccgaagcctgctggaatgtgatgaagacacagtcagcacaatcagagacagcctgatggagaaaattgggcctaacatggccagcctcttccacatcctgcagacagaccactgtgcccaaacacacccacgagctgacttcaacaggagacgcaccaatgagccgcagaagctgaaagtcctcctcaggaacctccgaggtgaggaggactctccctcccacatcaaacgcacatcccatgagagtgcataaccagggagaggttattcacaacctcaccaaactagtatcattttaggggtgttgacacaccagttttgagtgtactgtgcctggtttgatttttttaaagtagttcctattttctatcccccttaaagaaaattgcatgaaactaggcttctgtaatcaatatcccaacattctgcaatggcagcattcccaccaacaaaatccatgtgaccattctgcctctcctcaggagaaagtaccctcttttaccaacttcctctgccatgtttttcccctgctcccctgagaccacccccaaacacaaaacattcatgtaactctccagccattgtaatttgaagatgtggatccctttagaacggttgccccagtagagttagctgataaggaaactttatttaaatgcatgtcttaaatgctcataaagatgttaaatggaattcgtgttatgaatctgtgctggccatggacgaatatgaatgtcacatttgaattcttgatctctaatgagctagtgtcttatggtcttgatcctccaatgtctaattttctttccgacacatttaccaaattgcttgagcctggctgtccaaccagactttgagcctgcatcttcttgcatctaatgaaaaacaaaaagctaacatctttacgtactgtaactgctcagagctttaaaagtatctttaacaattgtcttaaaaccagagaatcttaaggtctaactgtggaatataaatagctgaaaactaatgtactgtacataaattccagaggactctgcttaaacaaagcagtatataataactttattgcatatagatttagttttgtaacttagctttatttttctttt

SEQ ID NO: 30047 - DNA, 1734 bp, Homo sapiens
  source 1..1734: mol_type = unassigned DNA
agtttgcaaaagccagaggtgcaagaagcagcgactgcagcagcagcagcagcagcggcggtggcagcagcagcagcagcggcggcagcagcagcagcagcggaggcaccggtggcagcagcagcatcaccagcaacaacaacaaaaaaaaatcctcatcaaatcctcacctaagctttcagtgtatccagatccacatcttcactcaagccaggagagggaaagaggaaagggcggctcaaaactcagctgaagtggttcgttgcctcaacagtgctctacaggtcggctgcggggcttttgcatgcctggaaaactccacctgtgacacagatgggatgtatgacatctgtaaatccttcttgtacagcgctgctaaatttgacactcagggaaaagcattcgtcaaagagagcttaaaatgcatcgccaacggggtcacctccaaggtcttcctcgccattcggaggtgctccactttccaaaggatgattgctgaggtgcaggaagagtgctacagcaagctgaatgtgtgcagcatcgccaagcggaaccctgaagccatcactgaggtcgtccagctgcccaatcacttctccaacagatactataacagacttgtccgaagcctgctggaatgtgatgaagacacagtcagcacaatcagagacagcctgatggagaaaattgggcctaacatggccagcctcttccacatcctgcagacagaccactgtgcccaaacacacccacgagctgacttcaacaggagacgcaccaatgagccgcagaagctgaaagtcctcctcaggaacctccgaggtgaggaggactctccctcccacatcaaacgcacatcccatgagagtgcataaccagggagaggttattcacaacctcaccaaactagtatcattttaggggtgttgacacaccagttttgagtgtactgtgcctggtttgatttttttaaagtagttcctattttctatcccccttaaagaaaattgcatgaaactaggcttctgtaatcaatatcccaacattctgcaatggcagcattcccaccaacaaaatccatgtgaccattctgcctctcctcaggagaaagtaccctcttttaccaacttcctctgccatgtttttcccctgctcccctgagaccacccccaaacacaaaacattcatgtaactctccagccattgtaatttgaagatgtggatccctttagaacggttgccccagtagagttagctgataaggaaactttatttaaatgcatgtcttaaatgctcataaagatgttaaatggaattcgtgttatgaatctgtgctggccatggacgaatatgaatgtcacatttgaattcttgatctctaatgagctagtgtcttatggtcttgatcctccaatgtctaattttctttccgacacatttaccaaattgcttgagcctggctgtccaaccagactttgagcctgcatcttcttgcatctaatgaaaaacaaaaagctaacatctttacgtactgtaactgctcagagctttaaaagtatctttaacaattgtcttaaaaccagagaatcttaaggtctaactgtggaatataaatagctgaaaactaatgtactgtacataaattccagaggactctgcttaaacaaagcagtatataataactttattgcatatagatttagttttgtaacttagctttatttttcttttcct

SEQ ID NO: 30048 - DNA, 3476 bp, Homo sapiens
  source 1..3476: mol_type = unassigned DNA
ggcggagatcgcgtctctttcgctccgtgtcccgctgctgctcctgtgagcgcccggcgagtccgtcccgtccaccgtccgcagctggtagccagcctgcccctcgcctcgactccctttcaccaacaccgacacccacattgacacctccagtccggccagccgctccactcgttgcctttgcatctccacacatggcgtcctccgcgcagagcggcggctcctccgggggacccgcggtccccaccgtgcagcggggcatcatcaagatggtcctctcagggtgcgccatcattgtccgaggtcagcctcgtggtgggcctcctcctgagcggcagatcaacctcagcaacattcgtgctggaaatcttgctcgccgggcagccgccacacaacctgatgcaaaggatacccctgatgagccctgggcatttccagctcgagagttccttcgaaagaagctgattgggaaggaagtctgtttcacgatagaaaacaagactccccaggggcgagagtatggcatgatctaccttggaaaagataccaatggggaaaacattgcagaatcactggttgcagagggcttagccacccggagagaaggcatgagagctaataatcctgagcagaaccggctttcagaatgtgaagaacaagcaaaggcagccaagaaagggatgtggagtgaggggaacggttcacatactatccgggatctcaagtataccattgaaaacccaaggcactttgtggactcacaccaccagaagcctgttaatgctatcatcgagcatgtgcgggacggcagtgtggtcagggccctgctcctcccagattactacctggttacagtcatgctgtcaggcatcaagtgcccaacttttcgacgggaagcagatggcagtgaaactccagagccttttgctgcagaagccaaatttttcactgagtcgcgactgcttcagagagatgttcagatcattctggagagctgccacaaccagaacattctgggtaccatccttcatccaaatggcaacatcacagagctcctcctgaaggaaggtttcgcacgctgtgtggactggtcgattgcagtttacacccggggcgcagaaaagctgagggcggcagagaggtttgccaaagagcgcaggctgagaatatggagagactatgtggctcccacagctaatttggaccaaaaggacaagcagtttgttgccaaggtgatgcaggttctgaatgctgatgccattgttgtgaagctgaactcaggcgattacaagacgattcacctgtccagcatccgaccaccgaggctggagggggagaacacccaggataagaacaagaaactgcgtcccctgtatgacattccttacatgtttgaggcccgggaatttcttcgaaaaaagcttattgggaagaaggtcaatgtgacggtggactacattagaccagccagcccagccacagagacagtgcctgccttttcagagcgtacctgtgccactgtcaccattggaggaataaacattgctgaggctcttgtcagcaaaggtctagccacagtgatcagataccggcaggatgatgaccagagatcatcacactacgatgaactgcttgctgcagaggccagagctattaagaatggcaaaggattgcatagcaagaaggaagtgcctatccaccgtgttgcagatatatctggggatacccaaaaagcaaagcagttcctgccttttcttcagcgggcaggtcgttctgaagctgtggtggaatacgtcttcagtggttctcgtctcaaactctatttgccaaaggaaacttgccttatcaccttcttgcttgcaggcattgaatgccccagaggagcccgaaacctcccaggcttggtgcaggaaggagagcccttcagcgaggaagctacacttttcaccaaggaactggtgctgcagcgagaggtggaggtggaggtggagagcatggacaaggccggcaactttatcggctggctgcacatcgacggtgccaacctgtccgtcctgctggtggagcacgcgctctccaaggtccacttcaccgccgaacgcagctcctactacaagtccctgctgtctgccgaggaggccgcaaagcagaagaaagagaaggtctgggcccactatgaggagcagcccgtggaggaggtgatgccagtgctggaggagaaggagcgatctgctagctacaagcccgtgtttgtgactgagatcactgatgacctgcacttctacgtgcaggatgtggagaccggcacccagttggagaagctgatggagaacatgcgcaatgacattgccagtcacccccctgtagagggctcctatgccccccgcaggggagagttctgcattgccaaatttgtagatggagaatggtaccgtgcccgagtagagaaagtcgagtctcctgccaaaatacatgtcttctacattgactacggcaacagagaggtcctgccatccacccgcctgggtaccctatcacctgccttcagcactcgggtgctgccagctcaagccacggagtatgccttcgccttcatccaggtgccccaagatgatgatgcccgcacggacgccgtggacagcgtagttcgggatatccagaacactcagtgcctgctcaacgtggaacacctgagtgccggctgcccccatgtcaccctgcagtttgcagattccaagggcgatgtggggctgggcttggtgaaggaagggctggtcatggtggaggtgcgcaaggagaaacagttccagaaagtgatcacagaatacctgaatgcccaagagtcagccaagagcgccaggctgaacctgtggcgctatggagactttcgagctgatgatgcagacgaatttggctacagccgctaaggaggggatcgggtttggcccccagccccgctcacgccagtccctcttcctctgccgggagggtgttttcaactccaaaccccagagaggggttgtagattgggtccagctttgcttcagtgtgtggaaatgtctcgtggggtggcatcggggctgcggggtggggaccccaaggctttctggggcagacccttgtcctctgggatgatgggcactgctatccacagtctctgccagttggttttatttggaggtttgtgggctttttttaaaaaaaaaaagtcctcaaatcaggaagaaacatcaaagactatgtcctagtggagggagtaatcctaacacccaggctggccgccagctggcacctgcctctatcccagactgccctcgtcccagctctctgtccaactgttgattatgtgatttttctgatacgtccattctcaaatgccagtgtgttcacatcttcgctctggccagcccattctgtatttaaagcttttgaggcccaataaaatagtacgtgctgtctgcagcccttattgatca

SEQ ID NO: 30049 - DNA, 3429 bp, Homo sapiens
  source 1..3429: mol_type = unassigned DNA
tctctttcgctccgtgtcccgctgctgctcctgtgagcgcccggcgagtccgtcccgtccaccgtccgcagctggtagccagcctgcccctcgcctcgactccctttcaccaacaccgacacccacattgacacctccagtccggccagccgctccactcgttgcctttgcatctccacacatggcgtcctccgcggtccccaccgtgcagcggggcatcatcaagatggtcctctcagggtgcgccatcattgtccgaggtcagcctcgtggtgggcctcctcctgagcggcagatcaacctcagcaacattcgtgctggaaatcttgctcgccgggcagccgccacacaacctgatgcaaaggatacccctgatgagccctgggcatttccagctcgagagttccttcgaaagaagctgattgggaaggaagtctgtttcacgatagaaaacaagactccccaggggcgagagtatggcatgatctaccttggaaaagataccaatggggaaaacattgcagaatcactggttgcagagggcttagccacccggagagaaggcatgagagctaataatcctgagcagaaccggctttcagaatgtgaagaacaagcaaaggcagccaagaaagggatgtggagtgaggggaacggttcacatactatccgggatctcaagtataccattgaaaacccaaggcactttgtggactcacaccaccagaagcctgttaatgctatcatcgagcatgtgcgggacggcagtgtggtcagggccctgctcctcccagattactacctggttacagtcatgctgtcaggcatcaagtgcccaacttttcgacgggaagcagatggcagtgaaactccagagccttttgctgcagaagccaaatttttcactgagtcgcgactgcttcagagagatgttcagatcattctggagagctgccacaaccagaacattctgggtaccatccttcatccaaatggcaacatcacagagctcctcctgaaggaaggtttcgcacgctgtgtggactggtcgattgcagtttacacccggggcgcagaaaagctgagggcggcagagaggtttgccaaagagcgcaggctgagaatatggagagactatgtggctcccacagctaatttggaccaaaaggacaagcagtttgttgccaaggtgatgcaggttctgaatgctgatgccattgttgtgaagctgaactcaggcgattacaagacgattcacctgtccagcatccgaccaccgaggctggagggggagaacacccaggataagaacaagaaactgcgtcccctgtatgacattccttacatgtttgaggcccgggaatttcttcgaaaaaagcttattgggaagaaggtcaatgtgacggtggactacattagaccagccagcccagccacagagacagtgcctgccttttcagagcgtacctgtgccactgtcaccattggaggaataaacattgctgaggctcttgtcagcaaaggtctagccacagtgatcagataccggcaggatgatgaccagagatcatcacactacgatgaactgcttgctgcagaggccagagctattaagaatggcaaaggattgcatagcaagaaggaagtgcctatccaccgtgttgcagatatatctggggatacccaaaaagcaaagcagttcctgccttttcttcagcgggcaggtcgttctgaagctgtggtggaatacgtcttcagtggttctcgtctcaaactctatttgccaaaggaaacttgccttatcaccttcttgcttgcaggcattgaatgccccagaggagcccgaaacctcccaggcttggtgcaggaaggagagcccttcagcgaggaagctacacttttcaccaaggaactggtgctgcagcgagaggtggaggtggaggtggagagcatggacaaggccggcaactttatcggctggctgcacatcgacggtgccaacctgtccgtcctgctggtggagcacgcgctctccaaggtccacttcaccgccgaacgcagctcctactacaagtccctgctgtctgccgaggaggccgcaaagcagaagaaagagaaggtctgggcccactatgaggagcagcccgtggaggaggtgatgccagtgctggaggagaaggagcgatctgctagctacaagcccgtgtttgtgactgagatcactgatgacctgcacttctacgtgcaggatgtggagaccggcacccagttggagaagctgatggagaacatgcgcaatgacattgccagtcacccccctgtagagggctcctatgccccccgcaggggagagttctgcattgccaaatttgtagatggagaatggtaccgtgcccgagtagagaaagtcgagtctcctgccaaaatacatgtcttctacattgactacggcaacagagaggtcctgccatccacccgcctgggtaccctatcacctgccttcagcactcgggtgctgccagctcaagccacggagtatgccttcgccttcatccaggtgccccaagatgatgatgcccgcacggacgccgtggacagcgtagttcgggatatccagaacactcagtgcctgctcaacgtggaacacctgagtgccggctgcccccatgtcaccctgcagtttgcagattccaagggcgatgtggggctgggcttggtgaaggaagggctggtcatggtggaggtgcgcaaggagaaacagttccagaaagtgatcacagaatacctgaatgcccaagagtcagccaagagcgccaggctgaacctgtggcgctatggagactttcgagctgatgatgcagacgaatttggctacagccgctaaggaggggatcgggtttggcccccagccccgctcacgccagtccctcttcctctgccgggagggtgttttcaactccaaaccccagagaggggttgtagattgggtccagctttgcttcagtgtgtggaaatgtctcgtggggtggcatcggggctgcggggtggggaccccaaggctttctggggcagacccttgtcctctgggatgatgggcactgctatccacagtctctgccagttggttttatttggaggtttgtgggctttttttaaaaaaaaaaagtcctcaaatcaggaagaaacatcaaagactatgtcctagtggagggagtaatcctaacacccaggctggccgccagctggcacctgcctctatcccagactgccctcgtcccagctctctgtccaactgttgattatgtgatttttctgatacgtccattctcaaatgccagtgtgttcacatcttcgctctggccagcccattctgtatttaaagcttttgaggcccaataaaatagtacgtgctgtctgcagcccttattg

SEQ ID NO: 30050 - DNA, 1728 bp, Homo sapiens
  source 1..1728: mol_type = unassigned DNA
gtgtgcgtcgacgtcagcgtgctgacgtcacgggccggaggtcccggggctgctgggtgcgggcggtgggctgcgcgttgtccgctggactgggtcccggtcacgccccgccaagccccgcccctcaggccggggcgcgaccgcggatccgcagttcccgggccagcctggggcggccggccaggaaccacccgttaaggtgtcttctctttagggatggtgaggttggaaaaaggctcctgtaaccctcctccaggatgaaccacctgccagaagacatggagaacgctctcaccgggagccagagctcccatgcttctctgcgcaatatccattccatcaaccccacacaactcatggccaggattgagtcctatgaaggaagggaaaagaaaggcatatctgatgtcaggaggactttctgtttgtttgtcacctttgacctcttattcgtaacattactgtggataatagagttaaatgtgaatggaggcattgagaacacattagagaaggaggtgatgcagtatgactactattcttcatattttgatatatttcttctggcagtttttcgatttaaagtgttaatacttgcatatgctgtgtgcagactgcgccattggtgggcaatagcgttgacaacggcagtgaccagtgcctttttactagcaaaagtgatcctttcgaagcttttctctcaaggggcttttggctatgtgctgcccatcatttcattcatccttgcctggattgagacgtggttcctggatttcaaagtgttacctcaagaagcagaagaagaaaacagactcctgatagttcaggatgcttcagagagggcagcacttatacctggtggtctttctgatggtcagttttattcccctcctgaatccgaagcaggatctgaagaagctgaagaaaaacaggacagtgagaaaccacttttagaactatgagtactacttttgttaaatgtgaaaaaccctcacagaaagtcatcgaggcaaaaagaggcaggcagtggagtctccctgtcgacagtaaagttgaaatggtgacgtccactgctggctttattgaacagctaataaagatttatttattgtaatacctcacagacgttgtaccatatccatgcacatttagttgcctgcctgtggctggtaaggtaatgtcatgattcatcctctcttcagtgagactgagcctgatgtgttaacaaataggtgaagaaagtcttgtgctgtattcctaatcaaaagacttaatatattgaagtaacacttttttagtaagcaagatacctttttatttcaattcacagaatggaatttttttgtttcatgtctcagatttattttgtatttcttttttaacactctacatttcccttgttttttaactcatgcacatgtgctctttgtacagttttaaaaagtgtaataaaatctgacatgtcaatgtggctagttttatttttcttgttttgcattatgtgtatggcctgaagtgttggacttgcaaaaggggaagaaaggaattgcgaatacatgtaaaatgtcaccagacatttgtattatttttatcatgaaatcatgtttttctctgattgttctgaaatgttctaaatactcttattttgaatgcacaaaatgacttaaaccattcatatcatgtttcctttgcgttcagccaatttcaattaaaatgaactaaattata

SEQ ID NO: 30051 - DNA, 1365 bp, Homo sapiens
  source 1..1365: mol_type = unassigned DNA
ccggggcgcgaccgcggatccgcagttcccgggccagcctggggcggccggccaggaaccacccgttaagatggaatcactgaattcatcacttgacacagtactagtttggataagtttagcaaggtgtcttctctttagggatggtgaggttggaaaaaggctcctgtaaccctcctccaggatgaaccacctgccagaagacatggagaacgctctcaccgggagccagagctcccatgcttctctgcgcaatatccattccatcaaccccacacaactcatggccaggattgagtcctatgaaggaagggaaaagaaaggcatatctgatgtcaggaggactttctgtttgtttgtcacctttgacctcttattcgtaacattactgtggataatagagttaaatgtgaatggaggcattgagaacacattagagaaggaggtgatgcagtatgactactattcttcatattttgatatatttcttctggcagtttttcgatttaaagtgttaatacttgcatatgctgtgtgcagactgcgccattggtgggcaatagcgttgacaacggcagtgaccagtgcctttttactagcaaaagtgatcctttcgaagcttttctctcaaggggcttttggctatgtgctgcccatcatttcattcatccttgcctggattgagacgtggttcctggatttcaaagtgttacctcaagaagcagaagaagaaaacagactcctgatagttcaggatgcttcagagagggcagcacttatacctggtggtctttctgatggtcagttttattcccctcctgaatccgaagcaggatctgaagaagctgaagaaaaacaggacagtgagaaaccacttttagaactatgagtactacttttgttaaatgtgaaaaaccctcacagaaagtcatcgaggcaaaaagaggcaggcagtggagtctccctgtcgacagtaaagttgaaatggtgacgtccactgctggctttattgaacagctaataaagatttatttattgtaatacctcacagacgttgtaccatatccatgcacatttagttgcctgcctgtggctggtaaggtaatgtcatgattcatcctctcttcagtgagactgagcctgatgtgttaacaaataggtgaagaaagtcttgtgctgtattcctaatcaaaagacttaatatattgaagtaacacttttttagtaagcaagatacctttttatttcaattcacagaatggaatttttttgtttcatgtctcagatttattttgtatttcttttttaacactctacatttcccttgttttttaactcatgcacatgtgctctttgtacagtttt

SEQ ID NO: 30052 - DNA, 857 bp, Homo sapiens
  source 1..857: mol_type = unassigned DNA
cggccggccaggaaccacccgttaagatggatccatgtaggccccaccgtttttgcctgtaaaaagagtcagaaagatcaggctggcaaagtcaattgcctccaggctaggtgaagattgaggccaactggagagtgcgtgccccactgaaagtggtcagcagcttggctttattatcatggtgtcttctctttagggatggtgaggttggaaaaaggctcctgtaaccctcctccaggatgaaccacctgccagaagacatggagaacgctctcaccgggagccagagctcccatgcttctctgcgcaatatccattccatcaaccccacacaactcatggccaggattgagtcctatgaaggaagggaaaagaaaggcatatctgatgtcaggaggactttctgtttgtttgtcacctttgacctcttattcgtaacattactgtggataatagagttaaatgtgaatggaggcattgagaacacattagagaaggaggtgatgcagtatgactactattcttcatattttgatatatttcttctggcagtttttcgatttaaagtgttaatacttgcatatgctgtgtgcagactgcgccattggtgggcaatagcgttgacaacggcagtgaccagtgcctttttactagcaaaagtgatcctttcgaagcttttctctcaaggggcttttggctatgtgctgcccatcatttcattcatccttgcctggattgagacgtggttcctggatttcaaagtgttacctcaagaagcagaagaagaaaacagactcctgatagttcaggatgcttcagagagggcagcacttatacctggtggtctttctgatggt

SEQ ID NO: 30053 - DNA, 784 bp, Homo sapiens
  source 1..784: mol_type = unassigned DNA
ttcccgggccagcctggggcggccggccaggaaccacccgttaagaattaactcctagaattctgacaggcggtagtgctttgcaagctttgtgttaagagctgctactggggaatatgttgttgctgtaccttccactagggtggcattgatctcattaagacagaaattatgtgtcttctctttagggatggtgaggttggaaaaaggctcctgtaaccctcctccaggatgaaccacctgccagaagacatggagaacgctctcaccgggagccagagctcccatgcttctctgcgcaatatccattccatcaaccccacacaactcatggccaggattgagtcctatgaaggaagggaaaagaaaggcatatctgatgtcaggaggactttctgtttgtttgtcacctttgacctcttattcgtaacattactgtggataatagagttaaatgtgaatggaggcattgagaacacattagagaaggaggtgatgcagtatgactactattcttcatattttgatatatttcttctggcagtttttcgatttaaagtgttaatacttgcatatgctgtgtgcagactgcgccattggtgggcaatagcgttgacaacggcagtgaccagtgcctttttactagcaaaagtgatcctttcgaagcttttctctcaaggggcttttggctatgtgctgcccatcatttcattcatccttgcctggattgagacgtggttcctggatttcaaagtgttacctcaagaagcagaagaagaaaaca

SEQ ID NO: 30054 - DNA, 859 bp, Homo sapiens
  source 1..859: mol_type = unassigned DNA
tggggcggccggccaggaaccacccgttaagggtcttactctgttgcccaggctggagtgcagtggcaccatctcagctcactggagcgtctgcctccaggttcaagtgattctcctgcctcagcatcccaagtagctgggactacaggtgtgcactaccactcctgtctaatgtttgtattttttggtagagacagggtttccctatgttggccagtctggtcttgaactgctggcctcaagtgatctgcccgcctcggcctcctaaagtgctgggattacaggtgtcttctctttagggatggtgaggttggaaaaaggctcctgtaaccctcctccaggatgaaccacctgccagaagacatggagaacgctctcaccgggagccagagctcccatgcttctctgcgcaatatccattccatcaaccccacacaactcatggccaggattgagtcctatgaaggaagggaaaagaaaggcatatctgatgtcaggaggactttctgtttgtttgtcacctttgacctcttattcgtaacattactgtggataatagagttaaatgtgaatggaggcattgagaacacattagagaaggaggtgatgcagtatgactactattcttcatattttgatatatttcttctggcagtttttcgatttaaagtgttaatacttgcatatgctgtgtgcagactgcgccattggtgggcaatagcgttgacaacggcagtgaccagtgcctttttactagcaaaagtgatcctttcgaagcttttctctcaaggggcttttggctatgtgctgcccatcatttcattcatccttgcctggattgagacgtggttcctggatt

SEQ ID NO: 30055 - DNA, 1664 bp, Homo sapiens
  source 1..1664: mol_type = unassigned DNA
tcacgggccggaggtcccggggctgctgggtgcgggcggtgggctgcgcgttgtccgctggactgggtcccggtcacgccccgccaagccccgcccctcaggccggggcgcgaccgcggatccgcagttcccgggccagcctggggcggccggccaggaaccacccgttaaggtgtcttctctttagggatggtgaggttggaaaaaggctcctgtaaccctcctccaggatgaaccacctgccagaagacatggagaacgctctcaccgggagccagagctcccatgcttctctgcgcaatatccattccatcaaccccacacaactcatggccaggattgagtcctatgaaggaagggaaaagaaaggcatatctgatgtcaggaggactttctgtttgtttgtcacctttgacctcttattcgtaacattactgtggataatagagttaaatgtgaatggaggcattgagaacacattagagaaggaggtgatgcagtatgactactattcttcatattttgatatatttcttctggcagtttttcgatttaaagtgttaatacttgcatatgctgtgtgcagactgcgccattggtgggcaatagcgttgacaacggcagtgaccagtgcctttttactagcaaaagtgatcctttcgaagcttttctctcaaggggcttttggctatgtgctgcccatcatttcattcatccttgcctggattgagacgtggttcctggatttcaaagtgttacctcaagaagcagaagaagaaaacagactcctgatagttcaggatgcttcagagagggcagcacttatacctggtggtctttctgatggtcagttttattcccctcctgaatccgaagcaggatctgaagaagctgaagaaaaacaggacagtgagaaaccacttttagaactatgagtactacttttgttaaatgtgaaaaaccctcacagaaagtcatcgaggcaaaaagaggcaggcagtggagtctccctgtcgacagtaaagttgaaatggtgacgtccactgctggctttattgaacagctaataaagatttatttattgtaatacctcacagacgttgtaccatatccatgcacatttagttgcctgcctgtggctggtaaggtaatgtcatgattcatcctctcttcagtgagactgagcctgatgtgttaacaaataggtgaagaaagtcttgtgctgtattcctaatcaaaagacttaatatattgaagtaacacttttttagtaagcaagatacctttttatttcaattcacagaatggaatttttttgtttcatgtctcagatttattttgtatttcttttttaacactctacatttcccttgttttttaactcatgcacatgtgctctttgtacagttttaaaaagtgtaataaaatctgacatgtcaatgtggctagttttatttttcttgttttgcattatgtgtatggcctgaagtgttggacttgcaaaaggggaagaaaggaattgcgaatacatgtaaaatgtcaccagacatttgtattatttttatcatgaaatcatgtttttctctgattgttctgaaatgttctaaatactcttattttgaatgcacaaaatgacttaaaccattcatatcatgtttcctttg

SEQ ID NO: 30056 - DNA, 2132 bp, Homo sapiens
  source 1..2132: mol_type = unassigned DNA
ggcggggccgcaggcgaacgcaagtcccgcttcgctctcgggggcggactcagcggcggaagtggcgctgccggaagatcttcttccgctctgaggcgctactgaggccgcggagccggactgcggttggggcgggaagagccggggccgtggctgacatggagcagccctgctgctgaggccgcgccctccccgccctgaggtgggggcccaccaggatgagcaagctgcccagggagctgacccgagacttggagcgcagcctgcctgccgtggcctccctgggctcctcactgtcccacagccagagcctctcctcgcacctccttccgccgcctgagaagcgaagggccatctctgatgtccgccgcaccttctgtctcttcgtcaccttcgacctgctcttcatctccctgctctggatcatcgaactgaataccaacacaggcatccgtaagaacttggagcaggagatcatccagtacaactttaaaacttccttcttcgacatctttgtcctggccttcttccgcttctctggactgctcctaggctatgccgtgctgcggctccggcactggtgggtgattgcggtcacgacgctggtgtccagtgcattcctcattgtcaaggtcatcctctctgagctgctcagcaaaggggcatttggctacctgctccccatcgtctcttttgtcctcgcctggttggagacctggttccttgacttcaaagtcctaccccaggaagctgaagaggagcgatggtatcttgccgcccaggttgctgttgcccgtggacccctgctgttctccggtgctctgtccgagggacagttctattcacccccagaatcctttgcagggtctgacaatgaatcagatgaagaagttgctgggaagaaaagtttctctgctcaggagcgggagtacatccgccaggggaaggaggccacggcagtggtggaccagatcttggcccaggaagagaactggaagtttgagaagaataatgaatatggggacaccgtgtacaccattgaagttccctttcacggcaagacgtttatcctgaagaccttcctgccctgtcctgcggagctcgtgtaccaggaggtgatcctgcagcccgagaggatggtgctgtggaacaagacagtgactgcctgccagatcctgcagcgagtggaagacaacaccctcatctcctatgacgtgtctgcaggggctgcgggcggcgtggtctccccaagggacttcgtgaatgtccggcgcattgagcggcgcagggaccgatacttgtcatcagggatcgccacctcacacagtgccaagcccccgacgcacaaatatgtccggggagagaatggccctgggggcttcatcgtgctcaagtcggccagtaacccccgtgtttgcacctttgtctggattcttaatacagatctcaagggccgcctgccccggtacctcatccaccagagcctcgcggccaccatgtttgaatttgcctttcacctgcgacagcgcatcagcgagctgggggcccgggcgtgactgtgccccctcccaccctgcgggccagggtcctgtcgccaccacttccagagccagaaagggtgccagttgggctcgcactgcccacatgggacctggccccaggctgtcaccctccaccgagccacgcagtgcctggagttgactgactgagcaggctgtggggtggagcactggactccggggccccactggctggaggaagtggggtctggcctgttgatgtttacatggcgccctgcctcctggaggaccagattgctctgccccaccttgccagggcagggtctgggctgggcacctgacttggctggggaggaccagggccctgggcagggcagggcagcctgtcacccgtgtgaagatgaaggggctcttcatctgcctgcgctctcgtcggtttttttaggattattgaaagagtctgggacccttgttggggagtgggtggcaggtgggggtgggctgctggccatgaatctctgcctctcccaggctgtccccctcctcccagggcctcctgggggacctttgtattaagccaattaaaaacatgaatttaaaaaaaaaaaaaaa

SEQ ID NO: 30057 - DNA, 1925 bp, Homo sapiens
  source 1..1925: mol_type = unassigned DNA
gaggccgcggagccggactgcggttggggcgggaagagccggggccgtggctgacatggagcagccctgctgctgaggccgcgccctccccgccctgaggtgggggcccaccaggatgagcaagctgcccagggagctgacccgagacttggagcgcagcctgcctgccgtggcctccctgggctcctcactgtcccacagccagagcctctcctcgcacctccttccgccgcctgagaagcgaagggccatctctgatgtccgccgcaccttctgtctcttcgtcaccttcgacctgctcttcatctccctgctctggatcatcgaactgaataccaacacaggcatccgtaagaacttggagcaggagatcatccagtacaactttaaaacttccttcttcgacatctttgtcctggccttcttccgcttctctggactgctcctaggctatgccgtgctgcggctccggcactggtgggtgattgcgctgctcagcaaaggggcatttggctacctgctccccatcgtctcttttgtcctcgcctggttggagacctggttccttgacttcaaagtcctaccccaggaagctgaagaggagcgatggtatcttgccgcccaggttgctgttgcccgtggacccctgctgttctccggtgctctgtccgagggacagttctattcacccccagaatcctttgcagggtctgacaatgaatcagatgaagaagttgctgggaagaaaagtttctctgctcaggagcgggagtacatccgccaggggaaggaggccacggcagtggtggaccagatcttggcccaggaagagaactggaagtttgagaagaataatgaatatggggacaccgtgtacaccattgaagttccctttcacggcaagacgtttatcctgaagaccttcctgccctgtcctgcggagctcgtgtaccaggaggtgatcctgcagcccgagaggatggtgctgtggaacaagacagtgactgcctgccagatcctgcagcgagtggaagacaacaccctcatctcctatgacgtgtctgcaggggctgcgggcggcgtggtctccccaagggacttcgtgaatgtccggcgcattgagcggcgcagggaccgatacttgtcatcagggatcgccacctcacacagtgccaagcccccgacgcacaaatatgtccggggagagaatggccctgggggcttcatcgtgctcaagtcggccagtaacccccgtgtttgcacctttgtctggattcttaatacagatctcaagggccgcctgccccggtacctcatccaccagagcctcgcggccaccatgtttgaatttgcctttcacctgcgacagcgcatcagcgagctgggggcccgggcgtgactgtgccccctcccaccctgcgggccagggtcctgtcgccaccacttccagagccagaaagggtgccagttgggctcgcactgcccacatgggacctggccccaggctgtcaccctccaccgagccacgcagtgcctggagttgactgactgagcaggctgtggggtggagcactggactccggggccccactggctggaggaagtggggtctggcctgttgatgtttacatggcgccctgcctcctggaggaccagattgctctgccccaccttgccagggcagggtctgggctgggcacctgacttggctggggaggaccagggccctgggcagggcagggcagcctgtcacccgtgtgaagatgaaggggctcttcatctgcctgcgctctcgtcggtttttttaggattattgaaagagtctgggacccttgttggggagtgggtggcaggtgggggtgggctgctggccatgaatctctgcctctcccaggctgtccccctcctcccagggcctcctgggg

SEQ ID NO: 30058 - DNA, 673 bp, Homo sapiens
  source 1..673: mol_type = unassigned DNA
caggaccagaggctggagctcagggctaggcctgccctgctgctgaggccgcgccctccccgccctgaggtgggggcccaccaggatgagcaagctgcccagggagctgacccgagacttggagcgcagcctgcctgccgtggcctccctgggctcctcactgtcccacagccagagcctctcctcgcacctccttccgccgcctgagaagcgaagggccatctctgatgtccgccgcaccttctgtctcttcgtcaccttcgacctgctcttcatctccctgctctggatcatcgaactgaataccaacacaggcatccgtaagaacttggagcaggagatcatccagtacaactttaaaacttccttcttcgacatctttgtcctggccttcttccgcttctctggactgctcctaggctatgccgtgctgcggctccggcactggtgggtgattgcggtcacgacgctggtgtccagtgcattcctcattgtcaaggtcatcctctctgagctgctcagcaaaggggcatttggctacctgctccccatcgtctcttttgtcctcgcctggttggagacctggttccttgacttcaaagtcctaccccaggaagctgaagaggagcgatggtatcttgccgcccaggttgctgttgcccgtggacccctg

SEQ ID NO: 30059 - DNA, 2834 bp, Homo sapiens
  source 1..2834: mol_type = unassigned DNA
gaacgcaagtcccgcttcgctctcgggggcggactcagcggcggaagtggcgctgccggaagatcttcttccgctctgaggcgctactgaggccgcggagccggactgcggttggggcgggaagagccggggccgtggctgacatggagcagccctgctgctgaggccgcgccctccccgccctgaggtgggggcccaccaggatgagcaagctgcccagggagctgacccgagacttggagcgcagcctgcctgccgtggcctccctgggctcctcactgtcccacagccagagcctctcctcgcacctccttccgccgcctgagaagcgaagggccatctctgatgtccgccgcaccttctgtctcttcgtcaccttcgacctgctcttcatctccctgctctggatcatcgaactgaataccaacacaggcatccgtaagaacttggagcaggagatcatccagtacaactttaaaacttccttcttcgacatctttgtcctggccttcttccgcttctctggactgctcctaggctatgccgtgctgcggctccggcactggtcacgacgctggtgtccagtgcattcctcattgtcaaggtcatcctctctgagctgctcagcaaaggggcatttggctacctgctccccatcgtctcttttgtcctcgcctggttggagacctggttccttgacttcaaagtcctaccccaggaagctgaagaggagcgattctgctcctccagggtatcttgccgcccaggttgctgttgcccgtggacccctgctgttctccggtgctctgtccgagggacagttctattcacccccagaatcctttgcagggtctgacaatgaatcagatgaagaagttgctgggaagaaaagtttctctgctcaggagcgggagtacatccgccaggggaaggaggccacggcagtggtggaccagatcttggcccaggaagagaactggaagtttgagaagaataatgaatatggggacaccgtgtacaccattgaagttccctttcacggcaagacgtttatcctgaagaccttcctgccctgtcctgcggagctcgtgtaccaggaggtgatcctgcagcccgagaggatggtgctgtggaacaagacagtgactgcctgccagatcctgcagcgagtggaagacaacaccctcatctcctatgacgtgtctgcaggggctgcgggcggcgtggtctccccaagggacttcgtgaatgtccggcgcattgagcggcgcagggaccgatacttgtcatcagggatcgccacctcacacagtgccaagcccccgacgcacaaatatgtccggggagagaatggccctgggggcttcatcgtgctcaagtcggccagtaacccccgtgtttgcacctttgtctggattcttaatacagatctcaagggccgcctgccccggtacctcatccaccagagcctcgcggccaccatgtttgaatttgcctttcacctgcgacagcgcatcagcgagctgggggcccgggcgtgactgtgccccctcccaccctgcgggccagggtcctgtcgccaccacttccagagccagaaagggtgccagttgggctcgcactgcccacatgggacctggccccaggctgtcaccctccaccgagccacgcagtgcctggagttgactgactgagcaggctgtggggtggagcactggactccggggccccactggctggaggaagtggggtctggcctgttgatgtttacatggcgccctgcctcctggaggaccagattgctctgccccaccttgccagggcagggtctgggctgggcacctgacttggctggggaggaccagggccctgggcagggcagggcagcctgtcacccgtgtgaagatgaaggggctcttcatctgcctgcgctctcgtcggtttttttaggattattgaaagagtctgggacccttgttggggagtgggtggcaggtgggggtgggctgctggccatgaatctctgcctctcccaggctgtccccctcctcccagggcctcctgggggacctttgtattaagccaattaaaaacatgaatttaaaaaaaaaaaaaaattccagcccctcccactgccttgcctcttgagggaagagaaaggcaggcagcagcttggatgaagagggaagacccctcacacagcctctcctgggctcacaggagggcggagcccggggagccagttcctgaaacatgccccccattccccccccgcccaccccccactccccgctttcctgaccagttcaactgagcagatgactggtcagaaaaaaatgccccgccccctgccaggcttcagcggggcaagtttaaagtctctagtccaggaatggaggtgggggtatgggcacctggcagtgcccacagcaagccttgactgtgtggcctggagatggggcctgagcttcagggtcactgaggcacctctgggatccaggccacctggagccccggacctcccagactccactcacccattccctctccccgcacggcactcacaccaggggcggcctggagcccggatcgcagggcggggccaggccactgcctgccttcctcctccctcccggctggcctgcccccttgcctgcctgcatgcaggcttccagcagagccagcttcttcagagccaggtggatcctgtttcggtcctgcctaggtgtgtgaccctgggcgaatctacctctctcagcttctgcttcccactttatgaaaatgggactgatgtcacagggttgttatgagattaaaagatatgaagaaccggg

SEQ ID NO: 30060 - DNA, 4606 bp, Homo sapiens
  source 1..4606: mol_type = unassigned DNA
acaagttggctgctgtcgcctgcgcatcggcgggccgggaggctgagcagtactgttgagagcggtgtgaggtgcttggtagcgcgccgtagctgcttccacgtccttgcttcacctcaggtaaagagagaagtaatggaaggcctgtctgatgttgcttcttttgcaactaaacttaaaaacactctcatccagtaccatagcattgaagaagataagtggcgagttgctaagaaaacgaaagatgtaactgtttggagaaaaccctcagaagaatttaatggatatctctacaaagcccaaggtgttatagatgaccttgtctatagtataatagaccatatacgcccagggccttgtcgtttggattgggacagcttgatgacttctttggatattctggagaactttgaagagaattgctgtgtgatgcgttacactactgctggtcagctttggaatataatttccccaagagaatttgttgatttctcctatactgtgggctataaagaagggcttttatcttgtggaataagtcttgactgggatgaaaagagaccagaatttgttcgaggatataaccatccctgtggttggttttgtgttccacttaaagacaacccaaaccagagtcttttgacaggatatattcagacagatctgcgtgggatgattcctcagtctgcggtagatacagccatggcaagcactttaaccaacttctatggtgatttacgaaaagctttatgagaggcaaaatacattcaaacttgtagtactacagatcaactctctcagctacatggcctgtaaaaatcattgattccacttttctgcatagccggtagaaaaatttgaaatgtttttggttcactagtacaatgtttggttttattcctaaagtaaatagctatctaagagagggcattttcacttttttttttttaaattttgagacaggctctcactctgttgcccatgctggagggcagtggtatgatcacagctcactgcagctttgatctgaccgctcaaggggttattctacctcagcctcctgaatagctgggaatacaggtgcacgccactatgcatggctaatttttgtttaattttttgtagagatgtggtcacactgtgttgcccaggctggtcttgaactcctggcctcaagtcattccccaccttagcctcccaaagtgttgggattataagcgtgagccaccatgcctggccccaatttaaaatgtggaattcagttggtgtccaagacttatcttgagactcttaaaagcatcagtctgtaactagaacaaatacagtcttagatttacccaagtgcctagatatcattttataatgattagaattgagtattgtgggtcccctaattctgtgggtgccttaagtgagaatttctaaatgattttcacattctaaatgactttgggttttgaactctccatctagtttacttctaaaatgggaacttgaggcaattcaggtatccaggcaaatctttgtatatatttttttgtgtacatgcacacatctcgaaatccatttccgtgtttaatgttagttgtttatgtgttagtattcctgtgtctactgttttgttgttgttaatatgggtaaagtgagccctgaaatacatgctaaacaagacatgaaatgcagaaaggtacatagtgtttcaagtgcatggtagtttgatctgtgttttactttattgtgttttcttgagtgtaaagaaagaataaatcaaagttcttcatacccattttgacaaagtggaacagtggagctgttttttgcttttgtttttatttattttttgccactggtgatgatagatttcaaaaaacaaaaggtggcagcagcacaatgttcatggtgaattatctcatagtatctagattgatcaagatctgacagaaggaatgcacaaaggattctatattcttaatgatttattaattaccaggatccttttctaaattgaatgtacttttgaattactaggtttcttctttttttttgttctgcaatagtgaaagaaaactcagtagtttagtttcagtttctcatggaaattggtaaatgttagttttgacttcatctattttttatttgtttttattagcgtagagtaggaagtctcatattctactgttctatctaggatggtgaaattccaaaggtgcctaacttgagtaagggatttgtgacaagatagtacacattactataagggctattatttcctgaactggatgtccctaaaagcaaataaactgcccactatctctactctagtgctctctttgtccttatcaacatatacctccaataagtaattacataattcaccgttaaacatggacccactctaggtaaaattaccctcatggaaacattttcactgtgagaatgatgaatttaaaaattatgtttgaatcacctaaaatgtatgtgcagcttctagatggccccttagatctgctgggctctagctgtgtactttaaaaaaacaaaaacagctttattgatatataatttacatattatgtaatttacccacttttaagtatctaattcagtgatgttttaatacatatgtagaactatgcagccatcagcacaatctggatttagaacgtttccatcattccaaaagattccttttgtcttttttgcagactcatacctaacacaaatctaaagtttatcactgttgccaggataattacagcaggttatgtttggtttcatttttaagagtggaggtgttcatgattctaagctcaggaatcttgtgatcatgtattaaatatgttatctcatactataatgataaaaaagcttaatgatgtgggttgggatggatattaacataaataattgagtccgctgcttctatagcaatgctgtaggatagaacaataatgtaagtgatatatgtaattaaaaaattctagaagccacattaaaaaataaaaataaacagctgaagttaattttaatattttatttaactcaatacatccaaaatgttatcattttaacatgtaattgatgtaaagatttattctgatagtttgtactatttcttgtactaattttttgaaatctggtatgcattttacaaatttgggcaagccacattttaagtgctcattagccacatgaggccagtggatactgtattgaatagcacagtcctatagcatatttattaatttgtcttgtagtaagatgaaatagacaataatacggaataatatcttaaatggaaatctttgttagtctctagagccttcattgcttgataaataggacatctaaactttagatataaatcagttgtcaatgagataaaattattgccagcaaatattttccttcaaagataagtaacttttgatatggcagttggtgaaatgaaagaatataatctgccttcttgttaaatggttgactattctgtagcttgtaggtagtacgtattagaaacttgtgtatgtgggaaatatttggcataatactgttttcagtatatagtagctattttttaaggaaattagtttcatacaagaaaaagattattataaaagtgatacttttgcatgaaatattagtttgtgttgataactcttagttaacccttaaagtttaaaacagtactcaaaaaaaaataatgagaatctagtattctgtagttaactaatctataagataaattgctaaagtactagggagcttgtaaatcttaaaaatctttttatttcagtgttcattcaggttggatatatttgaaattgtagatttctatctgtacaacatctcctagttaatagaatttttttccttcccctcccttctctctcctcctccttttctaaccaaagggcattttatcaacaatcatgctgaattcaattaatatctcaagctaaaaaactatgtaattgaggttgtatctggagaagatgggaaaacattgtataatttaagcccttaattgtctgttgagcttttagggctgagtaattgcctttcatacaaataaaagctttaactcttttctcaagagtgtaccaccgtccttagaatcaggtgttttaaatccagtttcttttaattaaatgggactgtagtgatccctaccctgtagagaaatcaacagaactagagaagctaagggcttgatcaggtttcccctagaacctgtgttgcctgcctgctgtatcttccatgtctttcttattcaacttctagaagtagagaaggttgggacttgagtgtagaagaaacatcagaataatttcaaaaaacaggaagttggaactataatttttaaattattgtattgtttttacggattttacatgtatagttaaatattaaaattcatctcttgcagttcaataaaagctatagtatagattttatttttaagaagtttatataattcttttgtgaaccaatatgtaaaactagaatatttattaaactaataatatgtattagtatcaataaaatatgtatttatttttaaattggtatgaaacaaaataaaaatttgtagacactcttaaaa

SEQ ID NO: 30061 - DNA, 803 bp, Homo sapiens
  source 1..803: mol_type = unassigned DNA
cttgccctgaggcgctgggtgccttccagttggctgcgaccagcggtgacttacaagttggctgctgtcgcctgcgcatcggcgggccgggaggctgagcagtactgttgagagcggtgtgaggtgcttggtagcgcgccgtagctgcttccacgtccttgcttcacctcagagagaagtaatggaaggcctgtctgatgttgcttcttttgcaactaaacttaaaaacactctcatccagtaccatagcattgaagaagataagtggcgagttgctaagaaaacgaaagatgtaactgtttggagaaaaccctcagaagaatttaatggatatctctacaaagcccaaggtgttatagatgaccttgtctatagtataatagaccatatacgcccagggccttgtcgtttggattgggacagcttgatgacttctttggatattctggagaactttgaagagaattgctgtgtgatgcgttacactactgctggtcagctttggaatataatttccccaagagaatttgttgatttctcctatactgtgggctataaagaagggcttttatcttgtggaataagtcttgactgggatgaaaagagaccagaatttgttcgaggatataaccatccctgtggttggttttgtgttccacttaaagacaacccaaaccagagtcttttgacaggatatattcagacagatctgcgtgggatgattcctcagtctgcggtagatacagccatggcaagcactttaaccaacttctatggtgatttacgaaaagctttatgagagg

SEQ ID NO: 30062 - DNA, 4871 bp, Homo sapiens
  source 1..4871: mol_type = unassigned DNA
cgcagctaagcgcagctcccgacgcaatggacccggcgctggcagcccagatgagcgaggctgtggccgagaagatgctccagtaccggcgggacacagcaggctggaagatttgccgggaaggcaatggagtttcagtttcctggaggccatctgtggagtttccagggaacctgtaccgaggagaaggcattgtatatgggacactagaggaggtgtgggactgtgtgaagccagctgttggaggcctacgagtgaagtgggatgagaatgtgaccggttttgaaattatccaaagcatcactgacaccctgtgtgtaagcagaacctccactccctccgctgccatgaagctcatttctcccagagattttgtggacttggtgctagtcaagagatatgaggatgggaccatcagttccaacgccacccatgtggagcatccgttatgtcccccgaagccaggttttgtgagaggatttaaccatccttgtggttgcttctgtgaacctcttccaggggaacccaccaagaccaacctggtcacattcttccataccgacctcagcggttacctcccacagaacgtggtggactccttcttcccccgcagcatgacccggttttatgccaaccttcagaaagcagtgaagcaattccatgagtaatgctatcgttacttcttggcaaagaactcccgtgactcatcgaggagctccagctgttgggacaccaaggagcctgggagcacgcagaggcctgtgttcactctttggaacaagctgatggactgcgcatctctgagaatgccaaccagaggcggcagcccacccttcctgcctcctgccccactcagggttggcgtgtgatgagccattcatgtgttccaaactccatctgcctgttacccaaacacgcctctcctggcagggtagacccaggcctctaaccatctgacagagactcggcctggacaccatgcgatgcactctggcaccaaggctttatgtgcccatcactctcagagaccacgtttccctgactgtcatagagaatcatcatcgccactgaaaaccaggccctgttgccttttaagcatgtaccgctccctcagtcctgtgctgcagccccccaaatatatttttctgatatagaccttgtatatggctttaatgccgcaaaatatttatttttccttaaaaaaggtgtcaacttggaaataatggtttaaaaacaggataagcattaaggaaaaacactttcaatgtgtcttccatttgatgaatttgtttttctctctttatccccgcaaggtggagtttcatgtcctcggtgaaaccagacagtgtgaatctgttccagcccaaatctgcagcattagggatgagttctcagaagtgattctgaactgagcacgcactcatgtctgcatggggaactctggggagaagagccttccttttctttcccttgggcatttgcctttccttgtcgtcttactgaggcggaggcaggaggtctctgtcttccaggccctggccaggccatcctgccatcaggaaagatggaagagtaggcctccgtctagcagccctggctggaaatcccccctctagatcctgctgcaagactgtacaaactcacaggggccatgtccacccaggcacatcatcagaaccagggagcacagccttgccacctagaaggggcctcagcagccgtgcaactttctttccctatctccaatccagagagggatcctctaacattctctagcaacctcatctgcacccccaccaccttccttgtaagaaagaccacgtgtgactaaaatcccttcacgctgcatttacccaggttactattgtgcgcgcaaaatgttttcacagtgttctcagcctttgctcctccaaacagaaaacgtttcccctgcgttactgttacttccctatttttgagtcctggggtgactgtctcttaaatgtgccaagatgtgagcaagctttaaaacatgacagctcagtgttaaggagacagaaagcttcctctttctctgttctattgcaactacaaattctacagtcatgcctaagatcctttagctaacacccttttcaagaaatcatcagactcttggattgacttagaattcattcattcattaagtgcttaccgagtccccgctctgtggcaagcactgttctatatcaacttctcatgagttcagccaattctaggtgcaccagccaaggaaacttcatgcctgccctctctgagctccatactctgaggtggtggtcttatcaagatgggatcgccttgtacatccctgtgtagccaagtggaaggccagccaaccaagaatgcatctcactgggcctatgggacatactgtgcctgcactgctcctccacgtgactgcatcaggttaaactggtcagagccctggatgaggagctggaaaacatgcatccagtccaagctctgccacttgggccaagtgtgctcttgaacagtcacttaatatatctgctttgatttgtcttttaaagaaaatatggaggcaggaataccagtgtcagtgtagcctgcttcttgagtgttggcacaagtgagataatgtatgaatcagtaaaatgctgggcaaagcaaagaagtagggctgcctgggagtggattcctttttatggtgagttaagacgacttcacaattgttagctgtgatgcctgcagtgtttgaggatggcattgccttcatcctgtgtcagctctgaagaagttggcagagcaaagctaagcctcaagtgtaaatcccagcatcatggaacgcaaatggatgagcttttgttttaggatcttcttgctgattcctacccagaggacttccccagcctagagaccagaaacctgggcaatagttatatcttcagtggccctaggagttgttgtgtctccttggggaggagagaaccttctaaaacaggccagagacaggaggtactgggagggccatgggctcacctgcatctatgcccagataacctgggacagataacctctgtcccaatcacttgctttgcctggtctctcaaggagtctcttggtaccccaggcccacggccagctccatgctcatccctgtccccaccttccagtcttgatgaaaacccaccttctctttcatcccttggctgcttgataagacttaaaacaattccctgattttagggaaggccactgcgtgcacagatggtgagtttgtgcaggcaaggaatgtgccctccacatcacgtggcctccttgcccagcctgggtcatgggaagggagtgttgaattgaatcacgtctttcgttggtagattatgttcatcttcaatgtttctattaagtctaaaaagtggatacaaatggtgcctccaagttcttgtctaattgcttgtctactgcttgacaaaatccagaatggaataggccaaacaagttaaccagcaggacagaaactgctctaagcccattattccttgagatgaatagaacagtgagctgaacgcctgctctaatgaagccactaaaggggtttacaggaaggttaggagcccagatgggttttgagtccactgctgggaaacagattcttcacttcctgtggaccctggagaagccatcagattacattaacatggctccactgatgatggcctgagaattactattgtttgtgtttcatctgtgtccttgccaggtcttcccccacatccttacttcacaggatcaggggctgagaggagaccaatactctggcccaggcctggtcaagggatgctggttgttgctgatgcaaagtcacattgcctggtcctgagcttggcaatcaggcatccagagatggccaaaccaaatatccctttggccaggcactcaggcattccctgtaatgttgtgcacttaaagcatcttgggctgatagtctccaccgaatcacagaagaaaactcaatctgccgcatcactcaccagctggataagccatttactgtacacagtgtgtgccctcttatcaatacattggcacagaaccatacaccgtagaagctgctgtgatcactaaaggcaatgcccgtttagccctgagcacagtgcttggcatgtggtaggtaagtagtagcaattttatttgataccctcatatacacgctggttccttctgtcggcacacctgtccacgctttgagcttggtgcttcacctgtactcctctgtttactggctccaccacccttccctaggattacttctccaatccaaccaaaaacaattttgcaaatgtttcatgtgacaaactgtatttttcataaatgaccccagcaatatttcctctccccttaaacccaggcaggtttgtgtcagctctaactgatggagtatggtggaggtgatgccatgcaacttccaaggcaaaggtataaacaagatgcagcttctacatggctcttgcgatcctgggatgctcatcctgggaatccagacaccatgttgtgaggaggcccaggccacaaggagaggccacctataagcattcaggccagcagccccaggtgagttcccagccaacatcaacggccagatgtatgagtgaatgatctcacgtggtcccagcctttgcatgactttgcatgacgccagctgatgccaagtgggacagagatgagctgcccattccaatctctgcccacattgcagattcatgagaaaaataaatgtcactgtttgggggtgaatcatgacacagttacagtacttgaaacattttgcgaagccaggcatgaatgtcatatgaaattctaataaatccattttatttgtggcaccacaa

SEQ ID NO: 30063 - DNA, 761 bp, Homo sapiens
  source 1..761: mol_type = unassigned DNA
atggacttcaaggcaattgcccaacaaactgcccaagaagttttaggttataatcgagatacatcaggctggaaagtggttaaaacttcaaaaaagataactgtttccagtaaggcttctagaaaattccatggaaatctatatcgtgttgaagggataattccagaatcaccagctaaactatctgatttcctctaccaaactggagacagaattacatgggataaatcattgcaagtgtataatatggtacacaggattgattcggacacattcatatgtcataccattacacaaagttttgccgtgggctccatttcccctcgagactttatcgacttagtgtacatcaagcgctacgaaggaaatatgaacattatcagttctaaaagtgtggattttccagaatatcctccatcttcaaattatatccgcggttataaccatccttgtggctttgtatgttcaccaatggaagaaaacccagcatattccaaactagtgatgtttgtccagacagaaatgagaggaaaattgtccccatcaataattgaaaaaaccatgccttccaacttagtaaacttcatcctcaatgcaaaagatggaataaaggcacacagaactccatcaagacgtggatttcatcataatagtcattcatgataccaaaagaagaaatgaggccgttctgctataaaatcatgtgtagtagttattgctgtttacttctaagtcaacgcacataaataatactgttaaac

SEQ ID NO: 30064 - DNA, 4862 bp, Homo sapiens
  source 1..4862: mol_type = unassigned DNA
ggccttccaggaggcgggaggcgcccgctgtcgaggcagctgagccccggcaaccgctgctctccgcctctcccctcgcggggccggctcatggagcgcagggaccgggctggctctcgccgagccccgggcctcttttagcctcgtccccagagagggaggagccggtgcccggcacagccccgccggccctagaagctccccacgcgccaccatgcctctgctggacgttttctggtcttgcttcaggaaggtgaagtgcttcccattgctgcaggtgaagaagaacgctgaagccgaggccaaaagagcatgtgagtggcttcaagcaacaggattccctcagtatgtgcagctttttgaaggaggctgatgaccttgaataattgtgcctcgatgaaactggaggttcattttcaaagcaagcagaatgaagactcagaagaggaagagcagtgtaccatcagtagccactgggccttccagcaggaaagtaagtgctggtctcctatggggtcctctgatctgttggccccaccgagccctggcctgccagcgacctcaagctgtgagagcgtcctcaccgagcttagtgccacctctctgccagtcatcaccgtgagcctaccacccgagccagcagacttgcccttgccaggccgtgcccccagctcgagtgaccggcccctcctcagccccacccagggccaggagggtccccaggacaaagccaagaagcgccatcgtaaccgtagcttcctcaagcaccttgaatctctgaggcggaaggaaaagagtggcagccagcaagcagagcccaagcatagtccagccacctcagagaaggtctccaaagcctcatctttccgcagttgtcgtggcttcctctcagctggattttacagggccaagaactgggccgccacctcagccggtggcagtggtgccaatactcggaaggcctgggaggcctggcctgtggcctcgttccggcatcctcagtggacacaccggggtgattgcctggtgcacgttcctggggaccacaaaccaggcacattccctcgctccctgtccattgagagcctgtgtcctgaggatggacaccgcctggcagactggcagccaggtaggcggtggggctgtgaggggcgccggggctcctgtggctcaacgggcagccatgccagcacgtatgacaacttgcctgagctgtacccagctgagcctgtaatggttggggctgaggctgaagatgaagatgatgaggagagtgggggcagctatgctcacctagacgacatcctccagcacgtgtgggggctacagcaacgagtagagctgtggtctcgggccatgtacccagacctggggcctggagatgaggaagaggaggaggccacttcatcagtagaaatagccacagttgaggtcaaatgccaagctgaggctctcagccagatggaggttccggcccatggagagtccccagcctgggcccaggctgaagtccagccagcagtcctggctccggctcaggctccagctgaggctgaaccagtggcacaggaagaggctgaggccccggccccagccccggccccggccccagcccaggacagtgagcaggaggcacattcaggcggggaacccacctttgcctctagcctgtctgtggaagaaggacactccatttctgacactgtggcctcctccagcgaacttgacagtagtgggaactccatgaatgaggctgaggctgcggggcccctggctggactccaggcatcaatgccccgtgaacggcgcgattcaggtgttggggcctcacttaccagaccctgcaggaagctccgttggcatagcttccagaactcccatcgtcccagcctcaactcagagtcgctggagatcaaccggcagtttgcaggccagatcaacctcctgcacaagggctcactgctgcggcttaccgcgttcatggagaagtacactgtgccccacaagcagggctgggtctggtcaatgcccaagttcatgaggaggaacaagaccccagattaccggggacagcacgtatttggggtgccacccctcatccacgtgcagcgcacgggccagccactgccacagagcattcagcaagccatgcgctacttgcgcagccagtgcctggaccaagtaggcatcttccgcaagtctggggtcaagtccaggatccagaacctgcgtcaaatgaatgagacctcgcctgacaatgtctgctacgagggccagtcagcctacgacgtggctgacctgctaaagcagtatttccgggacctgcctgagcccatcttcaccagcaagctcaccaccactttcctccagatctaccagctcctccccaaggatcagtggttggcagcagcacaagccgccaccttgctgctccccgatgagaaccgagaggtgctacagaccctgctctacttcttaagtgacattgcctctgccgaggaaaaccagatgacagcaggcaacctggcagtgtgcctggcgccctccatcttccacctcaatgtctctaagaaggatagcccctctcccaggatcaagagcaaacgcagcctcattggcaggccaggccctagggacctgagtgacaacatggcagccacccagggcctgtcgcacatgatcagtgactgcaagaaacttttccaggtgccccaggacatggtgctgcagctgtgcagctcctacagcgcagctgagctcagccctcccggcccagccctggctgagctgcgtcaggcccaagctgcaggggtaagcctgagcctctacatggaagagaatatccaggacctgctgcgtgatgctgctgagcgcttcaagggctggatgagcgtgccagggccccagcacacggagctggcttgcaggaaggcaccggatgggcaccccctgcggctatggaaggcatccacagaggtggcagcccccccagctgtggtgctgcatcgtgttctccgggagcgggccctctgggatgaggatctgctgcgggcccaggtgctggaagccctgatgccgggtgtggagctgtaccactatgtcaccgacagcatggcaccccatccctgccgcgactttgtggtgcttcggatgtggcgctctgacctgcctcgtgggggttgcctgcttgtctcccagtccctggatccggaacaacctgtgccagagtcgggtgtgcgagccctcatgctcacatcccagtacctcatggagccttgcggcttgggccgctctcggctcacacacatctgccgggctgacctcaggggccgttctcctgactggtacaacaaagtctttggacacctgtgtgccatggaagtggcaaagatccgggactccttccccaccctgcaggcagcgggccctgagacaaagctgtgagccttgggctggtcccagggtggcaccacccaggccccctgggcaccaagggagcgagggggaataagagcagggcagccccctgggtgccgctgtcaggagcagagccaggcccaggtggctccagctgcctgtcctgtcccctttcctaaagctcctctgcacatagaggggagaaaaagagaatttaggcaactccactcccccttcacccccaaccctgtattctactctcccgaaaagagaagagaatcgcatgagtagcaagactgctgccaccagccacctgcttgtgaggccgccacttggcatgaagcctccacagctccccgcctgcaggggcaaagaggtcgacagcaatgtgtgatcccagctctctgccagactgagagggcaagccgtcttgtttgctgcaaggatgcttttgaggttggacaggaggttctggtcctgcctttggggccaacgctggctctgaagtgtctttttcagaggaattggactggagtgaatgggcacaggggtggagcgcagggcagccccagtcaccacgagctgtttcatttgtgtaaatacgatgctgaattttatgaggctgagttaagagtgggcactgacgggcccctaatatgtgacatgacgatttggcatagatagggatgtgagagtggagtaccttcctttctcaagtctcgagatgccagtgaaaccagtattccctgacttgggtttcacactttatcgaccaccccatggggtcctgtgtagcctttggccacgcactgacactgcccaggccaagcaaaagcagagtgtggttaagagacaagggtctatgtcatcatcccttttgcttatggtagtgggctaacataacagcccctttctcaagcagagacctggcccctgggccagccagatggaagggcctatcttagccagctggagcttaagccaaacctgttctgtcccactggccagccatctttgctcacatggaaattcaaatgccattcaaaggccactggtgctttatttttctatctgctgagtaaactgaaatgagatgggtcccaaccaccactgtaattttcaagcctattttatttgtacctgtaaatactgtacagctaatatatatatatatatatatatatgtgtgtgtgtgtgtgtgtgtatatgtgtttatagagatacacacacatatatatgtgtgtatatatatacacatacatatatatacacacacgcatttgcacagacacacacatatatcaattctcatgagtgtattataatctctggtgggggcaagtgtctggaaggcctgaggggcacttcagatgagaatggagaggtagggagccaggtgcagcaggatccctcaaatcaataaagcattaccagagatgcacttt

SEQ ID NO: 30065 - DNA, 4820 bp, Homo sapiens
  source 1..4820: mol_type = unassigned DNA
ctcgggttgacaacggctaagcagccgcggcagctgctcttctggctggcaccgtcacccctgcccgaccccaggccccgcgtgtgtcccggacggagcagtccctcctgggctcgcctcctgcccgctcgctctgtgtcagcgcccgaacccaaaggggtggacgcggcctccagaagccgaggccaaaagagcatgtgagtggcttcaagcaacaggattccctcagtatgtgcagctttttgaagaaggttcgtttcccctggatattggctctgtgaagaaaaaccacggttttctggacgaggactctttgggggccctgtgtaggaggctgatgaccttgaataattgtgcctcgatgaaactggaggttcattttcaaagcaagcagaatgaagactcagaagaggaagagcagtgtaccatcagtagccactgggccttccagcaggaaagtaagtgctggtctcctatggggtcctctgatctgttggccccaccgagccctggcctgccagcgacctcaagctgtgagagcgtcctcaccgagcttagtgccacctctctgccagtcatcaccgtgagcctaccacccgagccagcagacttgcccttgccaggccgtgcccccagctcgagtgaccggcccctcctcagccccacccagggccaggagggtccccaggacaaagccaagaagcgccatcgtaaccgtagcttcctcaagcaccttgaatctctgaggcggaaggaaaagagtggcagccagcaagcagagcccaagcatagtccagccacctcagagaaggtctccaaagcctcatctttccgcagttgtcgtggcttcctctcagctggattttacagggccaagaactgggccgccacctcagccggtggcagtggtgccaatactcggaaggcctgggaggcctggcctgtggcctcgttccggcatcctcagtggacacaccggggtgattgcctggtgcacgttcctggggaccacaaaccaggcacattccctcgctccctgtccattgagagcctgtgtcctgaggatggacaccgcctggcagactggcagccaggtaggcggtggggctgtgaggggcgccggggctcctgtggctcaacgggcagccatgccagcacgtatgacaacttgcctgagctgtacccagctgagcctgtaatggttggggctgaggctgaagatgaagatgatgaggagagtgggggcagctatgctcacctagacgacatcctccagcacgtgtgggggctacagcaacgagtagagctgtggtctcgggccatgtacccagacctggggcctggagatgaggaagaggaggaggccacttcatcagtagaaatagccacagttgaggtcaaatgccaagctgaggctctcagccagatggaggttccggcccatggagagtccccagcctgggcccaggctgaagtccagccagcagtcctggctccggctcaggctccagctgaggctgaaccagtggcacaggaagaggctgaggccccggccccagccccggccccggccccagcccaggacagtgagcaggaggcacattcaggcggggaacccacctttgcctctagcctgtctgtggaagaaggacactccatttctgacactgtggcctcctccagcgaacttgacagtagtgggaactccatgaatgaggctgaggctgcggggcccctggctggactccaggcatcaatgccccgtgaacggcgcgattcaggtgttggggcctcacttaccagaccctgcaggaagctccgttggcatagcttccagaactcccatcgtcccagcctcaactcagagtcgctggagatcaaccggcagtttgcaggccagatcaacctcctgcacaagggctcactgctgcggcttaccgcgttcatggagaagtacactgtgccccacaagcagggctgggtctggtcaatgcccaagttcatgaggaggaacaagaccccagattaccggggacagcacgtatttggggtgccacccctcatccacgtgcagcgcacgggccagccactgccacagagcattcagcaagccatgcgctacttgcgcagccagtgcctggaccaagtaggcatcttccgcaagtctggggtcaagtccaggatccagaacctgcgtcaaatgaatgagacctcgcctgacaatgtctgctacgagggccagtcagcctacgacgtggctgacctgctaaagcagtatttccgggacctgcctgagcccatcttcaccagcaagctcaccaccactttcctccagatctaccagctcctccccaaggatcagtggttggcagcagcacaagccgccaccttgctgctccccgatgagaaccgagaggtgctacagaccctgctctacttcttaagtgacattgcctctgccgaggaaaaccagatgacagcaggcaacctggcagtgtgcctggcgccctccatcttccacctcaatgtctctaagaaggatagcccctctcccaggatcaagagcaaacgcagcctcattggcaggccaggccctagggacctgagtgacaacatggcagccacccagggcctgtcgcacatgatcagtgactgcaagaaacttttccaggtgccccaggacatggtgctgcagctgtgcagctcctacagcgcagctgagctcagccctcccggcccagccctggctgagctgcgtcaggcccaagctgcaggggtaagcctgagcctctacatggaagagaatatccaggacctgctgcgtgatgctgctgagcgcttcaagggctggatgagcgtgccagggccccagcacacggagctggcttgcaggaaggcaccggatgggcaccccctgcggctatggaaggcatccacagaggtggcagcccccccagctgtggtgctgcatcgtgttctccgggagcgggccctctgggatgaggatctgctgcgggcccaggtgctggaagccctgatgccgggtgtggagctgtaccactatgtcaccgacagcatggcaccccatccctgccgcgactttgtggtgcttcggatgtggcgctctgacctgcctcgtgggggttgcctgcttgtctcccagtccctggatccggaacaacctgtgccagagtcgggtgtgcgagccctcatgctcacatcccagtacctcatggagccttgcggcttgggccgctctcggctcacacacatctgccgggctgacctcaggggccgttctcctgactggtacaacaaagtctttggacacctgtgtgccatggaagtggcaaagatccgggactccttccccaccctgcaggcagcgggccctgagacaaagctgtgagccttgggctggtcccagggtggcaccacccaggccccctgggcaccaagggagcgagggggaataagagcagggcagccccctgggtgccgctgtcaggagcagagccaggcccaggtggctccagctgcctgtcctgtcccctttcctaaagctcctctgcacatagaggggagaaaaagagaatttaggcaactccactcccccttcacccccaaccctgtattctactctcccgaaaagagaagagaatcgcatgagtagcaagactgctgccaccagccacctgcttgtgaggccgccacttggcatgaagcctccacagctccccgcctgcaggggcaaagaggtcgacagcaatgtgtgatcccagctctctgccagactgagagggcaagccgtcttgtttgctgcaaggatgcttttgaggttggacaggaggttctggtcctgcctttggggccaacgctggctctgaagtgtctttttcagaggaattggactggagtgaatgggcacaggggtggagcgcagggcagccccagtcaccacgagctgtttcatttgtgtaaatacgatgctgaattttatgaggctgagttaagagtgggcactgacgggcccctaatatgtgacatgacgatttggcatagatagggatgtgagagtggagtaccttcctttctcaagtctcgagatgccagtgaaaccagtattccctgacttgggtttcacactttatcgaccaccccatggggtcctgtgtagcctttggccacgcactgacactgcccaggccaagcaaaagcagagtgtggttaagagacaagggtctatgtcatcatcccttttgcttatggtagtgggctaacataacagcccctttctcaagcagagacctggcccctgggccagccagatggaagggcctatcttagccagctggagcttaagccaaacctgttctgtcccactggccagccatctttgctcacatggaaattcaaatgccattcaaaggccactggtgctttatttttctatctgctgagtaaactgaaatgagatgggtcccaaccaccactgtaattttcaagcctattttatttgtacctgtaaatactgtacagctaatatatatatatatatatatatatgtgtgtgtgtgtgtgtgtgtatatgtgtttatagagatacacacacatatatatgtgtgtatatatatacacatacatatatatacacacacgcatttgcacagacacacacatatatcaattctcatgagtgtattataatctctggtgggggcaagtgtctggaaggcctgaggggcacttcagatgagaatggagaggtagggagccaggtgcagcaggatccctcaaatcaataaagcattaccagagat

SEQ ID NO: 30066 - DNA, 4841 bp, Homo sapiens
  source 1..4841: mol_type = unassigned DNA
agggaccgggctggctctcgccgagccccgggcctcttttagcctcgtccccagagagggaggagccggtgcccggcacagccccgccggccctagaagctccccacgcgccaccatgcctctgctggacgttttctggtcttgcttcaggaaggtgaagtgcttcccattgctgcaggtgaagaagaacgctgaagccgaggccaaaagagcatgtgagtggcttcaagcaacaggattccctcagtatgtgcagctttttgaagaaggttcgtttcccctggatattggctctgtgaagaaaaaccacggttttctggacgaggactctttgggggccctgtgtaggaggctgatgaccttgaataattgtgcctcgatgaaactggaggttcattttcaaagcaagcagaatgaagactcagaagaggaagagcagtgtaccatcagtagccactgggccttccagcaggaaagtaagtgctggtctcctatggggtcctctgatctgttggccccaccgagccctggcctgccagcgacctcaagctgtgagagcgtcctcaccgagcttagtgccacctctctgccagtcatcaccgtgagcctaccacccgagccagcagacttgcccttgccaggccgtgcccccagctcgagtgaccggcccctcctcagccccacccagggccaggagggtccccaggacaaagccaagaagcgccatcgtaaccgtagcttcctcaagcaccttgaatctctgaggcggaaggaaaagagtggcagccagcaagcagagcccaagcatagtccagccacctcagagaaggtctccaaagcctcatctttccgcagttgtcgtggcttcctctcagctggattttacagggccaagaactgggccgccacctcagccggtggcagtggtgccaatactcggaaggcctgggaggcctggcctgtggcctcgttccggcatcctcagtggacacaccggggtgattgcctggtgcacgttcctggggaccacaaaccaggcacattccctcgctccctgtccattgagagcctgtgtcctgaggatggacaccgcctggcagactggcagccaggtaggcggtggggctgtgaggggcgccggggctcctgtggctcaacgggcagccatgccagcacgtatgacaacttgcctgagctgtacccagctgagcctgtaatggttggggctgaggctgaagatgaagatgatgaggagagtgggggcagctatgctcacctagacgacatcctccagcacgtgtgggggctacagcaacgagtagagctgtggtctcgggccatgtacccagacctggggcctggagatgaggaagaggaggaggccacttcatcagtagaaatagccacagttgaggtcaaatgccaagctgaggctctcagccagatggaggttccggcccatggagagtccccagcctgggcccaggctgaagtccagccagcagtcctggctccggctcaggctccagctgaggctgaaccagtggcacaggaagaggctgaggccccggccccagccccggccccggccccagcccaggacagtgagcaggaggcacattcaggcggggaacccacctttgcctctagcctgtctgtggaagaaggacactccatttctgacactgtggcctcctccagcgaacttgacagtagtgggaactccatgaatgaggctgaggctgcggggcccctggctggactccaggcatcaatgccccgtgaacggcgcgattcaggtgttggggcctcacttaccagaccctgcaggaagctccgttggcatagcttccagaactcccatcgtcccagcctcaactcagagtcgctggagatcaaccggcagtttgcaggccagatcaacctcctgcacaagggctcactgctgcggcttaccgcgttcatggagaagtacactgtgccccacaagcagggctgggtctggtcaatgcccaagttcatgaggaggaacaagaccccagattaccggggacagcacgtatttggggtgccacccctcatccacgtgcagcgcacgggccagccactgccacagagcattcagcaagccatgcgctacttgcgcagccagtgcctggaccaagtaggcatcttccgcaagtctggggtcaagtccaggatccagaacctgcgtcaaatgaatgagacctcgcctgacaatgtctgctacgagggccagtcagcctacgacgtggctgacctgctaaagcagtatttccgggacctgcctgagcccatcttcaccagcaagctcaccaccactttcctccagatctaccagctcctccccaaggatcagtggttggcagcagcacaagccgccaccttgctgctccccgatgagaaccgagaggtgctacagaccctgctctacttcttaagtgacattgcctctgccgaggaaaaccagatgacagcaggcaacctggcagtgtgcctggcgccctccatcttccacctcaatgtctctaagaaggatagcccctctcccaggatcaagagcaaacgcagcctcattggcaggccaggccctagggacctgagtgacaacatggcagccacccagggcctgtcgcacatgatcagtgactgcaagaaacttttccaggtgccccaggacatggtgctgcagctgtgcagctcctacagcgcagctgagctcagccctcccggcccagccctggctgagctgcgtcaggcccaagctgcaggggtaagcctgagcctctacatggaagagaatatccaggacctgctgcgtgatgctgctgagcgcttcaagggctggatgagcgtgccagggccccagcacacggagctggcttgcaggaaggcaccggatgggcaccccctgcggctatggaaggcatccacagaggtggcagcccccccagctgtggtgctgcatcgtgttctccgggagcgggccctctgggatgaggatctgctgcgggcccaggtgctggaagccctgatgccgggtgtggagctgtaccactatgtcaccgacagcatggcaccccatccctgccgcgactttgtggtgcttcggatgtggcgctctgacctgcctcgtgggggttgcctgcttgtctcccagtccctggatccggaacaacctgtgccagagtcgggtgtgcgagccctcatgctcacatcccagtacctcatggagccttgcggcttgggccgctctcggctcacacacatctgccgggctgacctcaggggccgttctcctgactggtacaacaaagtctttggacacctgtgtgccatggaagtggcaaagatccgggactccttccccaccctgcaggcagcgggccctgagacaaagctgtgagccttgggctggtcccagggtggcaccacccaggccccctgggcaccaagggagcgagggggaataagagcagggcagccccctgggtgccgctgtcaggagcagagccaggcccaggtggctccagctgcctgtcctgtcccctttcctaaagctcctctgcacatagaggggagaaaaagagaatttaggcaactccactcccccttcacccccaaccctgtattctactctcccgaaaagagaagagaatcgcatgagtagcaagactgctgccaccagccacctgcttgtgaggccgccacttggcatgaagcctccacagctccccgcctgcaggggcaaagaggtcgacagcaatgtgtgatcccagctctctgccagactgagagggcaagccgtcttgtttgctgcaaggatgcttttgaggttggacaggaggttctggtcctgcctttggggccaacgctggctctgaagtgtctttttcagaggaattggactggagtgaatgggcacaggggtggagcgcagggcagccccagtcaccacgagctgtttcatttgtgtaaatacgatgctgaattttatgaggctgagttaagagtgggcactgacgggcccctaatatgtgacatgacgatttggcatagatagggatgtgagagtggagtaccttcctttctcaagtctcgagatgccagtgaaaccagtattccctgacttgggtttcacactttatcgaccaccccatggggtcctgtgtagcctttggccacgcactgacactgcccaggccaagcaaaagcagagtgtggttaagagacaagggtctatgtcatcatcccttttgcttatggtagtgggctaacataacagcccctttctcaagcagagacctggcccctgggccagccagatggaagggcctatcttagccagctggagcttaagccaaacctgttctgtcccactggccagccatctttgctcacatggaaattcaaatgccattcaaaggccactggtgctttatttttctatctgctgagtaaactgaaatgagatgggtcccaaccaccactgtaattttcaagcctattttatttgtacctgtaaatactgtacagctaatatatatatatatatatatatatgtgtgtgtgtgtgtgtgtgtatatgtgtttatagagatacacacacatatatatgtgtgtatatatatacacatacatatatatacacacacgcatttgcacagacacacacatatatcaattctcatgagtgtattataatctctggtgggggcaagtgtctggaaggcctgaggggcacttcagatgagaatggagaggtagggagccaggtgcagcaggatccctcaaatcaataaagcattaccagagatgca

SEQ ID NO: 30067 - DNA, 4864 bp, Homo sapiens
  source 1..4864: mol_type = unassigned DNA
ggccttccaggaggcgggaggcgcccgctgtcgaggcagctgagccccggcaaccgctgctctccgcctctcccctcgcggggccggctcatggagcgcagggaccgggctggctctcgccgagccccgggcctcttttagcctcgtccccagagagggaggagccggtgcccggcacagccccgccggccctagaagctccccacgcgccaccatgcctctgctggacgttttctggtcttgcttcaggaaggtgaagtgcttcccattgctgcaggtgaagaagaacgctgaagccgaggccaaaagagcatgtgagtggcttcaagcaacaggattccctcagtatgtgcagctttttgaaggaggctgatgaccttgaataattgtgcctcgatgaaactggaggttcattttcaaagcaagcagaatgaagactcagaagaggaagagcagtgtaccatcagtagccactgggccttccagcaggaaagtaagtgctggtctcctatggggtcctctgatctgttggccccaccgagccctggcctgccagcgacctcaagctgtgagagcgtcctcaccgagcttagtgccacctctctgccagtcatcaccgtgagcctaccacccgagccagcagacttgcccttgccaggccgtgcccccagctcgagtgaccggcccctcctcagccccacccagggccaggagggtccccaggacaaagccaagaagcgccatcgtaaccgtagcttcctcaagcaccttgaatctctgaggcggaaggaaaagagtggcagccagcaagcagagcccaagcatagtccagccacctcagagaaggtctccaaagcctcatctttccgcagttgtcgtggcttcctctcagctggattttacagggccaagaactgggccgccacctcagccggtggcagtggtgccaatactcggaaggcctgggaggcctggcctgtggcctcgttccggcatcctcagtggacacaccggggtgattgcctggtgcacgttcctggggaccacaaaccaggcacattccctcgctccctgtccattgagagcctgtgtcctgaggatggacaccgcctggcagactggcagccaggtaggcggtggggctgtgaggggcgccggggctcctgtggctcaacgggcagccatgccagcacgtatgacaacttgcctgagctgtacccagctgagcctgtaatggttggggctgaggctgaagatgaagatgatgaggagagtgggggcagctatgctcacctagacgacatcctccagcacgtgtgggggctacagcaacgagtagagctgtggtctcgggccatgtacccagacctggggcctggagatgaggaagaggaggaggccacttcatcagtagaaatagccacagttgaggtcaaatgccaagctgaggctctcagccagatggaggttccggcccatggagagtccccagcctgggcccaggctgaagtccagccagcagtcctggctccggctcaggctccagctgaggctgaaccagtggcacaggaagaggctgaggccccggccccagccccggccccggccccagcccaggacagtgagcaggaggcacattcaggcggggaacccacctttgcctctagcctgtctgtggaagaaggacactccatttctgacactgtggcctcctccagcgaacttgacagtagtgggaactccatgaatgaggctgaggctgcggggcccctggctggactccaggcatcaatgccccgtgaacggcgcgattcaggtgttggggcctcacttaccagaccctgcaggaagctccgttggcatagcttccagaactcccatcgtcccagcctcaactcagagtcgctggagatcaaccggcagtttgcaggccagatcaacctcctgcacaagggctcactgctgcggcttaccgcgttcatggagaagtacactgtgccccacaagcagggctgggtctggtcaatgcccaagttcatgaggaggaacaagaccccagattaccggggacagcacgtatttggggtgccacccctcatccacgtgcagcgcacgggccagccactgccacagagcattcagcaagccatgcgctacttgcgcagccagtgcctggaccaagtaggcatcttccgcaagtctggggtcaagtccaggatccagaacctgcgtcaaatgaatgagacctcgcctgacaatgtctgctacgagggccagtcagcctacgacgtggctgacctgctaaagcagtatttccgggacctgcctgagcccatcttcaccagcaagctcaccaccactttcctccagatctaccagctcctccccaaggatcagtggttggcagcagcacaagccgccaccttgctgctccccgatgagaaccgagaggtgctacagaccctgctctacttcttaagtgacattgcctctgccgaggaaaaccagatgacagcaggcaacctggcagtgtgcctggcgccctccatcttccacctcaatgtctctaagaaggatagcccctctcccaggatcaagagcaaacgcagcctcattggcaggccaggccctagggacctgagtgacaacatggcagccacccagggcctgtcgcacatgatcagtgactgcaagaaacttttccaggtgccccaggacatggtgctgcagctgtgcagctcctacagcgcagctgagctcagccctcccggcccagccctggctgagctgcgtcaggcccaagctgcaggggtaagcctgagcctctacatggaagagaatatccaggacctgctgcgtgatgctgctgagcgcttcaagggctggatgagcgtgccagggccccagcacacggagctggcttgcaggaaggcaccggatgggcaccccctgcggctatggaaggcatccacagaggtggcagcccccccagctgtggtgctgcatcgtgttctccgggagcgggccctctgggatgaggatctgctgcgggcccaggtgctggaagccctgatgccgggtgtggagctgtaccactatgtcaccgacagcatggcaccccatccctgccgcgactttgtggtgcttcggatgtggcgctctgacctgcctcgtgggggttgcctgcttgtctcccagtccctggatccggaacaacctgtgccagagtcgggtgtgcgagccctcatgctcacatcccagtacctcatggagccttgcggcttgggccgctctcggctcacacacatctgccgggctgacctcaggggccgttctcctgactggtacaacaaagtctttggacacctgtgtgccatggaagtggcaaagatccgggactccttccccaccctgcaggcagcgggccctgagacaaagctgtgagccttgggctggtcccagggtggcaccacccaggccccctgggcaccaagggagcgagggggaataagagcagggcagccccctgggtgccgctgtcaggagcagagccaggcccaggtggctccagctgcctgtcctgtcccctttcctaaagctcctctgcacatagaggggagaaaaagagaatttaggcaactccactcccccttcacccccaaccctgtattctactctcccgaaaagagaagagaatcgcatgagtagcaagactgctgccaccagccacctgcttgtgaggccgccacttggcatgaagcctccacagctccccgcctgcaggggcaaagaggtcgacagcaatgtgtgatcccagctctctgccagactgagagggcaagccgtcttgtttgctgcaaggatgcttttgaggttggacaggaggttctggtcctgcctttggggccaacgctggctctgaagtgtctttttcagaggaattggactggagtgaatgggcacaggggtggagcgcagggcagccccagtcaccacgagctgtttcatttgtgtaaatacgatgctgaattttatgaggctgagttaagagtgggcactgacgggcccctaatatgtgacatgacgatttggcatagatagggatgtgagagtggagtaccttcctttctcaagtctcgagatgccagtgaaaccagtattccctgacttgggtttcacactttatcgaccaccccatggggtcctgtgtagcctttggccacgcactgacactgcccaggccaagcaaaagcagagtgtggttaagagacaagggtctatgtcatcatcccttttgcttatggtagtgggctaacataacagcccctttctcaagcagagacctggcccctgggccagccagatggaagggcctatcttagccagctggagcttaagccaaacctgttctgtcccactggccagccatctttgctcacatggaaattcaaatgccattcaaaggccactggtgctttatttttctatctgctgagtaaactgaaatgagatgggtcccaaccaccactgtaattttcaagcctattttatttgtacctgtaaatactgtacagctaatatatatatatatatatatatatgtgtgtgtgtgtgtgtgtgtatatgtgtttatagagatacacacacatatatatgtgtgtatatatatacacatacatatatatacacacacgcatttgcacagacacacacatatatcaattctcatgagtgtattataatctctggtgggggcaagtgtctggaaggcctgaggggcacttcagatgagaatggagaggtagggagccaggtgcagcaggatccctcaaatcaataaagcattaccagagatgcactttaa

SEQ ID NO: 30068 - DNA, 598 bp, Homo sapiens
  source 1..598: mol_type = unassigned DNA
agagtgtttaaatacattggccctctagggtagcacatcatctcttgaagcttcacttcaacttcactacttctgtagtctcatcttgagtaaaagagaacccagccaactatgaagttccttgtctttgccttcatcttggctctcatggtttccatgattggagctgattcatctgaagagaaatttttgcgtagaattggaagattcggttatgggtatggcccttatcagccagttccagaacaaccactatacccacaaccataccaaccacaataccaacaatataccttttaatatcatcagtaactgcaggacatgattattgaggcttgattggcaaatacgacttctacatccatattctcatctttcataccatatcacactactaccactttttgaagaatcatcaaagagcaatgcaaatgaaaaacactataatttactgtatactctttgtttcaggatacttgccttttcaattgtcacttgatgatataattgcaatttaaactgttaagctgtgttcagtactgtttctgaataatagaaatcacttctctaaaagcaataaatttcaagcacattttta

SEQ ID NO: 30069 - DNA, 534 bp, Homo sapiens
  source 1..534: mol_type = unassigned DNA
atcatctcttgaagcttcacttcaacttcactacttctgtagtctcatcttgagtaaaagagaacccagccaactatgaagttccttgtctttgccttcatcttggctctcatggtttccatgattggagctgattcatctgaagagtatgggtatggcccttatcagccagttccagaacaaccactatacccacaaccataccaaccacaataccaacaatataccttttaatatcatcagtaactgcaggacatgattattgaggcttgattggcaaatacgacttctacatccatattctcatctttcataccatatcacactactaccactttttgaagaatcatcaaagagcaatgcaaatgaaaaacactataatttactgtatactctttgtttcaggatacttgccttttcaattgtcacttgatgatataattgcaatttaaactgttaagctgtgttcagtactgtttctgaataatagaaatcacttctctaaaagcaataaatttcaagcacatttttaca

SEQ ID NO: 30070 - DNA, 2210 bp, Homo sapiens
  source 1..2210: mol_type = unassigned DNA
agctcctaggaagcttcagggcttaaagctccactctacttggactgtactatcaggcccccaaaatggggggagccgacagggaaggactgatttccatttcaaactgcattctggtactttgtactccagcaccattggccgatcaatatttaatgcttggagattctgactctgcgggagtcatgtcaggggaccttgggagccaatctgcttgagcttctgagtgataattattcatgggctcctgcctcttgctctttctctagcacggtcccactctgcagactcagtgccttattcagtcttctctctcgctctctccgctgctgtagccggaccctttgccttcgccactgctcagcgtctgcacatccctacaatggctaaaacagcaatggcctacaaggaaaaaatgaaggagctgtccatgctgtcactgatctgctcttgcttttacccggaacctcgcaacatcaacatctatacttacgatgatatggaagtgaagcaaatcaacaaacgtgcctctggccaggcttttgagctgatcttgaagccaccatctcctatctcagaagccccacgaactttagcttctccaaagaagaaagacctgtccctggaggagatccagaagaaactggaggctgcagaggaaagaagaaagtctcaggaggcccaggtgctgaaacaattggcagagaagagggaacacgagcgagaagtccttcagaaggctttggaggagaacaacaacttcagcaagatggcggaggaaaagctgatcctgaaaatggaacaaattaaggaaaaccgtgaggctaatctagctgctattattgaacgtctgcaggaaaaggagaggcatgctgcggaggtgcgcaggaacaaggaactccaggttgaactgtctggctgaagcaagggagggtctggcacgccccaccaatagtaaatccccctgcctatattataatggatcatgcgatatcaggatggggaatgtatgacatggtttaaaaagaactcattataaaaaaaaaaaaacaaaaaaaatcaaaaattaaaaaaaatcaatgcggtctctttgcagaatgttttgcttgatgtttaaaaaataccttggatcttattttgtaaatacttacatttttgttaaaaaatacaagtattgcattatgcaagttatttcataatcttacatgtcctgtaacaggcttttgatgttgtgtctttccactcaaatgaatttgctaggtctgttctttttgaagctccccatgtctaactccattccaaaagaaaaatgaggtcagtagacagtctatggtgctagaaacccaccattgcctaatgacctagaaggctttgttgtctctgagcttgactaagaccatacctagatcacaggtattatgactccacatgaaccttcacatttgttcgctcataatctacttactgcctaaaaactacaaaaccaggctaagaaataccaccagtcatagcatttacttctgcttctcctggattatgtgctacaaatgtgctttggctttagaaagggatggatgagaagacagacctgagaccaatctgggtagaagcaaaaagttgaaccttttaaagtgctgaacacaaatccaaattcgaatggttcaagcagccgtgaaatcgctcttcataaagtgggcttaattctctagtttaagttcttttgatggaatgaattaattaatgtgtcaggtggcttatttgtggatgccatgattgatgatgttcattttaagctcttacctatagtacaagtacatgatgctactgaatatttttccacttggaaactgtgagctggttgttgcattaaaacacacatacaaacaaaatcaaaaacactgcggactttcactcaagctggtctttcttccccagtgtaaggcaatcctgcctactaacaacaccaacaacaaaacactccatctgtgaagctgacgcagttaagggggctaggcagggcatttgtgccaactaagaatcaccagatacccaccataagtacctatcgcagttttgaagtcgtttctccccaactcccaactcctgaaggttgctgcctgcatatttactcttcattagtgctattttcctgtatgtcattgtgagcaagctgtgattaataaagaattggagttctgtgaactaataaa

SEQ ID NO: 30071 - DNA, 1516 bp, Homo sapiens
  source 1..1516: mol_type = unassigned DNA
ttctctctcgctctctccgctgctgtagccggaccctttgccttcgccactgctcagcgtctgcacatccctacaatggctaaaacagcaatggcctacaaggaaaaaatgaaggagctgtccatgctgtcactgatctgctcttgcttttacccggaacctcgcaacatcaacatctatacttacgatgatatggaagtgaagcaaatcaacaaacgtgcctctggccaggcttttgagctgatcttgaagccaccatctccaaagaagaaagacctgtccctggaggagatccagaagaaactggaggctgcagaggaaagaagaaagtctcaggaggcccaggtgctgaaacaattggcagagaagagggaacacgagcgagaagtccttcagaaggctttggaggagaacaacaacttcagcaagatggcggaggaaaagctgatcctgaaaatggaacaaattaaggaaaaccgtgaggctaatctagctgctattattgaacgtctgcaggaaaaggagaggcatgctgcggaggtgcgcaggaacaaggaactccaggttgaactgtctggctgaagcaagggagggtctggcacgccccaccaatagtaaatccccctgcctatattataatggatcatgcgatatcaggatggggaatgtatgacatggtttaaaaagaactcattataaaaaaaaaaaaacaaaaaaaatcaaaaattaaaaaaaatcaatgcggtctctttgcagaatgttttgcttgatgtttaaaaaataccttggatcttattttgtaaatacttacatttttgttaaaaaatacaagtattgcattatgcaagttatttcataatcttacatgtcctgtaacaggcttttgatgttgtgtctttccactcaaatgaatttgctaggtctgttctttttgaagctccccatgtctaactccattccaaaagaaaaatgaggtcagtagacagtctatggtgctagaaacccaccattgcctaatgacctagaaggctttgttgtctctgagcttgactaagaccatacctagatcacaggtattatgactccacatgaaccttcacatttgttcgctcataatctacttactgcctaaaaactacaaaaccaggctaagaaataccaccagtcatagcatttacttctgcttctcctggattatgtgctacaaatgtgctttggctttagaaagggatggatgagaagacagacctgagaccaatctgggtagaagcaaaaagttgaaccttttaaagtgctgaacacaaatccaaattcgaatggttcaagcagccgtgaaatcgctcttcataaagtgggcttaattctctagtttaagttcttttgatggaatgaattaattaatgtgtcaggtggcttatttgtggatgccatgattgatgatgttcattttaagctcttacctatagtacaagtacatgatgctactgaatatttttccacttggaaactgtgagct

SEQ ID NO: 30072 - DNA, 799 bp, Homo sapiens
  source 1..799: mol_type = unassigned DNA
gaccctttgccttcgccactgctcagcgtctgcacatccctacaatggctaaaacagcaatggcctacaaggaaaaaatgaaggagctgtccatgctgtcactgatctgctcttgcttttacccggaacctcgcaacatcaacatctatacttacgatgatatggaagtgaagcaaatcaacaaacgtgcctctggccaggcttttgagctgatcttgaagccaccatctcctatctcagaagccccacgaactttagcttctccaaagaagaaagacctgtccctggaggagatccagaagaaactggaggctgcagaggaaagaagaaagtctcaggaggcccaggtgctgaaacaattggcagagaagagggaacacgagcgagaagtccttcagaaggctttggaggagaacaacaacttcagcaagatggcggaggaaaagctgatcctgaaaatggaacaaattaaggaaaaccgtgaggctaatctagctgctattattgaacgtctgcaggaaaagctggtcaagtttatttcttctgaactaaaagaatctatagagtctcaatttctggagcttcagagggaaggagagaagcaatgagaggcatgctgcggaggtgcgcaggaacaaggaactccaggttgaactgtctggctgaagcaagggagggtctggcacgccccaccaatagtaaatccccctgcctatattataatggatcatgcgatatcaggatggggaatgtatgacatggtttaaaaagaactcattataaaaaaaaaaaaacaaaa

SEQ ID NO: 30073 - DNA, 2255 bp, Homo sapiens
  source 1..2255: mol_type = unassigned DNA
ggcactgcagcaccagccgtctgcagctccggccgccacttgcgcctctccagcctccgcaggcccaaccgccgccagcaccatggccagcaccatttccgcctacaaggagaagatgaaggagctgtcggtgctgtcgctcatctgctcctgcttctacacacagccgcaccccaataccgtctaccagtacggggacatggaggtgaagcagctggacaagcgggcctcaggccagagcttcgaggtcatcctcaagtccccttctgacctgtccccagagagccctatgctctcctccccacccaagaagaaggacacctccctggaggagctgcaaaagcggctggaggcagccgaggagcggaggaagacgcaggaggcgcaggtgctgaagcagctggcggagcggcgcgagcacgagcgcgaggtgctgcacaaggcgctggaggagaataacaacttcagccgccaggcggaggagaagctcaactacaagatggagctcagcaaggagatccgcgaggcacacctggccgcactgcgcgagcggctgcgcgagaaggagctgcacgcggccgaggtgcgcaggaacaaggagcagcgagaagagatgtcgggctaagggcccgggacgggcggcgcccatcctgcgacagaacacgttcgggttttggttttgtttcgttcacctctgtctagatgcaacttttgttcctcctcccccacccccgcccccagcttcatgcttctcttccgcactcagccgccctgccctgtcctcgtggtgagtcgctgaccacggcttcccctgcaggagccgccgggcgtgagacgcggtccctcggtgcagacaccaggccgggcgcggctgggtcccccgggggccctgtgagagaggtggcggtgaccgtggtaaacccagggcggtggcgtgggatcacgggtccttacgctgggctgtctggtcagcacgtgcaggtcagggcaggtcctctgagccggcgcccctggccagcaggcgaggctacagtacctgctgtctttccagggggaaggggctccccatgagggaggggcgacgggggaggggggtgatggtgcctgggagcctgcgtgtgcagccggtgcttgttgaactggcaggcgggtgggtgggggctgcagctttccttaatgtggttgcacaggggtcctctgagaccacctggcgtgaggtggacaccctgggccttcctggaagcctgcagttgggggcctgccctgagtctgctggggagtgggcattctctgccagggacccatgagcaggctgcatggtctagaggttgtgggcagcatggacagtcccccactcagaagtgcaagagttccaaagagcctctggcccaggcccctccccaccagggctttgcagatgtccttgaaagacccaccctagagccctttggagtgctggcccctcctgtgccctctgccctggtggaagcggcagccacaagtcctcctcagggagccccaagggggattttgtgggaccgctgcccacagatccaggtgttggaagggcagcgggtaaggttcccaagccagccccaacacccttcccacttggcacccagagggggctgtgggtggaggcctgactccaggcctctcctgcccacaccctctgggctgagttccttctttcccttggacgcccagtgctggccttggaggacggtcagctggaggatggcggtgggggaggctgtctttgtaccactgcagcatcccccacttctccacggaagccccatcccaaagctgctgcctggccccttgctgtaaagtgtgaagggggcggctgagttctcttaggacccagagccagggccctcaacttccatcctgcgggaggccttggccgggcactgccagtgtcttccagagtcacacccagggaccacgggaggatcctgacccctgcagggctcaggggtcagcagggacccactgccccatctccctctccccaccaagacagccccagaaggagcagccagctgggatgggaacccaaggctgtccacatctggcttttgtgggactcagaaagggaagcagaactgagggctgggatattcctcatggtggcagcgctcatagcgaaagcctactgtaatatgcacccatctcatccacgtagtaaagtgaacttaaaaattcaatcaaatgaacaattaaataaacacctgtgtgtttaagacatg

SEQ ID NO: 30074 - DNA, 970 bp, Homo sapiens
  source 1..970: mol_type = unassigned DNA
acaccgctgcggcctcggggaccaccctttgcgacgcccgcgccacctgctctggccagaaaagccactgccctttgcgccgcggggtctggatgggggaggggcgactgcgatccccaaaccctccggagaccagagggctccgcccctcccgcccctccacctcccgcggggcggacccaccgccttcgaagcctacaaggagaagatgaaggagctgtcggtgctgtcgctcatctgctcctgcttctacacacagccgcaccccaataccgtctaccagtacggggacatggaggtgaagcagctggacaagcgggcctcaggccagagcttcgaggtcatcctcaagtccccttctgacctgtccccagagagccctatgctctcctccccacccaagaagaaggacacctccctggaggagctgcaaaagcggctggaggcagccgaggagcggaggaagacgcaggaggcgcaggtgctgaagcagctggcggagcggcgcgagcacgagcgcgaggtgctgcacaaggcgctggaggagaataacaacttcagccgccaggcggaggagaagctcaactacaagatggagctcagcaaggagatccgcgaggcacacctggccgcactgcgcgagcggctgcgcgagaaggagctgcacgcggccgaggtgcgcaggaacaaggagcagcgagaagagatgtcgggctaagggcccgggacgggcggcgcccatcctgcgacagaacacgttcgggttttggttttgtttcgttcacctctgtctagatgcaacttttgttcctcctcccccacccccgcccccagcttcatgcttctcttccgcactcagccgccctgccctgtcctcgtggtgagtcgctgaccacggcttcccctgcaggagccgccgggcgtgagacgcggtccctcggtgcagacaccaggccgggcgcggctgggt

SEQ ID NO: 30075 - DNA, 1695 bp, Homo sapiens
  source 1..1695: mol_type = unassigned DNA
agcccgaggggtggaagccggcggcggccgagcggggtcagttctctgtagtgtttgccaatgttggagccgtctgcaaagtgtccccggcaagaagatgttctcagtgcagctgagtcttggtgagcagacatgggaatccgaaggcagcagtataaagaaggctcagcaggctgttgccaataaagctttgactgaatctacgcttcccaaaccagttcagaagccacccaaaagtaatgttaacaataacccaggcagtataactccaactgtggaactgaatgggcttgctatgaaaaggggagagcctgccatctacaggccattagatccaaagccattcccaaattatagagctaattacaactttcggggcatgtacaatcagaggtatcattgcccagtgcctaagatcttttatgttcagctcactgtaggaaataatgaattttttggggaaggaaagactcgacaagctgctagacacaatgctgcaatgaaagccctccaagcactgcagaatgaacctattccagaaagatctcctcagaatggtgaatcaggaaaggatgtggatgatgacaaagatgcaaataagtctgagatcagcttagtgtttgaaattgctctgaagcgaaatatgcctgtcagttttgaggttattaaagaaagtggaccaccacatatgaaaagctttgttactcgagtgtcagtaggagagttctctgcagaaggagaaggaaatagcaaaaaactctccaagaagcgcgctgcgaccaccgtcttacaggagcttaaaaaacttccacctcttcctgtggtggaaaagccaaaactattttttaaaaaacgccctaaaacaatagtaaaggccggaccagaatatggccaagggatgaaccctattagccgcctggcgcaaattcaacaggccaaaaaggaaaaggagccggattatgttttgctttcagaaagaggaatgcctcgacgtcgagaatttgtgatgcaggtgaaggtaggcaatgaagttgctacaggaacaggacctaataaaaagatagccaaaaaaaatgctgcagaagcaatgctgttacaacttggttataaagcatccactaatcttcaggatcaacttgagaagacaggggaaaacaaaggatggagtggtccaaagcctgggtttcctgaaccaacaaataatactccaaaaggaattcttcatttgtctcctgatgtttatcaagagatggaagccagccgccacaaagtaatctctggcactactctaggctatttgtcacccaaagatatgaaccaaccttcaagctctttcttcagtatatctcccacatcgaatagttcagctacaattgccagggaactccttatgaatggaacatcttctacagctgaagccataggtttaaaaggaagttctcctactcccccttgttctccagtacaaccttcaaaacaactggaatatttagcaaggattcaaggctttcaggtatgaattaaaagcaaaaacaaaaaacaaaacaattcattagcctcagattcttcatctgtatacatcacaaggctcattcttgcctgctagtatggcctacatgccacttacgttttaagttatttaggaacacaaaggacagacaaaaaagccatatgcacatgcctcattttctctta

SEQ ID NO: 30076 - DNA, 1950 bp, Homo sapiens
  source 1..1950: mol_type = unassigned DNA
agttctctgtagtgtttgccaatgttggagccgtctgcaaagtgtccccggcaagaagaggctgcctaccacaaggactttagcttactttttaaagattgaagaaaaaaaagaagacagaaaaagaagaactcaaagatacacaaagtaatttgaaccaaggctcagaagtttttggagccgtgagggatacagcagtttggtcaatattgtcttaacatgcttcaaataaatcaggcagtataactccaactgtggaactgaatgggcttgctatgaaaaggggagagcctgccatctacaggccattagatccaaagccattcccaaattatagagctaattacaactttcggggcatgtacaatcagaggtatcattgcccagtgcctaagatcttttatgttcagctcactgtaggaaataatgaattttttggggaaggaaagactcgacaagctgctagacacaatgctgcaatgaaagccctccaagcactgcagaatgaacctattccagaaagatctcctcagaatggtgaatcaggaaaggatgtggatgatgacaaagatgcaaataagtctgagatcagcttagtgtttgaaattgctctgaagcgaaatatgcctgtcagttttgaggttattaaagaaagtggaccaccacatatgaaaagctttgttactcgagtgtcagtaggagagttctctgcagaaggagaaggaaatagcaaaaaactctccaagaagcgcgctgcgaccaccgtcttacaggagcttaaaaaacttccacctcttcctgtggtggaaaagccaaaactattttttaaaaaacgccctaaaacaatagtaaaggccggaccagaatatggccaagggatgaaccctattagccgcctggcgcaaattcaacaggccaaaaaggaaaaggagccggattatgttttgctttcagaaagaggaatgcctcgacgtcgagaatttgtgatgcaggtgaaggtaggcaatgaagttgctacaggaacaggacctaataaaaagatagccaaaaaaaatgctgcagaagcaatgctgttacaacttggttataaagcatccactaatcttcaggatcaacttgagaagacaggggaaaacaaaggatggagtggtccaaagcctgggtttcctgaaccaacaaataatactccaaaaggaattcttcatttgtctcctgatgtttatcaagagatggaagccagccgccacaaagtaatctctggcactactctaggctatttgtcacccaaagatatgaaccaaccttcaagctctttcttcagtatatctcccacatcgaatagttcagctacaattgccagggaactccttatgaatggaacatcttctacagctgaagccataggtttaaaaggaagttctcctactcccccttgttctccagtacaaccttcaaaacaactggaatatttagcaaggattcaaggctttcaggttcactactgtgatagacaaagtggcaaagagtgtgtgacctgtctgacattagcccctgtgcagatgactttccatgctattggaagctccattgaagccagccatgatcaggcagccttaagtgccttgaaacaattttctgaacaaggactggatccaatcgatggagcaatgaatatcgaaaaaggttctcttgaaaaacaagccaagcatctgagagagaaagcggacaataaccaggcacccccgggctccatcgctcaggactgcaagaaatcaaactcggccgtctagcagctcccagaacccgcggctgccaccgcatccttataaacctgtcagcacgcatgagggtgtctgtgttcagggaaatgaatgactaataccattatttgagtcttatgtgaagacaacactattctaacacgagagataatatacatggtactgttta

SEQ ID NO: 30077 - DNA, 1603 bp, Homo sapiens
  source 1..1603: mol_type = unassigned DNA
agttctctgtagtgtttgccaatgttggagccgtctgcaaagtgtccccggcaagaaggtatcattgcccagtgcctaagatcttttatgttcagctcactgtaggaaataatgaattttttggggaaggaaagactcgacaagctgctagacacaatgctgcaatgaaagccctccaagcactgcagaatgaacctattccagaaagatctcctcagaatggtgaatcaggaaaggatgtggatgatgacaaagatgcaaataagtctgagatcagcttagtgtttgaaattgctctgaagcgaaatatgcctgtcagttttgaggttattaaagaaagtggaccaccacatatgaaaagctttgttactcgagtgtcagtaggagagttctctgcagaaggagaaggaaatagcaaaaaactctccaagaagcgcgctgcgaccaccgtcttacaggagcttaaaaaacttccacctcttcctgtggtggaaaagccaaaactattttttaaaaaacgccctaaaacaatagtaaaggccggaccagaatatggccaagggatgaaccctattagccgcctggcgcaaattcaacaggccaaaaaggaaaaggagccggattatgttttgctttcagaaagaggaatgcctcgacgtcgagaatttgtgatgcaggtgaaggtaggcaatgaagttgctacaggaacaggacctaataaaaagatagccaaaaaaaatgctgcagaagcaatgctgttacaacttggttataaagcatccactaatcttcaggatcaacttgagaagacaggggaaaacaaaggatggagtggtccaaagcctgggtttcctgaaccaacaaataatactccaaaaggaattcttcatttgtctcctgatgtttatcaagagatggaagccagccgccacaaagtaatctctggcactactctaggctatttgtcacccaaagatatgaaccaaccttcaagctctttcttcagtatatctcccacatcgaatagttcagctacaattgccagggaactccttatgaatggaacatcttctacagctgaagccataggtttaaaaggaagttctcctactcccccttgttctccagtacaaccttcaaaacaactggaatatttagcaaggattcaaggctttcaggcagccttaagtgccttgaaacaattttctgaacaaggactggatccaatcgatggagcaatgaatatcgaaaaaggttctcttgaaaaacaagccaagcatctgagagagaaagcggacaataaccaggcacccccgggctccatcgctcaggactgcaagaaatcaaactcggccgtctagcagctcccagaacccgcggctgccaccgcatccttataaacctgtcagcacgcatgagggtgtctgtgttcagggaaatgaatgactaataccattatttgagtcttatgtgaagacaacactattctaacacgagagataatatacatggtactgtttattcaactggggaaaaataaaactttgagcatttcccttggaactcgagatcagatcataactcatttgcctagaggcagcag

SEQ ID NO: 30078 - DNA, 4061 bp, Homo sapiens
  source 1..4061: mol_type = unassigned DNA
agttctctgtagtgtttgccaatgttggagccgtctgcaaagtgtccccggcaagaagaggctgcctaccacaaggactttagcttactttttaaagattgaagaaaaaaaagaagacagaaaaagaagaactcaaagatacacaaagtaatttgaaccaaggctcagaagtttttggagccgtgagggatacagcagtttggtcaatattgtcttaacatgcttcaaataaatcagatgttctcagtgcagctgagtcttggtgagcagacatgggaatccgaaggcagcagtataaagaaggctcagcaggctgttgccaataaagctttgactgaatctacgcttcccaaaccagttcagaagccacccaaaagtaatgttaacaataacccaggcagtataactccaactgtggaactgaatgggcttgctatgaaaaggggagagcctgccatctacaggccattagatccaaagccattcccaaattatagagctaattacaactttcggggcatgtacaatcagaggtatcattgcccagtgcctaagatcttttatgttcagctcactgtaggaaataatgaattttttggggaaggaaagactcgacaagctgctagacacaatgctgcaatgaaagccctccaagcactgcagaatgaacctattccagaaagatctcctcagaatggtgaatcaggaaaggatgtggatgatgacaaagatgcaaataagtctgagatcagcttagtgtttgaaattgctctgaagcgaaatatgcctgtcagttttgaggttattaaagaaagtggaccaccacatatgaaaagctttgttactcgagtgtcagtaggagagttctctgcagaaggagaaggaaatagcaaaaaactctccaagaagcgcgctgcgaccaccgtcttacaggagcttaaaaaacttccacctcttcctgtggtggaaaagccaaaactattttttaaaaaacgccctaaaacaatagtaaaggccggaccagaatatggccaagggatgaaccctattagccgcctggcgcaaattcaacaggccaaaaaggaaaaggagccggattatgttttgctttcagaaagaggaatgcctcgacgtcgagaatttgtgatgcaggtgaaggtaggcaatgaagttgctacaggaacaggacctaataaaaagatagccaaaaaaaatgctgcagaagcaatgctgttacaacttggttataaagcatccactaatcttcaggatcaacttgagaagacaggggaaaacaaaggatggagtggtccaaagcctgggtttcctgaaccaacaaataatactccaaaaggaattcttcatttgtctcctgatgtttatcaagagatggaagccagccgccacaaagtaatctctggcactactctaggctatttgtcacccaaagatatgaaccaaccttcaagctctttcttcagtatatctcccacatcgaatagttcagctacaattgccagggaactccttatgaatggaacatcttctacagctgaagccataggtttaaaaggaagttctcctactcccccttgttctccagtacaaccttcaaaacaactggaatatttagcaaggattcaaggctttcaggtatgaattaaaagcaaaaacaaaaaacaaaacaattcattagcctcagattcttcatctgtatacatcacaaggctcattcttgcctgctagtatggcctacatgccacttacgttttaagttatttaggaacacaaaggacagacaaaaaagccatatgcacatgcctcattttctcttatttttgatctatctagtaattcttttgctgcctgtctcttctccattttccttcttcttttttaagcatttttcatattcttcactgtcttctatttggtcttgattaggtgcatctatctcttcgctctgtcttccacaaacaaaaattctgccttcagacatttggtgttagtatttcacactcagttctccctttttttacataaggattgagtttctttttatgatgattttacctttatagcaattttgaattttgcattctattgctagtattgattcaggtacaccattaagatacaacattctagaagtctattaccttaggagttaattaaacatgatatttgaagaataatgaaatgctttatagttgtttgaggcataacaatgtgtatttgttttactggatcatgttttgaactgactagggagggtagcacctgcctcagatagtaccaacaattctgtttcactgggtagtctaaaactagcttatagtttaacttaacttgttgtgtatgtgaatttagggatggaaactttttttcccctatttattctttgtttccttctgggaaaaaaccccacaaaaatcagcactcctttatggatacattggagcttttgaaagaattgtaaactctaggaaggggaaatatctgtgtcttgatttcttagttgccttgaaaatcatgtactgaactgtaaccgctaacttgactggatgaactagtttgcttgtgtgtagagagtgtattgcttcctcagatttcactgttttcatctccttttccatcttagtctttattccttaagaccaaaaactgtaatatcctttagaaatgctctagaagatctgtattgtgtagaatgatcatgtatttataaatattttacaagtttagattataaaatgaaaaagaaggtcatgtgttttggggggtattttgcatgttcggatttttttttcacttcaccgaacccttctgattctttcaaactattgccaggtagttgttagtgtttctaattggactcttaatatgaacttcaagaagctgttaccagttatcggctctgtcatctgaaattttaaccacttaatttaaagttacaattttagaatttgtttttgttgttttaccttaagaaacacaataaatcactgtttaaaaaagatctcaatttatataaagtactggaaaaaagctaagtaatttttagttctatctataatctccgtaggatgaattagaaataaattgtgatgaaaagaaattaactgcttatttatgaatctaatcatttagaaatgtctgagagtaacactgcattcttatagaaacaaagcacaaattgcattcaagctctgaattgattttttgcttggagctgttgttacagtagctgtaattttgctaccagaatgtcttaattttttaaatttgtttttatttctaagctcttggcaatgacaataattataattttaacatatcttcactgtagtcaacatgtagagtctgcttccctcattattgcattgctaaggcctttttaaaaagcttatgcttacataatatactcttttttatggacacgttatatgtttccaaatctgtgtattgtgatttttacatactaatgaatataaacaggtgattttaaaatattactgtgcttctttggttgaatgagctggtattgatgtaaaatactctgtcattgatggaccactacctgcagctaagcagtgagcagaatctccgggaaatgacttagtctggccacatgcatagcccatcttcataatgtcgcagcagaaggttctttgtggttaaaagttttaaagcctatttctttataggtaaccctctcaggtatatttacctggtagaaaaacatgtagattgtttctattacttaaatgttttaattggactgtagtttagaaattacaggaccagcttgttacagattatacactattctgttacttttatttctgaaacttaaaaacaataaattctttttctgtgtttctaggttagaacttttttattttattgcacactgaacagatactgttgcttattgaatattgtgtaaacccttctttggctttccttgcccattgcaatttgatttaagcctactagagccattgtatgtgacagctatattgtattacaaagtaaaaatatatgagtgtattgaaaac

SEQ ID NO: 30079 - DNA, 727 bp, Homo sapiens
  source 1..727: mol_type = unassigned DNA
agcggggtcagttctctgtagtgtttgccaatgttggagccgtctgcaaagtgtccccggcaagaagtttttggagccgtgagggatacagcagtttggtcaatattgtcttaacatgcttcaaataaatcagatgttctcagtgcagctgagtcttggtgagcagacatgggaatccgaaggcagcagtataaagaaggctcagcaggctgttgccaataaagctttgactgaatctacgcttcccaaaccagttcagaagccacccaaaagtaatgttaacaataacccaggcagtataactccaactgtggaactgaatgggcttgctatgaaaaggggagagcctgccatctacaggccattagatccaaagccattcccaaattatagagctaattacaactttcggggcatgtacaatcagaggtatcattgcccagtgcctaagatcttttatgttcagctcactgtaggaaataatgaattttttggggaaggaaagactcgacaagctgctagacacaatgctgcaatgaaagccctccaagcactgcagaatgaacctattccagaaagatctcctcagaatggtgaatcaggaaaggatgtggatgatgacaaagatgcaaataagtctgagatcagcttagtgtttgaaattgctctgaagcgaaatatgcctgtcagttttgaggttattaaagaaagtggaccaccacatatg

SEQ ID NO: 30080 - DNA, 550 bp, Homo sapiens
  source 1..550: mol_type = unassigned DNA
agttctctgtagtgtttgccaatgttggagccgtctgcaaagtgtccccggcaagaagagacgattttgccgtgttcgccaggctagtctcgaactcctgacctcaggtgatccgtccgcctcagactccaaaagtgctgggattacaggcgtgagccaccacacccagctgaggaggtggattttatgaaaccaaagaggctgcctaccacaaggactttagcttactttttaaagattgaagaaaaaaaagaagacagaaaaagaagaactcaaagatacacaaagtaatttgaaccaaggctcagaagtttttggagccgtgagggatacagcagtttggtcaatattgtcttaacatgcttcaaataaatcagatgttctcagtgcagctgagtcttggtgagcagacatgggaatccgaaggcagcagtataaagaaggctcagcaggctgttgccaataaagctttgactgaatctacgcttcccaaaccagttcagaagccacccaaaagtaatgttaacaataacccaggcagtataactcc

SEQ ID NO: 30081 - DNA, 2173 bp, Homo sapiens
  source 1..2173: mol_type = unassigned DNA
actcttgcctcataaatctaggattcagggcattgttttcaatggttctcatttttggctccaaggattctttttcatgtgactaatattttcggtagaagaggaggtctggccacgccgcgggtcttggcgagcaggtgatcacggatccctggtgtttgctgggcgagacggtgaagcaacctcctccccgccccctcccccgtctagaaaggtgcaagatccgctaaaccgtgcgttgcacagcggcggccggagcagacgcgggatggtcgcgcgtcccctgcacagcacagaggggcagccggagagcctgggaaagtttttggagccgtgagggatacagcagtttggtcaatattgtcttaacatgcttcaaataaatcagatgttctcagtgcagctgagtcttggtgagcagacatgggaatccgaaggcagcagtataaagaaggctcagcaggctgttgccaataaagctttgactgaatctacgcttcccaaaccagttcagaagccacccaaaagtaatgttaacaataacccaggcagtataactccaactgtggaactgaatgggcttgctatgaaaaggggagagcctgccatctacaggccattagatccaaagccattcccaaattatagagctaattacaactttcggggcatgtacaatcagaggtatcattgcccagtgcctaagatcttttatgttcagctcactgtaggaaataatgaattttttggggaaggaaagactcgacaagctgctagacacaatgctgcaatgaaagccctccaagcactgcagaatgaacctattccagaaagatctcctcagaatggtgaatcaggaaaggatgtggatgatgacaaagatgcaaataagtctgagatcagcttagtgtttgaaattgctctgaagcgaaatatgcctgtcagttttgaggttattaaagaaagtggaccaccacatatgaaaagctttgttactcgagtgtcagtaggagagttctctgcagaaggagaaggaaatagcaaaaaactctccaagaagcgcgctgcgaccaccgtcttacaggagcttaaaaaacttccacctcttcctgtggtggaaaagccaaaactattttttaaaaaacgccctaaaacaatagtaaaggccggaccagaatatggccaagggatgaaccctattagccgcctggcgcaaattcaacaggccaaaaaggaaaaggagccggattatgttttgctttcagaaagaggaatgcctcgacgtcgagaatttgtgatgcaggtgaaggtaggcaatgaagttgctacaggaacaggacctaataaaaagatagccaaaaaaaatgctgcagaagcaatgctgttacaacttggttataaagcatccactaatcttcaggatcaacttgagaagacaggggaaaacaaaggatggagtggtccaaagcctgggtttcctgaaccaacaaataatactccaaaaggaattcttcatttgtctcctgatgtttatcaagagatggaagccagccgccacaaagtaatctctggcactactctaggctatttgtcacccaaagatatgaaccaaccttcaagctctttcttcagtatatctcccacatcgaatagttcagctacaattgccagggaactccttatgaatggaacatcttctacagctgaagccataggtttaaaaggaagttctcctactcccccttgttctccagtacaaccttcaaaacaactggaatatttagcaaggattcaaggctttcaggtatgaattaaaagcaaaaacaaaaaacaaaacaattcattagcctcagattcttcatctgtatacatcacaaggctcattcttgcctgctagtatggcctacatgccacttacgttttaagttatttaggaacacaaaggacagacaaaaaagccatatgcacatgcctcattttctcttatttttgatctatctagtaattcttttgctgcctgtctcttctccattttccttcttcttttttaagcatttttcatattcttcactgtcttctatttggtcttgattaggtgcatctatctcttcgctctgtcttccacaaacaaaaattctgccttcagacatttggtgttagtatttcacactca

SEQ ID NO: 30082 - DNA, 2646 bp, Homo sapiens
  source 1..2646: mol_type = unassigned DNA
agcagtttggtcaatattgtcttaacatgcttcaaataaatcagatgttctcagtgcagctgagtcttggtgagcagacatgggaatccgaaggcagcagtataaagaaggctcagcaggctgttgccaataaagctttgactgaatctacgcttcccaaaccagttcagaagccacccaaaagtaatgttaacaataacccaggcagtataactccaactgtggaactgaatgggcttgctatgaaaaggggagagcctgccatctacaggccattagatccaaagccattcccaaattatagagctaattacaactttcggggcatgtacaatcagaggtatcattgcccagtgcctaagatcttttatgttcagctcactgtaggaaataatgaattttttggggaaggaaagactcgacaagctgctagacacaatgctgcaatgaaagccctccaagcactgcagaatgaacctattccagaaagatctcctcagaatggtgaatcaggaaaggatgtggatgatgacaaagatgcaaataagtctgagatcagcttagtgtttgaaattgctctgaagcgaaatatgcctgtcagttttgaggttattaaagaaagtggaccaccacatatgaaaagctttgttactcgagtgtcagtaggagagttctctgcagaaggagaaggaaatagcaaaaaactctccaagaagcgcgctgcgaccaccgtcttacaggagcttaaaaaacttccacctcttcctgtggtggaaaagccaaaactattttttaaaaaacgccctaaaacaatagtaaaggccggaccagaatatggccaagggatgaaccctattagccgcctggcgcaaattcaacaggccaaaaaggaaaaggagccggattatgttttgctttcagaaagaggaatgcctcgacgtcgagaatttgtgatgcaggtgaaggtaggcaatgaagttgctacaggaacaggacctaataaaaagatagccaaaaaaaatgctgcagaagcaatgctgttacaacttggttataaagcatccactaatcttcaggatcaacttgagaagacaggggaaaacaaaggatggagtggtccaaagcctgggtttcctgaaccaacaaataatactccaaaaggaattcttcatttgtctcctgatgtttatcaagagatggaagccagccgccacaaagtaatctctggcactactctaggctatttgtcacccaaagatatgaaccaaccttcaagctctttcttcagtatatctcccacatcgaatagttcagctacaattgccagggaactccttatgaatggaacatcttctacagctgaagccataggtttaaaaggaagttctcctactcccccttgttctccagtacaaccttcaaaacaactggaatatttagcaaggattcaaggctttcaggcagccttaagtgccttgaaacaattttctgaacaaggactggatccaatcgatggagcaatgaatatcgaaaaaggttctcttgaaaaacaagccaagcatctgagagagaaagcggacaataaccaggcacccccgggctccatcgctcaggactgcaagaaatcaaactcggccgtctagcagctcccagaacccgcggctgccaccgcatccttataaacctgtcagcacgcatgagggtgtctgtgttcagggaaatgaatgactaataccattatttgagtcttatgtgaagacaacactattctaacacgagagataatatacatggtactgtttattcaactggggaaaaataaaactttgagcatttcccttggaactcgagatcagatcataactcatttgcctagaggcagcagaaatctgatcctgctactggagcttaaaataacaagtaaagaaaagtgttagaaacaaagctaaaattttaacatgattaataatagagaagttgggtttggttctgttgttatgattgttttgtcgtggtgcttgtgttcagttatattctctctctctctcatttcaaatactgcttgacaattcgaaaatgaaccaatgatgtgctgtggaatgtgatggttgtcttcatatagagtcacatggtttctctttttatgcagatatttataatcttcatcctatatcagtaggaataactataaggtgcactacaaaaagatgtatgcaaacaaacatgttttaaatcaggtcagatatctgatgaaaaatacgaactaatgttaagagcaagtagtttcaacatactccaggaactgagaaacaaaacaaagcaattgtgggttttgagctccatatactcttagcaagtaagggggcgtcttgcccctatatatcatcttcccggattccactccctgttgtgggaatcgcgcccacccccatccgtgtgttgtagccactcacggtttgcatcaagagtgttttttgtaactgcctctggacttgggacagtgagtaggatcaaaaataaataatgtacatgacggggaagggaaaaacctgttggagttgcttccagccagccacgctccgggccagcatgttggaatccagcgtggagcagatgcagtaaaaatgtggttggtttctgtgtgaa

SEQ ID NO: 30083 - DNA, 2173 bp, Homo sapiens
  source 1..2173: mol_type = unassigned DNA
agttctctgtagtgtttgccaatgttggagccgtctgcaaagtgtccccggcaagaagaggctgcctaccacaaggactttagcttactttttaaagattgaagaaaaaaaagaagacagaaaaagaagaactcaaagatacacaaagtaatttgaaccaaggctcagaagtttttggagccgtgagggatacagcagtttggtcaatattgtcttaacatgcttcaaataaatcagatgttctcagtgcagctgagtcttggtgagcagacatgggaatccgaaggcagcagtataaagaaggctcagcaggctgttgccaataaagctttgactgaatctacgcttcccaaaccagttcagaagccacccaaaagtaatgttaacaataacccaggcagtataactccaactgtggaactgaatgggcttgctatgaaaaggggagagcctgccatctacaggccattagatccaaagccattcccaaattatagagctaattacaactttcggggcatgtacaatcagagatgaagagttacctaagtcagtgttataagatgttccatggtaaaagggatttgaagacaaattttggaaatgctgcatactgtatctctcttgaagactcctaaaggtgtcatgaagaaaactgtttacctaagtggttcctaacactgactgaacatcaggctttcctgggcagctttaaaaattctgatgcccagactttatgtggactaattaaatcagaatttctggttgcagagcttgaaccgcactgttttttaaaacttccccaagtaattctatgtccagtcatttaaatactggtccccacaacccaaaacacattaccctctattaacatcaaagattatgagatggtttgaatagtcatagaacttttgaaagaagtaaagaagaagggaagaattacagttaaccacactccttaaggataattgttctggacagctagcttccccacattgctgagggttcacttttttttggaacctaaaactttacttagttcagtaattttggatagaaatatttctaaaagttatggcatatattttttatatccttaaatagaaaatgccacaattcttagcatgaagaatccttgctgttgactcattatcaaccttataaacaataagtattacaagcctcatgagatatgtacatggtttgtccttataccagataatcctagacatctgtttctagagtacccaagtgtgcttttagttactttccaaatcattgttgtcagtcagattgtcatcttatttcttgtttttgtcagtgcacctttgcatattgcttgctcctttctttgatgcttttcaattgctattatcttgaaaaccgatattattgtttgaatttggggcaaagtaagagtagcagggctttaattacgccctaagatgtccccttaactgtggaaaacatcgagttttatctagttggtgaatttttttacttcagaatttatttttttctgtcataaattttgctaaggatctgcattttgagtagaatgaagtggccagatagttgaataatggtttggtgaatatctatatgtatatatgtatgtgtatgtgtgttacacatacatatttaatgacatgaagtactttggttgcttggaattggacagaaataacagtttttttttttttttgggacagagtcttgctctgtcacctaggctggagtgcaatggcgcgatctctgctcactgcaacttccacctcccaggttcaagtgattctcctgccgcagcctcccgagtagctgggattgcaggcgcctgccagcatgcccgccagcacgcctggctaatttttttttttgtatttttagtagagatggggtttcactatgttggccaggctggtcttggaactcctgatctcgtgatctgtgtgccttggcctcccaaagtgctgggattacaggcgtgagccaccgcgcctggccagaaataacagttttaataaatttcatgaaatcactttcttgtatgttaaaggaaacagaaagggttcatttgtgcatggtttagtctttcttttgaatgtggaagtttttcttcttatttgtgtgtctaaaaaaattaaaaagtgaaacattttccaaaatgagaaga

SEQ ID NO: 30084 - DNA, 3065 bp, Homo sapiens
  source 1..3065: mol_type = unassigned DNA
agggcgcggcgggagcgccggggaggcgggcggaggcgggcggaggcggggggcggggagcccgaggggtggaagccggcggcggccgagcggggtcagttctctgtagtgtttgccaatgttggagccgtctgcaaagtgtccccggcaagaagaggctgcctaccacaaggactttagcttactttttaaagattgaagaaaaaaaagaagacagaaaaagaagaactcaaagatacacaaagtaatttgaaccaaggctcagaagtttttggagccgtgagggatacagcagtttggtcaatattgtcttaacatgcttcaaataaatcagcttctctccaagataaaatggcaaacccaaaagagaaaactgcaatgtgtctggtaaatgagttagcccgtttcaatagagtccaaccccagtataaacttctgaatgaaagagggcctgctcattcaaagatgttctcagtgcagctgagtcttggtgagcagacatgggaatccgaaggcagcagtataaagaaggctcagcaggctgttgccaataaagctttgactgaatctacgcttcccaaaccagttcagaagccacccaaaagtaatgttaacaataacccaggcagtataactccaactgtggaactgaatgggcttgctatgaaaaggggagagcctgccatctacaggccattagatccaaagccattcccaaattatagagctaattacaactttcggggcatgtacaatcagaggtatcattgcccagtgcctaagatcttttatgttcagctcactgtaggaaataatgaattttttggggaaggaaagactcgacaagctgctagacacaatgctgcaatgaaagccctccaagcactgcagaatgaacctattccagaaagatctcctcagaatggtgaatcaggaaaggatgtggatgatgacaaagatgcaaataagtctgagatcagcttagtgtttgaaattgctctgaagcgaaatatgcctgtcagttttgaggttattaaagaaagtggaccaccacatatgaaaagctttgttactcgagtgtcagtaggagagttctctgcagaaggagaaggaaatagcaaaaaactctccaagaagcgcgctgcgaccaccgtcttacaggagcttaaaaaacttccacctcttcctgtggtggaaaagccaaaactattttttaaaaaacgccctaaaacaatagtaaaggccggaccagaatatggccaagggatgaaccctattagccgcctggcgcaaattcaacaggccaaaaaggaaaaggagccggattatgttttgctttcagaaagaggaatgcctcgacgtcgagaatttgtgatgcaggtgaaggtaggcaatgaagttgctacaggaacaggacctaataaaaagatagccaaaaaaaatgctgcagaagcaatgctgttacaacttggttataaagcatccactaatcttcaggatcaacttgagaagacaggggaaaacaaaggatggagtggtccaaagcctgggtttcctgaaccaacaaataatactccaaaaggaattcttcatttgtctcctgatgtttatcaagagatggaagccagccgccacaaagtaatctctggcactactctaggctatttgtcacccaaagatatgaaccaaccttcaagctctttcttcagtatatctcccacatcgaatagttcagctacaattgccagggaactccttatgaatggaacatcttctacagctgaagccataggtttaaaaggaagttctcctactcccccttgttctccagtacaaccttcaaaacaactggaatatttagcaaggattcaaggctttcaggcagccttaagtgccttgaaacaattttctgaacaaggactggatccaatcgatggagcaatgaatatcgaaaaaggttctcttgaaaaacaagccaagcatctgagagagaaagcggacaataaccaggcacccccgggctccatcgctcaggactgcaagaaatcaaactcggccgtctagcagctcccagaacccgcggctgccaccgcatccttataaacctgtcagcacgcatgagggtgtctgtgttcagggaaatgaatgactaataccattatttgagtcttatgtgaagacaacactattctaacacgagagataatatacatggtactgtttattcaactggggaaaaataaaactttgagcatttcccttggaactcgagatcagatcataactcatttgcctagaggcagcagaaatctgatcctgctactggagcttaaaataacaagtaaagaaaagtgttagaaacaaagctaaaattttaacatgattaataatagagaagttgggtttggttctgttgttatgattgttttgtcgtggtgcttgtgttcagttatattctctctctctctcatttcaaatactgcttgacaattcgaaaatgaaccaatgatgtgctgtggaatgtgatggttgtcttcatatagagtcacatggtttctctttttatgcagatatttataatcttcatcctatatcagtaggaataactataaggtgcactacaaaaagatgtatgcaaacaaacatgttttaaatcaggtcagatatctgatgaaaaatacgaactaatgttaagagcaagtagtttcaacatactccaggaactgagaaacaaaacaaagcaattgtgggttttgagctccatatactcttagcaagtaagggggcgtcttgcccctatatatcatcttcccggattccactccctgttgtgggaatcgcgcccacccccatccgtgtgttgtagccactcacggtttgcatcaagagtgttttttgtaactgcctctggacttgggacagtgagtaggatcaaaaataaataatgtacatgacggggaagggaaaaacctgttggagttgcttccagccagccacgctccgggccagcatgttggaatccagcgtggagcagatgcagtaaaaatgtggttggtttctgtgtg

SEQ ID NO: 30085 - DNA, 2485 bp, Homo sapiens
  source 1..2485: mol_type = unassigned DNA
agtctcctcaccaatgatgcgagctcagagtcaatagcatccttctctaaacaggaggtcatgagtagctttctgccagagggagggtgttacgagctgctcactgtgataggcaaaggatttgaggacctgatgactgtgaatctagcaaggtacaaaccaacaggagagtacgtgactgtacggaggattaacctagaagcttgttccaatgagatggtaacattcttgcagggcgagctgcatgtctccaaactcttcaaccatcccaatatcgtgccatatcgagccacttttattgcagacaatgagctgtgggttgtcacatcattcatggcatacggttctgcaaaagatctcatctgtacacacttcatggatggcatgaatgagctggcgattgcttacatcctgcagggggtgctgaaggccctcgactacatccaccacatgggatatgtacacaggagtgtcaaagccagccacatcctgatctctgtggatgggaaggtctacctgtctggtttgcgcagcaacctcagcatgataagccatgggcagcggcagcgagtggtccacgattttcccaagtacagtgtcaaggttctgccgtggctcagccccgaggtcctccagcagaatctccagggttatgatgccaagtctgacatctacagtgtgggaatcacagcctgtgaactggccaacggccatgtcccctttaaggatatgcctgccacccagatgctgctagagaaactgaacggcacagtgccctgcctgttggataccagcaccatccccgctgaggagctgaccatgagcccttcgcgctcagtggccaactctggcctgagtgacagcctgaccaccagcaccccccggccctccaacggtgactcgccctcccacccctaccaccgaaccttctccccccacttccaccactttgtggagcagtgccttcagcgcaacccggatgccaggtatccctgctggcctgggcctgggcttcgggagagcagagggtgctcaggagggtaaggccagggtgtgaagggacttacctcccaaaggttctgcaggggaatctggagctacacacaggagggatcagctcctgggtgtgtcagaggccagcctggggagctctggccactgcttcccatgagctgagggagagggagaggggacccgaggctgaggcataagtggcaggatttcgggaagctggggacacggcagtgatgctgcggtctctcctcccctttccctccaggcccagtgccagcaccctcctgaaccactctttcttcaagcaggtatcgtagccccttcgttctggttctggttctagttctggttctaacaactcacaatccctttagctttctctcccctccctttgaatgagagaaactaccccgcttccgaagcccctgaaagacactgctccttcctctcatggagttggctccgacagcccgtctgccaccaggccatggttccttgccccatggtgtcctgggacccagagcaacaggatctgtcacccacctctctcttctcccccagatcaagcgacgtgcctcagaggctttgcccgaattgcttcgtcctgtcacccccatcaccaattttgagggcagccagtctcaggaccacagtggaatctttggcctggtaacaaacctggaagagctggaggtggacgattgggagttctgagcctctgcaaactgtgcgcattctccagccagggatgcagaggccacccagaggcccttcctgagggccggccacattcccgccctcctgggcagattgggtagaaaggacattcttccaggaaagttgactgctgactgattgggaaagaaaatcctggagagacacttcactgctccaaggcttttgagacacaagggaatctcaacaaccagggatcaggagggtccaaagccgacattcccagtcctgtgagctcaggtgacctcctccgcagaagagagatgctgctctggccctgggagctgaattccaagcccagggtttggctccttaaacccgaggaccgccacctcttcccagtgcttgcgaccagcctcattctatttaactttgctctcagatgcctcagatgctataggtcagtgaaagggcaagtagtaagctgcctgcctcccttccctcagacctctccctcataattccagagaagggcatttctgtctttttaagcacagactaaggctggaacagtccatccttatccctcttctggcttgggccctgacacctaagtctttcccacggtttatgtgtgtgcctcattcctttcccaccaagaatccatcttagcgcctcctgccagctgccctggtgctttctccaagggccatcagtgtcttgcctagcttgagggcttaagtccttatgctgtgttagtttcgttgtcagaacaaattaaaattttcagagacgc

SEQ ID NO: 30086 - DNA, 2333 bp, Homo sapiens
  source 1..2333: mol_type = unassigned DNA
cggcgcggcggcggctgctagggcctgccgcagccgcggccactcggaaagggcgggacttccccgcagggcggggtggggcggagcgctctatcagtcctcccggtcgccccactgcgcatggcacgttgcgtactcccctcccagcaaccggtctggcggcggcgcggcagtaaaactgaggaggcggagccaagacggtcggggctgcttgctaactccaggaacaggtttaagtttttgaaactgaagtaggcctacacagtaggaactcatgtcatttcttgtaagtaaaccagagcgaatcaggcggtgggtctcggaaaagttcattgttgagggcttaagagatttggaactatttggagagcagcctccgggtgacactcggagaaaaaccaatgatgcgagctcagagtcaatagcatccttctctaaacaggaggtcatgagtagctttctgccagagggagggtgttacgagctgctcactgtgataggcaaaggatttgaggacctgatgactgtgaatctagcaaggtacaaaccaacaggagagtacgtgactgtacggaggattaacctagaagcttgttccaatgagatggtaacattcttgcagggcgagctgcatgtctccaaactcttcaaccatcccaatatcgtgccatatcgagccacttttattgcagacaatgagctgtgggttgtcacatcattcatggcatacggttctgcaaaagatctcatctgtacacacttcatggatggcatgaatgagctggcgattgcttacatcctgcagggggtgctgaaggccctcgactacatccaccacatgggatatgtacacaggagtgtcaaagccagccacatcctgatctctgtggatgggaaggtctacctgtctggtttgcgcagcaacctcagcatgataagccatgggcagcggcagcgagtggtccacgattttcccaagtacagtgtcaaggttctgccgtggctcagccccgaggtcctccagcagaatctccagggttatgatgccaagtctgacatctacagtgtgggaatcacagcctgtgaactggccaacggccatgtcccctttaaggatatgcctgccacccagatgctgctagagaaactgaacggcacagtgccctgcctgttggataccagcaccatccccgctgaggagctgaccatgagcccttcgcgctcagtggccaactctggcctgagtgacagcctgaccaccagcaccccccggccctccaacggtgactcgccctcccacccctaccaccgaaccttctccccccacttccaccactttgtggagcagtgccttcagcgcaacccggatgccaggcccagtgccagcaccctcctgaaccactctttcttcaagcagatcaagcgacgtgcctcagaggctttgcccgaattgcttcgtcctgtcacccccatcaccaattttgagggcagccagtctcaggaccacagtggaatctttggcctggtaacaaacctggaagagctggaggtggacgattgggagttctgagcctctgcaaactgtgcgcattctccagccagggatgcagaggccacccagaggcccttcctgagggccggccacattcccgccctcctgggcagattgggtagaaaggacattcttccaggaaagttgactgctgactgattgggaaagaaaatcctggagagacacttcactgctccaaggcttttgagacacaagggaatctcaacaaccagggatcaggagggtccaaagccgacattcccagtcctgtgagctcaggtgacctcctccgcagaagagagatgctgctctggccctgggagctgaattccaagcccagggtttggctccttaaacccgaggaccgccacctcttcccagtgcttgcgaccagcctcattctatttaactttgctctcagatgcctcagatgctataggtcagtgaaagggcaagtagtaagctgcctgcctcccttccctcagacctctccctcataattccagagaagggcatttctgtctttttaagcacagactaaggctggaacagtccatccttatccctcttctggcttgggccctgacacctaagtctttcccacggtttatgtgtgtgcctcattcctttcccaccaagaatccatcttagcgcctcctgccagctgccctggtgctttctccaagggccatcagtgtcttgcctagcttgagggcttaagtccttatgctgtgttagtttcgttgtcagaacaaattaaaattttcagagacgctgctgg

SEQ ID NO: 30087 - DNA, 2304 bp, Homo sapiens
  source 1..2304: mol_type = unassigned DNA
cggcgcggcggcggctgctagggcctgccgcagccgcggccactcggaaagggcgggacttccccgcagggcggggtggggcggagcgctctatcagtcctcccggtcgccccactgcgcatggcacgttgcgtactcccctcccagcaaccggtctggcggcggcgcggcagtaaaactgaggaggcggagccaagacggtcggggctgcttgctaactccaggaacaggtttaagtttttgaaactgaagtaggcctacacagtaggaactcatgtcatttcttgtaagtaaaccagagcgaatcaggcggtgggtctcggaaaagttcattgttgagggcttaagagatttggaactatttggagaccaatgatgcgagctcagagtcaatagcatccttctctaaacaggaggtcatgagtagctttctgccagagggagggtgttacgagctgctcactgtgataggcaaaggatttgaggacctgatgactgtgaatctagcaaggtacaaaccaacaggagagtacgtgactgtacggaggattaacctagaagcttgttccaatgagatggtaacattcttgcagggcgagctgcatgtctccaaactcttcaaccatcccaatatcgtgccatatcgagccacttttattgcagacaatgagctgtgggttgtcacatcattcatggcatacggttctgcaaaagatctcatctgtacacacttcatggatggcatgaatgagctggcgattgcttacatcctgcagggggtgctgaaggccctcgactacatccaccacatgggatatgtacacaggagtgtcaaagccagccacatcctgatctctgtggatgggaaggtctacctgtctggtttgcgcagcaacctcagcatgataagccatgggcagcggcagcgagtggtccacgattttcccaagtacagtgtcaaggttctgccgtggctcagccccgaggtcctccagcagaatctccagggttatgatgccaagtctgacatctacagtgtgggaatcacagcctgtgaactggccaacggccatgtcccctttaaggatatgcctgccacccagatgctgctagagaaactgaacggcacagtgccctgcctgttggataccagcaccatccccgctgaggagctgaccatgagcccttcgcgctcagtggccaactctggcctgagtgacagcctgaccaccagcaccccccggccctccaacggtgactcgccctcccacccctaccaccgaaccttctccccccacttccaccactttgtggagcagtgccttcagcgcaacccggatgccaggcccagtgccagcaccctcctgaaccactctttcttcaagcagatcaagcgacgtgcctcagaggctttgcccgaattgcttcgtcctgtcacccccatcaccaattttgagggcagccagtctcaggaccacagtggaatctttggcctggtaacaaacctggaagagctggaggtggacgattgggagttctgagcctctgcaaactgtgcgcattctccagccagggatgcagaggccacccagaggcccttcctgagggccggccacattcccgccctcctgggcagattgggtagaaaggacattcttccaggaaagttgactgctgactgattgggaaagaaaatcctggagagacacttcactgctccaaggcttttgagacacaagggaatctcaacaaccagggatcaggagggtccaaagccgacattcccagtcctgtgagctcaggtgacctcctccgcagaagagagatgctgctctggccctgggagctgaattccaagcccagggtttggctccttaaacccgaggaccgccacctcttcccagtgcttgcgaccagcctcattctatttaactttgctctcagatgcctcagatgctataggtcagtgaaagggcaagtagtaagctgcctgcctcccttccctcagacctctccctcataattccagagaagggcatttctgtctttttaagcacagactaaggctggaacagtccatccttatccctcttctggcttgggccctgacacctaagtctttcccacggtttatgtgtgtgcctcattcctttcccaccaagaatccatcttagcgcctcctgccagctgccctggtgctttctccaagggccatcagtgtcttgcctagcttgagggcttaagtccttatgctgtgttagtttcgttgtcagaacaaattaaaattttcagagacgctgctgg

SEQ ID NO: 30088 - DNA, 2768 bp, Homo sapiens
  source 1..2768: mol_type = unassigned DNA
cggcgcggcggcggctgctagggcctgccgcagccgcggccactcggaaagggcgggacttccccgcagggcggggtggggcggagcgctctatcagtcctcccggtcgccccactgcgcatggcacgttgcgtactcccctcccagcaaccggtctggcggcggcgcggcagtaaaactgaggaggcggagccaagacggtcggggctgcttgctaactccaggaacaggtttaagtttttgaaactgaagtaggcctacacagtaggaactcatgtcatttcttaccaatgatgcgagctcagagtcaatagcatccttctctaaacaggaggtcatgagtagctttctgccagagggagggtgttacgagctgctcactgtgataggcaaaggatttgaggacctgatgactgtgaatctagcaaggtacaaaccaacaggagagtacgtgactgtacggaggattaacctagaagcttgttccaatgagatggtaacattcttgcagggcgagctgcatgtctccaaactcttcaaccatcccaatatcgtgccatatcgagccacttttattgcagacaatgagctgtgggttgtcacatcattcatggcatacggttctgcaaaagatctcatctgtacacacttcatggatggcatgaatgagctggcgattgcttacatcctgcagggggtgctgaaggccctcgactacatccaccacatgggatatgtacacaggagtgtcaaagccagccacatcctgatctctgtggatgggaaggtctacctgtctggtttgcgcagcaacctcagcatgataagccatgggcagcggcagcgagtggtccacgattttcccaagtacagtgtcaaggttctgccgtggctcagccccgaggtcctccagcagaatctccagggttatgatgccaagtctgacatctacagtgtgggaatcacagcctgtgaactggccaacggccatgtcccctttaaggatatgcctgccacccagatgctgctagagaaactgaacggcacagtgccctgcctgttggataccagcaccatccccgctgaggagctgaccatgagcccttcgcgctcagtggccaactctggcctgagtgacagcctgaccaccagcaccccccggccctccaacggtgactcgccctcccacccctaccaccgaaccttctccccccacttccaccactttgtggagcagtgccttcagcgcaacccggatgccaggtatccctgctggcctgggcctgggcttcgggagagcagagggtgctcaggagggtaaggccagggtgtgaagggacttacctcccaaaggttctgcaggggaatctggagctacacacaggagggatcagctcctgggtgtgtcagaggccagcctggggagctctggccactgcttcccatgagctgagggagagggagaggggacccgaggctgaggcataagtggcaggatttcgggaagctggggacacggcagtgatgctgcggtctctcctcccctttccctccaggcccagtgccagcaccctcctgaaccactctttcttcaagcaggtatcgtagccccttcgttctggttctggttctagttctggttctaacaactcacaatccctttagctttctctcccctccctttgaatgagagaaactaccccgcttccgaagcccctgaaagacactgctccttcctctcatggagttggctccgacagcccgtctgccaccaggccatggttccttgccccatggtgtcctgggacccagagcaacaggatctgtcacccacctctctcttctcccccagatcaagcgacgtgcctcagaggctttgcccgaattgcttcgtcctgtcacccccatcaccaattttgagggcagccagtctcaggaccacagtggaatctttggcctggtaacaaacctggaagagctggaggtggacgattgggagttctgagcctctgcaaactgtgcgcattctccagccagggatgcagaggccacccagaggcccttcctgagggccggccacattcccgccctcctgggcagattgggtagaaaggacattcttccaggaaagttgactgctgactgattgggaaagaaaatcctggagagacacttcactgctccaaggcttttgagacacaagggaatctcaacaaccagggatcaggagggtccaaagccgacattcccagtcctgtgagctcaggtgacctcctccgcagaagagagatgctgctctggccctgggagctgaattccaagcccagggtttggctccttaaacccgaggaccgccacctcttcccagtgcttgcgaccagcctcattctatttaactttgctctcagatgcctcagatgctataggtcagtgaaagggcaagtagtaagctgcctgcctcccttccctcagacctctccctcataattccagagaagggcatttctgtctttttaagcacagactaaggctggaacagtccatccttatccctcttctggcttgggccctgacacctaagtctttcccacggtttatgtgtgtgcctcattcctttcccaccaagaatccatcttagcgcctcctgccagctgccctggtgctttctccaagggccatcagtgtcttgcctagcttgagggcttaagtccttatgctgtgttagtttcgttgtcagaacaaattaaaattttcagagacgctgctgg

SEQ ID NO: 30089 - DNA, 2110 bp, Homo sapiens
  source 1..2110: mol_type = unassigned DNA
cggcgcggcggcggctgctagggcctgccgcagccgcggccactcggaaagggcgggacttccccgcagggcggggtggggcggagcgctctatcagtcctcccggtcgccccactgcgcatggcacgttgcgtactcccctcccagcaaccggtctggcggcggcgcggcagtaaaactgaggaggcggagccaagacggtcggggctgcttgctaactccaggaacaggtttaagtttttgaaactgaagtaggcctacacagtaggaactcatgtcatttcttgtaagtaaaccagagcgaatcaggcggtgggtctcggaaaagttcattgttgagggcttaagagatttggaactatttggaggcaaaggatttgaggacctgatgactgtgaatctagcaaggtacaaaccaacaggagagtacgtgactgtacggaggattaacctagaagcttgttccaatgagatggtaacattcttgcagggcgagctgcatgtctccaaactcttcaaccatcccaatatcgtgccatatcgagccacttttattgcagacaatgagctgtgggttgtcacatcattcatggcatacggttctgcaaaagatctcatctgtacacacttcatggatggcatgaatgagctggcgattgcttacatcctgcagggggtgctgaaggccctcgactacatccaccacatgggatatgtacacaggagtgtcaaagccagccacatcctgatctctgtggatgggaaggtctacctgtctggtttgcgcagcaacctcagcatgataagccatgggcagcggcagcgagtggtccacgattttcccaagtacagtgtcaaggttctgccgtggctcagccccgaggtcctccagcagaatctccagggttatgatgccaagtctgacatctacagtgtgggaatcacagcctgtgaactggccaacggccatgtcccctttaaggatatgcctgccacccagatgctgctagagaaactgaacggcacagtgccctgcctgttggataccagcaccatccccgctgaggagctgaccatgagcccttcgcgctcagtggccaactctggcctgagtgacagcctgaccaccagcaccccccggccctccaacggcccagtgccagcaccctcctgaaccactctttcttcaagcagatcaagcgacgtgcctcagaggctttgcccgaattgcttcgtcctgtcacccccatcaccaattttgagggcagccagtctcaggaccacagtggaatctttggcctggtaacaaacctggaagagctggaggtggacgattgggagttctgagcctctgcaaactgtgcgcattctccagccagggatgcagaggccacccagaggcccttcctgagggccggccacattcccgccctcctgggcagattgggtagaaaggacattcttccaggaaagttgactgctgactgattgggaaagaaaatcctggagagacacttcactgctccaaggcttttgagacacaagggaatctcaacaaccagggatcaggagggtccaaagccgacattcccagtcctgtgagctcaggtgacctcctccgcagaagagagatgctgctctggccctgggagctgaattccaagcccagggtttggctccttaaacccgaggaccgccacctcttcccagtgcttgcgaccagcctcattctatttaactttgctctcagatgcctcagatgctataggtcagtgaaagggcaagtagtaagctgcctgcctcccttccctcagacctctccctcataattccagagaagggcatttctgtctttttaagcacagactaaggctggaacagtccatccttatccctcttctggcttgggccctgacacctaagtctttcccacggtttatgtgtgtgcctcattcctttcccaccaagaatccatcttagcgcctcctgccagctgccctggtgctttctccaagggccatcagtgtcttgcctagcttgagggcttaagtccttatgctgtgttagtttcgttgtcagaacaaattaaaattttcagagacgctgctgg

SEQ ID NO: 30090 - DNA, 2293 bp, Homo sapiens
  source 1..2293: mol_type = unassigned DNA
ccccgccttctcgctgcccagccccggggagggaggcggggccgcgaccccggcgcgggtggggcgaatgcgttcccagcgggtagcctgggactggtgcagagttccaagcccacggccccggtcgcggcctcgccgccctcccgcgccccgcgccgggagcgggcctagagcgctcgcctcgcccctccgcgagcagggctctggcgcccgcccctgtccgcaccgctggcagcctgaagagagtcgctggccgtggtcgccgctaggtaggatatatctgcatcttgaaaggaagataaaacaaaagccttctttggaatagatggatttttgtcactttctgtgtgaactaaagtgattcaatgtctcttttggattgcttctgcacttcaagaacacaagttgaatcactcagacctgaaaaacagtctgaaaccagtatccatcaatacttggttgatgagccaaccctttcctggtcacgtccatccactagagccagtgaagtactatgttccaccaacgtttctcactatgagctccaagtagaaataggaagaggatttgacaacttgacttctgtccatcttgcacggcatactcccacaggaacactggtaactataaaaattacaaatctggaaaactgcaatgaagaacgcctgaaagctttacagaaagccgtgattctatcccactttttccggcatcccaatattacaacttattggacagttttcactgttggcagctggctttgggttatttctccatttatggcctatggttcagcaagtcaactcttgaggacctattttcctgaaggaatgagtgaaactttaataagaaacattctctttggagccgtgagagggttgaactatctgcaccaaaatggctgtattcacaggagtattaaagccagccatatcctcatttctggtgatggcctagtgaccctctctggcctgtcccatctgcatagtttggttaagcatggacagaggcatagggctgtgtatgatttcccacagttcagcacatcagtgcagccgtggctgagtccagaactactgagacaggatttacatgggtataatgtgaagtcagatatttacagtgttgggattacagcatgtgaattagccagtgggcaggtgcctttccaggacatgcatagaactcagatgctgttacagaaactgaaaggtcctccttatagcccattggatatcagtattttccctcaatcagaatccagaatgaaaaattcccagtcaggtgtagactctgggattggagaaagtgtgcttgtctccagtggaactcacacagtaaatagtgaccgattacacacaccatcctcaaaaactttctctcctgccttctttagcttggtacagctctgtttgcaacaagatcctgagaaaaggccatcagcaagcagtttattgtcccatgttttcttcaaacagatgaaagaagaaagccaggattcaatactttcactgttgcctcctgcttataacaagccatcaatatcattgcctccagtgttaccttggactgagccagaatgtgattttcctgatgaaaaagactcatactgggaattctagggctgccaaatcattttatgtcctatatacttgacactttctccttgctgctttttcttctgtatttctaggtacaaataccagaattatacttgaaaatacagttggtgcactggagaatctattatttaaaaccactctgttcaaaggggcaccagtttgtagtccctctgtttcgcacagagtactatgacaaggaaacatcagaattactaatctagctagtgtcatttattctggaatttttttctaagctgtgactaactctttttatctctcaatataatttttgagccagttaatttttttcagtattttgctgtcccttgggaatgggccctcagaggacagtgcttccaagtacatcttctcccagattctctggcctttttaatgagctattgttaaaccaacaggctagtttatcttacatcagacccttttctggtagagggaaaatgtttgtgctttccctttttcttctgttaatacttatggtaacacctaactgagcctcactcacattaaatgattcacttgaaatatatacagaaattgtaatttgcttttttttaaacaagggggctaaagtaacactttcctacttatgtaaattatagatcctaaattcacgcaccccgtgggagctcaataaagatttactgaattga

SEQ ID NO: 30091 - DNA, 2190 bp, Homo sapiens
  source 1..2190: mol_type = unassigned DNA
cggcctcgccgccctcccgcgccccgcgccgggagcgggcctagagcgctcgcctcgcccctccgcgagcagggctctggcgcccgcccctgtccgcaccgctggcagcctgaagagagtcgctggccgtggtcgccgctaggtaggatatatctgcatcttgaaaggaagataaaacaaaagccttctttggaatagatggatttttgtcactttctgtgtgaactaaagtgattcaatgtctcttttggattgcttctgcacttcaagaacacaagttgaatcactcagacctgaaaaacagtctgaaaccagtatccatcaatacttggttgatgagccaaccctttcctggtcacgtccatccactagagccagtgaagtactatgttccaccaacgtttctcactatgagctccaagtagaaataggaagaggatttgacaacttgacttctgtccatcttgcacggcatactcccacaggaacactggtaactataaaaattacaaatctggaaaactgcaatgaagaacgcctgaaagctttacagaaagccgtgattctatcccactttttccggcatcccaatattacaacttattggacagttttcactgttggcagctggctttgggttatttctccatttatggcctatggttcagcaagtcaactcttgaggacctattttcctgaaggaatgagtgaaactttaataagaaacattctctttggagccgtgagagggttgaactatctgcaccaaaatggctgtattcacaggagtattaaagccagccatatcctcatttctggtgatggcctagtgaccctctctggcctgtcccatctgcatagtttggttaagcatggacagaggcatagggctgtgtatgatttcccacagttcagcacatcagtgcagccgtggctgagtccagaactactgagacaggatttacatgggtataatgtgaagtcagatatttacagtgttgggattacagcatgtgaattagccagtgggcaggtgcctttccaggacatgcatagaactcagatgctgttacagaaactgaaaggtcctccttatagcccattggatatcagtattttccctcaatcagaatccagaatgaaaaattcccagtcaggtgtagactctgggattggagaaagtgtgcttgtctccagtggaactcacacagtaaatagtgaccgattacacacaccatcctcaaaaactttctctcctgccttctttagcttggtacagctctgtttgcaacaagatcctgagaaaaggccatcagcaagcagtttattgtcccatgttttcttcaaacagccttattttgagtttctttaacagatgaaagaagaaagccaggattcaatactttcactgttgcctcctgcttataacaagccatcaatatcattgcctccagtgttaccttggactgagccagaatgtgattttcctgatgaaaaagactcatactgggaattctagggctgccaaatcattttatgtcctatatacttgacactttctccttgctgctttttcttctgtatttctaggtacaaataccagaattatacttgaaaatacagttggtgcactggagaatctattatttaaaaccactctgttcaaaggggcaccagtttgtagtccctctgtttcgcacagagtactatgacaaggaaacatcagaattactaatctagctagtgtcatttattctggaatttttttctaagctgtgactaactctttttatctctcaatataatttttgagccagttaatttttttcagtattttgctgtcccttgggaatgggccctcagaggacagtgcttccaagtacatcttctcccagattctctggcctttttaatgagctattgttaaaccaacaggctagtttatcttacatcagacccttttctggtagagggaaaatgtttgtgctttccctttttcttctgttaatacttatggtaacacctaactgagcctcactcacattaaatgattcacttgaaatatatacagaaattgtaatttgcttttttttaaacaagggggctaaagtaacactttcctacttatgtaaattatagatcctaaattcacgcaccccgtgggagctcaataaagatttactgaattga

SEQ ID NO: 30092 - DNA, 1519 bp, Homo sapiens
  source 1..1519: mol_type = unassigned DNA
cttggctattgttcagcaagtcaactcttgaggacctattttcctgaaggaatgagtgaaactttaataagaaacattctctttggagccgtgagagggttgaactatctgcaccaaaatggctgtattcacaggagtattaaagccagccatatcctcatttctggtgatggcctagtgaccctctctggcctgtcccatctgcatagtttggttaagcatggacagaggcatagggctgtgtatgatttcccacagttcagcacatcagtgcagccgtggctgagtccagaactactgagacaggatttacatgggtataatgtgaagtcagatatttacagtgttgggattacagcatgtgaattagccagtgggcaggtgcctttccaggacatgcatagaactcagatgctgttacagaaactgaaaggtcctccttatagcccattggatatcagtattttccctcaatcagaatccagaatgaaaaattcccagtcaggtgtagactctgggattggagaaagtgtgcttgtctccagtggaactcacacagtaaatagtgaccgattacacacaccatcctcaaaaactttctctcctgccttctttagcttggtacagctctgtttgcaacaagatcctgagaaaaggccatcagcaagcagtttattgtcccatgttttcttcaaacagatgaaagaagaaagccaggattcaatactttcactgttgcctcctgcttataacaagccatcaatatcattgcctccagtgttaccttggactgagccagaatgtgattttcctgatgaaaaagactcatactgggaattctagggctgccaaatcattttatgtcctatatacttgacactttctccttgctgctttttcttctgtatttctaggtacaaataccagaattatacttgaaaatacagttggtgcactggagaatctattatttaaaaccactctgttcaaaggggcaccagtttgtagtccctctgtttcgcacagagtactatgacaaggaaacatcagaattactaatctagctagtgtcatttattctggaatttttttctaagctgtgactaactctttttatctctcaatataatttttgagccagttaatttttttcagtattttgctgtcccttgggaatgggccctcagaggacagtgcttccaagtacatcttctcccagattctctggcctttttaatgagctattgttaaaccaacaggctagtttatcttacatcagacccttttctggtagagggaaaatgtttgtgctttccctttttcttctgttaatacttatggtaacacctaactgagcctcactcacattaaatgattcacttgaaatatatacagaaattgtaatttgcttttttttaaacaagggggctaaagtaacactttcctacttatgtaaattatagatcctaaattcacgcaccccgtgggagctcaataaagatttactgaattgagttta

SEQ ID NO: 30093 - DNA, 1974 bp, Homo sapiens
  source 1..1974: mol_type = unassigned DNA
gaatgcgttcccagcgggtagcctgggactggtgcagagttccaagcccacggccccggtcgcggcctcgccgccctcccctgtccgcaccgctggcagcctgaagagagtcgctggccgtggtcgccgctaggtaggatatatctgcatcttgaaaggaagataaaacaaaagccttctttggaatagatggatttttgtcactttctgtgtgaactaaagtgattcaatgtctcttttggattgcttctgcacttcaagaacacaagttgaatcactcagacctgaaaaacagtctgaaaccagtatccatcaatacttggttgatgagccaaccctttcctggtcacgtccatccactagagccagtgaagtactatgttccaccaacgtttctcactatgagctccaagtagaaataggaagaggatttgacaacttgacttctgtccatcttgcacggcatactcccacaggaacactggtaactataaaaattacaaatctggaaaactgcaatgaagaacgcctgaaagctttacagaaagccgtgattctatcccactttttccggcatcccaatattacaacttattggacagttttcactgttggcagctggctttgggttatttctccatttatggcctatggttcagcaagtcaactcttgaggacctattttcctgaaggaatgagtgaaactttaataagaaacattctctttggagccgtgagagggttgaactatctgcaccaaaatggctgtattcacaggagtattaaagccagccatatcctcatttctggtgatggcctagtgaccctctctggcctgtcccatctgcatagtttggttaagcatggacagaggcatagggctgtgtatgatttcccacagttcagcacatcagtgcagccgtggctgagtccagaactactgagacaggatttacatgggtataatgtgaagtcagatatttacagtgttgggattacagcatgtgaattagccagtgggcaggtgcctttccaggacatgcatagaactcagatgctgttacagaaactgaaaggtcctccttatagcccattggatatcagtattttccctcaatcagaatccagaatgaaaaattcccagtcaggtgtagactctgggattggagaaagtgtgcttgtctccagtggaactcacacagtaaatagtgaccgattacacacaccatcctcaaaaactttctctcctgccttctttagcttggtacagctctgtttgcaacaagatcctgagaaaaggccatcagcaagcagtttattgtcccatgttttcttcaaacagatgaaagaagaaagccaggattcaatactttcactgttgcctcctgcttataacaagccatcaatatcattgcctccagtgttaccttggactgagccagaatgtgattttcctgatgaaaaagactcatactgggaattctagggctgccaaatcattttatgtcctatatacttgacactttctccttgctgctttttcttctgtatttctaggtacaaataccagaattatacttgaaaatacagttggtgcactggagaatctattatttaaaaccactctgttcaaaggggcaccagtttgtagtccctctgtttcgcacagagtactatgacaaggaaacatcagaattactaatctagctagtgtcatttattctggaatttttttctaagctgtgactaactctttttatctctcaatataatttttgagccagttaatttttttcagtattttgctgtcccttgggaatgggccctcagaggacagtgcttccaagtacatcttctcccagattctctggcctttttaatgagctattgttaaaccaacaggctagtttatcttacatcagacccttttctggtagagggaaaatgtttgtgctttccctttttcttctgtta

SEQ ID NO: 30094 - DNA, 2072 bp, Homo sapiens
  source 1..2072: mol_type = unassigned DNA
gatccagcttgggtaggcggggaagcagctggagtgcgaccgccgcggcagccaccctgcaaccgccagtcggagagctaagggcaagtcctgaggttgggcccaggagaaagaaggcaaggagacattgtcccaggatattcttggtgatcttggaagtgtccgtatcatggaatcaatctctatgatgggaagccctaagagccttagtgaaacttttttacctaatggcataaatggtatcaaagatgcaaggaaggtcactgtaggtgtgattggaagtggagattttgccaaatccttgaccattcgacttattagatgcggctatcatgtggtcataggaagtagaaatcctaagtttgcttctgaattttttcctcatgtggtagatgtcactcatcatgaagatgctctcacaaaaacaaatataatatttgttgctatacacagagaacattatacctccctgtgggacctgagacatctgcttgtgggtaaaatcctgattgatgtgagcaataacatgaggataaaccagtacccagaatccaatgctgaatatttggcttcattattcccagattctttgattgtcaaaggatttaatgttgtctcagcttgggcacttcagttaggacctaaggatgccagccggcaggtttatatatgcagcaacaatattcaagcgcgacaacaggttattgaacttgcccgccagttgaatttcattcccattgacttgggatccttatcatcagccagagagattgaaaatttacccctacgactctttactctctggagagggccagtggtggtagctataagcttggccacattttttttcctttattcctttgtcagagatgtgattcatccatatgctagaaaccaacagagtgacttttacaaaattcctatagagattgtgaataaaaccttacctatagttgccattactttgctctccctagtatacctcgcaggtcttctggcagctgcttatcaactttattacggcaccaagtataggagatttccaccttggttggaaacctggttacagtgtagaaaacagcttggattactaagttttttcttcgctatggtccatgttgcctacagcctctgcttaccgatgagaaggtcagagagatatttgtttctcaacatggcttatcagcaggttcatgcaaatattgaaaactcttggaatgaggaagaagtttggagaattgaaatgtatatctcctttggcataatgagccttggcttactttccctcctggcagtcacttctatcccttcagtgagcaatgctttaaactggagagaattcagttttattcagatcttttgcagctttgcagatacccagactgagctggaactggaatttgtcttcctattgactctacttctttaaaagcggctgcccattacattcctcagctgtccttgcagttaggtgtacatgtgactgagtgttggccagtgagatgaagtctcctcaaaggaaggcagcatgtgtcctttttcatcccttcatcttgctgctgggattgtggatataacaggagccctggcagctgtctccagaggatcaaagccacacccaaagagtaaggcagattagagaccagaaagaccttgactacttccctacttccactgctttttcctgcatttaagccattgtaaatctgggtgtgttacatgaagtgaaaattaattctttctgcccttcagttctttatcctgataccatttaacactgtctgaattaactagactgcaataattctttcttttgaaagcttttaaaggataatgtgcaattcacattaaaattgattttccattgtcaattagttatactcattttcctgccttgatctttcattagatattttgtatctgcttggaatatattatcttctttttaactgtgtaattggtaattactaaaactctgtaatctccaaaatattgctatcaaattacacaccatgttttctatcattctcatagatctgccttataaacatttaaataaaaagtactattta

SEQ ID NO: 30095 - DNA, 6873 bp, Homo sapiens
  source 1..6873: mol_type = unassigned DNA
gccccctccgagctccccgactcctccccgcgctccacggctcttcccgactccagtcagcgttcctcgggccctcggcgccacgagctgtccgggcacgcagcccctagcggcgcgtcgctgccaagccggcctccgcgcgcctccctccttccttctcccctggctgttcgcgatccagcttgggtaggcggggaagcagctggagtgcgaccgccgcggcagccaccctgcaaccgccagtcggaggtgcagtccgtaggccctggcccccgggtgggcccttggggagtcggcgccgctcccggggagctgcaaggctcgcccctgcccggcgtggagggcgcggggggcgcggaggatattcttggtgatcttggaagtgtccgtatcatggaatcaatctctatgatgggaagccctaagagccttagtgaaacttttttacctaatggcataaatggtatcaaagatgcaaggaaggtcactgtaggtgtgattggaagtggagattttgccaaatccttgaccattcgacttattagatgcggctatcatgtggtcataggaagtagaaatcctaagtttgcttctgaattttttcctcatgtggtagatgtcactcatcatgaagatgctctcacaaaaacaaatataatatttgttgctatacacagagaacattatacctccctgtgggacctgagacatctgcttgtgggtaaaatcctgattgatgtgagcaataacatgaggataaaccagtacccagaatccaatgctgaatatttggcttcattattcccagattctttgattgtcaaaggatttaatgttgtctcagcttgggcacttcagttaggacctaaggatgccagccggcaggtttatatatgcagcaacaatattcaagcgcgacaacaggttattgaacttgcccgccagttgaatttcattcccattgacttgggatccttatcatcagccagagagattgaaaatttacccctacgactctttactctctggagagggccagtggtggtagctataagcttggccacattttttttcctttattcctttgtcagagatgtgattcatccatatgctagaaaccaacagagtgacttttacaaaattcctatagagattgtgaataaaaccttacctatagttgccattactttgctctccctagtatacctcgcaggtcttctggcagctgcttatcaactttattacggcaccaagtataggagatttccaccttggttggaaacctggttacagtgtagaaaacagcttggattactaagttttttcttcgctatggtccatgttgcctacagcctctgcttaccgatgagaaggtcagagagatatttgtttctcaacatggcttatcagcaggttcatgcaaatattgaaaactcttggaatgaggaagaagtttggagaattgaaatgtatatctcctttggcataatgagccttggcttactttccctcctggcagtcacttctatcccttcagtgagcaatgctttaaactggagagaattcagttttattcagtctacacttggatatgtcgctctgctcataagtactttccatgttttaatttatggatggaaacgagcttttgaggaagagtactacagattttatacaccaccaaactttgttcttgctcttgttttgccctcaattgtaattctgggtaagattattttattccttccatgtataagccgaaagctaaaacgaattaaaaaaggctgggaaaagagccaatttctggaagaaggtatgggaggaacaattcctcatgtctccccggagagggtcacagtaatgtgatgacaaatggtgttcacagctgccatataaagttctactcatgccattatttttatgacttctacgttcagttacaagtatgctgtcaaattatcgtgggttgaaacttgttaaatgagatttcaactgacttagtgatagagttttcttcaagttaattttcacaaatgtcatgtttgccaatatgaatttttctagtcaacatattattgtaatttaggtatgttttgttttgttttgcacaactgtaaccctgttgttactttatatttcataatcaggcaaaaatacttacagttaataatatagatataatgttaaaaacaatttgcaaaccagcagaattttaagcttttaaaataattcaatggatatacatttttttctgaagattaagattttaattattcaacttaaaaagtagaaatgcattattatacatttttttaagaaaggacacgttatgttagcatctaggtaaggctgcatgatagcattcctatatttctctcataaaataggatttgaaggatgaaattaattgtatgaagcaatgtgattatatgaagagacacaaattaaaaagacaaattaaacctgaaattatatttaaaatatatttgagacatgaaatacatactgataatacatacctcatgaaagattttattctttattgtgttacagagcagtttcattttcatattaatatactgatcaggaagaggattcagtaacatttggcttccaaaactgctatctctaatacggtaccaatcctaggaactgtatactagttcctacttagaacaaaagtatcaagtttgcacacaagtaatctgccagctgacctttgtcgcaccttaaccagtcaccacttgctatggtataggattatactgatgttctttgagggattctgatgtgctaggcatggttctaagtactttacttgtattatcccatttaatacttagaacaaccccgtgagataagtagttattatcctcattttacacatgagggaccgaaggatagaaaagttatttttcaaaggtcttgcagttaataaatggcagagtgagcattcaagtccaggtagtcatattccagaggccacggttttaaccactaggctctagagctcccgccgcgcccctatgcattatgttcacaatgccaatctagatgcttcctcttttgtataaagtcactgacattctttagagtgggttgggtgcatccaaaaatgtataaaaatattattataataaacttattactgcttgtagggtaattcacagttacttaccctattcttgcttggaacatgagcctggagacccatggcagtccatatgcctccctatgcagtgaagggccctagcagtgttaacaaattgctgagatcccacggagtctttcaaaaatctctgtagagttagtcttctccttttctcttcctgagaagttctcctgcctgcataaccattcattagggagtactttacaagcatgaaggatattagggtaagtggctaattataaatctactctagagacatataatcatacagattattcataaaatttttcagtgctgtccttccacatttaattgcattttgctcaaactgtagaatgccctacattccccccaccccaatttgctatttccttattaaaatagaaaattataggcaagatacaattatatgcgttcctcttcctgaaattataacatttctaaacttacccacgtaggtactactgaatccaactgccaacaataaaaagacttttatttagtagaggctacctttcccaccagtgactctttttctacaactgccttgtcagtttggtaattcacttatgattttctaatgttctcttggtgaattttattatcttgtaccctctttttttttttttttttttttaaagacagagtcttgctctgtcacccaggctggagtgcagtggcacgatctcggctcactgcaagctctgcctcccgggttcacgccattctcctgcctcagcctcccgagtagctgggactacaggtgcccgccaccatgcccggctgatttctttttgtatttttagtagagacggagtttcaccgtgttagccaggatggtctcgatctcctgacctcgtgatccgcccgccttggcctccaaagtgctgggattacaggtgtgagctaccgcgcccggcctattatcttgtactttctaactgagccctctattttctttattttaataatatttctccccacttgagaatcacttgttagttcttggtaggaattcagttgggcaatgataacttttatgggcaaaaacattctattatagtgaactaatgaaaataacagcgtattttcaatattttcttattccttaaattccactcttttaacactatgcttaaccacttaatgtgatgaaatattcctaaaagttaaatgactattaaagcatatattgttgcatgtatatattaagtagccgatactctaaataaaaataccactgttacagataaatggggcctttaaaaatatgaaaaacaaacttgtgaaaatgtataaaagatgcatctgttgtttcaaatggcactatcttcttttcagtactacaaaaacagaataattttgaagttttagaataaatgtaatatatttactataattctaaatgtttaaatgcttttctaaaaatgcaaaactatgatgtttagttgctttattttacctctatgtgattatttttcttaattgttattttttataatcattatttttctgaaccattcttctggcctcagaagtaggactgaattctactattgctaggtgtgagaaagtggtggtgagaaccttagagcagtggagatttgctacctggtctgtgttttgagaagtgccccttagaaagttaaaagaatgtagaaaagatactcagtcttaatcctatgcaaaaaaaaaaatcaagtaattgttttcctatgaggaaaataaccatgagctgtatcatgctacttagcttttatgtaaatatttcttatgtctcctctattaagagtatttaaaatcatatttaaatatgaatctattcatgctaacattatttttcaaaacatacatggaaatttagcccagattgtctacatataaggtttttatttgaattgtaaaatatttaaaagtatgaataaaatatatttataggtatttatcagagatgattattttgtgctacatacaggttggctaatgagctctagtgttaaactacctgattaatttcttataaagcagcataaccttggcttgattaaggaattctactttcaaaaattaatctgataatagtaacaaggtatattatactttcattacaatcaaattatagaaattacttgtgtaaaagggcttcaagaatatatccaatttttaaatattttaatatatctcctatctgataacttaattcttctaaattaccacttgccattaagctatttcataataaattctgtacagtttccccccaaaaaagagatttatttatgaaatatttaaagtttctaatgtggtattttaaataaagtatcataaatgtaataagtaaatatttatttaggaatactgtgaacactgaactaattattcctgtgtcagtctatgaaatccctgttttgaaatacgtaaacagcctaaaatgtgttgaaattattttgtaaatccatgacttaaaacaagatacatacatagtataacacacctcacagtgttaagatttatattgtgaaatgagacaccctaccttcaattgttcatcagtgggtaaaacaaattctgatgtacattcaggacaaatgattagccctaaatgaaactgtaataatttcagtggaaactcaatctgtttttacctttaaacagtgaattttacatgaatgaatgggttcttcactttttttttagtatgagaaaattatacagtgcttaattttcagagattctttccatatgttactaaaaaatgttttgttcagcctaacatactgagttttttttaactttctaaattattgaatttccatcatgcattcatccaaaattaaggcagactgtttggattcttccagtggccagatgagctaaattaaatcacaaaagcagatgcttttgtatgatctccaaattgccaactttaaggaaatattctcttgaaattgtctttaaagatcttttgcagctttgcagatacccagactgagctggaactggaatttgtcttcctattgactctacttctttaaaagcggctgcccattacattcctcagctgtccttgcagttaggtgtacatgtgactgagtgttggccagtgagatgaagtctcctcaaaggaaggcagcatgtgtcctttttcatcccttcatcttgctgctgggattgtggatataacaggagccctggcagctgtctccagaggatcaaagccacacccaaagagtaaggcagattagagaccagaaagaccttgactacttccctacttccactgctttttcctgcatttaagccattgtaaatctgggtgtgttacatgaagtgaaaattaattctttctgcccttcagttctttatcctgataccatttaacactgtctgaattaactagactgcaataattctttcttttgaaagcttttaaaggataatgtgcaattcacattaaaattgattttccattgtcaattagttatactcattttcctgccttgatctttcattagatattttgtatctgcttggaatatattatcttctttttaactgtgtaattggtaattactaaaactctgtaatctccaaaatattgctatcaaattacacaccatgttttctatcattctcatagatctgccttataaacatttaaataaaaagtactatttaatgatttaacttctgttttgaaa

SEQ ID NO: 30096 - DNA, 1779 bp, Homo sapiens
  source 1..1779: mol_type = unassigned DNA
agctggagtgcgaccgccgcggcagccaccctgcaaccgccagtcggaggtgcagtccgtaggccctggcccccgggtgggcccttggggagtcggcgccgctcccggggagctgcaaggctcgcccctgcccggcgtggagggcgcggggggcgcggagaaagtgaagagaggaaattggaaaattgtgagtggaccttctgatactgctcctccttgcgtggaaaaggggaaagaactgcatgcatattattcagcgtcctatattcaaaggatattcttggtgatcttggaagtgtccgtatcatggaatcaatctctatgatgggaagccctaagagccttagtgaaacttttttacctaatggcataaatggtatcaaagatgcaaggaaggtcactgtaggtgtgattggaagtggagattttgccaaatccttgaccattcgacttattagatgcggctatcatgtggtcataggaagtagaaatcctaagtttgcttctgaattttttcctcatgtggtagatgtcactcatcatgaagatgctctcacaaaaacaaatataatatttgttgctatacacagagaacattatacctccctgtgggacctgagacatctgcttgtgggtaaaatcctgattgatgtgagcaataacatgaggataaaccagtacccagaatccaatgctgaatatttggcttcattattcccagattctttgattgtcaaaggatttaatgttgtctcagcttgggcacttcagttaggacctaaggatgccagccggcaggtttatatatgcagcaacaatattcaagcgcgacaacaggttattgaacttgcccgccagttgaatttcattcccattgacttgggatccttatcatcagccagagagattgaaaatttacccctacgactctttactctctggagagggccagtggtggtagctataagcttggccacattttttttcctttattcctttgtcagagatgtgattcatccatatgctagaaaccaacagagtgacttttacaaaattcctatagagattgtgaataaaaccttacctatagttgccattactttgctctccctagtatacctcgcaggtcttctggcagctgcttatcaactttattacggcaccaagtataggagatttccaccttggttggaaacctggttacagtgtagaaaacagcttggattactaagttttttcttcgctatggtccatgttgcctacagcctctgcttaccgatgagaaggtcagagagatatttgtttctcaacatggcttatcagcaggttcatgcaaatattgaaaactcttggaatgaggaagaagtttggagaattgaaatgtatatctcctttggcataatgagccttggcttactttccctcctggcagtcacttctatcccttcagtgagcaatgctttaaactggagagaattcagttttattcagtctacacttggatatgtcgctctgctcataagtactttccatgttttaatttatggatggaaacgagcttttgaggaagagtactacagattttatacaccaccaaactttgttcttgctcttgttttgccctcaattgtaattctgggtaagattattttattccttccatgtataagccgaaagctaaaacgaattaaaaaaggctgggaaaagagccaatttctggaagaaggtatgggaggaacaattcctcatgtctccccggagagggtcacagtaatgtga

SEQ ID NO: 30097 - DNA, 6612 bp, Homo sapiens
  source 1..6612: mol_type = unassigned DNA
gatccagcttgggtaggcggggaagcagctggagtgcgaccgccgcggcagccaccctgcaaccgccagtcggagagctaagggcaagtcctgaggttgggcccaggagaaagaaggcaaggagacattgtcccaggatattcttggtgatcttggaagtgtccgtatcatggaatcaatctctatgatgggaagccctaagagccttagtgaaacttttttacctaatggcataaatggtatcaaagatgcaaggaaggtcactgtaggtgtgattggaagtggagattttgccaaatccttgaccattcgacttattagatgcggctatcatgtggtcataggaagtagaaatcctaagtttgcttctgaattttttcctcatgtggtagatgtcactcatcatgaagatgctctcacaaaaacaaatataatatttgttgctatacacagagaacattatacctccctgtgggacctgagacatctgcttgtgggtaaaatcctgattgatgtgagcaataacatgaggataaaccagtacccagaatccaatgctgaatatttggcttcattattcccagattctttgattgtcaaaggatttaatgttgtctcagcttgggcacttcagttaggacctaaggatgccagccggcaggtttatatatgcagcaacaatattcaagcgcgacaacaggttattgaacttgcccgccagttgaatttcattcccattgacttgggatccttatcatcagccagagagattgaaaatttacccctacgactctttactctctggagagggccagtggtggtagctataagcttggccacattttttttcctttattcctttgtcagagatgtgattcatccatatgctagaaaccaacagagtgacttttacaaaattcctatagagattgtgaataaaaccttacctatagttgccattactttgctctccctagtatacctcgcaggtcttctggcagctgcttatcaactttattacggcaccaagtataggagatttccaccttggttggaaacctggttacagtgtagaaaacagcttggattactaagttttttcttcgctatggtccatgttgcctacagcctctgcttaccgatgagaaggtcagagagatatttgtttctcaacatggcttatcagcaggttcatgcaaatattgaaaactcttggaatgaggaagaagtttggagaattgaaatgtatatctcctttggcataatgagccttggcttactttccctcctggcagtcacttctatcccttcagtgagcaatgctttaaactggagagaattcagttttattcagtctacacttggatatgtcgctctgctcataagtactttccatgttttaatttatggatggaaacgagcttttgaggaagagtactacagattttatacaccaccaaactttgttcttgctcttgttttgccctcaattgtaattctgggtaagattattttattccttccatgtataagccgaaagctaaaacgaattaaaaaaggctgggaaaagagccaatttctggaagaaggtatgggaggaacaattcctcatgtctccccggagagggtcacagtaatgtgatgacaaatggtgttcacagctgccatataaagttctactcatgccattatttttatgacttctacgttcagttacaagtatgctgtcaaattatcgtgggttgaaacttgttaaatgagatttcaactgacttagtgatagagttttcttcaagttaattttcacaaatgtcatgtttgccaatatgaatttttctagtcaacatattattgtaatttaggtatgttttgttttgttttgcacaactgtaaccctgttgttactttatatttcataatcaggcaaaaatacttacagttaataatatagatataatgttaaaaacaatttgcaaaccagcagaattttaagcttttaaaataattcaatggatatacatttttttctgaagattaagattttaattattcaacttaaaaagtagaaatgcattattatacatttttttaagaaaggacacgttatgttagcatctaggtaaggctgcatgatagcattcctatatttctctcataaaataggatttgaaggatgaaattaattgtatgaagcaatgtgattatatgaagagacacaaattaaaaagacaaattaaacctgaaattatatttaaaatatatttgagacatgaaatacatactgataatacatacctcatgaaagattttattctttattgtgttacagagcagtttcattttcatattaatatactgatcaggaagaggattcagtaacatttggcttccaaaactgctatctctaatacggtaccaatcctaggaactgtatactagttcctacttagaacaaaagtatcaagtttgcacacaagtaatctgccagctgacctttgtcgcaccttaaccagtcaccacttgctatggtataggattatactgatgttctttgagggattctgatgtgctaggcatggttctaagtactttacttgtattatcccatttaatacttagaacaaccccgtgagataagtagttattatcctcattttacacatgagggaccgaaggatagaaaagttatttttcaaaggtcttgcagttaataaatggcagagtgagcattcaagtccaggtagtcatattccagaggccacggttttaaccactaggctctagagctcccgccgcgcccctatgcattatgttcacaatgccaatctagatgcttcctcttttgtataaagtcactgacattctttagagtgggttgggtgcatccaaaaatgtataaaaatattattataataaacttattactgcttgtagggtaattcacagttacttaccctattcttgcttggaacatgagcctggagacccatggcagtccatatgcctccctatgcagtgaagggccctagcagtgttaacaaattgctgagatcccacggagtctttcaaaaatctctgtagagttagtcttctccttttctcttcctgagaagttctcctgcctgcataaccattcattagggagtactttacaagcatgaaggatattagggtaagtggctaattataaatctactctagagacatataatcatacagattattcataaaatttttcagtgctgtccttccacatttaattgcattttgctcaaactgtagaatgccctacattccccccaccccaatttgctatttccttattaaaatagaaaattataggcaagatacaattatatgcgttcctcttcctgaaattataacatttctaaacttacccacgtaggtactactgaatccaactgccaacaataaaaagacttttatttagtagaggctacctttcccaccagtgactctttttctacaactgccttgtcagtttggtaattcacttatgattttctaatgttctcttggtgaattttattatcttgtaccctctttttttttttttttttttttaaagacagagtcttgctctgtcacccaggctggagtgcagtggcacgatctcggctcactgcaagctctgcctcccgggttcacgccattctcctgcctcagcctcccgagtagctgggactacaggtgcccgccaccatgcccggctgatttctttttgtatttttagtagagacggagtttcaccgtgttagccaggatggtctcgatctcctgacctcgtgatccgcccgccttggcctccaaagtgctgggattacaggtgtgagctaccgcgcccggcctattatcttgtactttctaactgagccctctattttctttattttaataatatttctccccacttgagaatcacttgttagttcttggtaggaattcagttgggcaatgataacttttatgggcaaaaacattctattatagtgaactaatgaaaataacagcgtattttcaatattttcttattccttaaattccactcttttaacactatgcttaaccacttaatgtgatgaaatattcctaaaagttaaatgactattaaagcatatattgttgcatgtatatattaagtagccgatactctaaataaaaataccactgttacagataaatggggcctttaaaaatatgaaaaacaaacttgtgaaaatgtataaaagatgcatctgttgtttcaaatggcactatcttcttttcagtactacaaaaacagaataattttgaagttttagaataaatgtaatatatttactataattctaaatgtttaaatgcttttctaaaaatgcaaaactatgatgtttagttgctttattttacctctatgtgattatttttcttaattgttattttttataatcattatttttctgaaccattcttctggcctcagaagtaggactgaattctactattgctaggtgtgagaaagtggtggtgagaaccttagagcagtggagatttgctacctggtctgtgttttgagaagtgccccttagaaagttaaaagaatgtagaaaagatactcagtcttaatcctatgcaaaaaaaaaaatcaagtaattgttttcctatgaggaaaataaccatgagctgtatcatgctacttagcttttatgtaaatatttcttatgtctcctctattaagagtatttaaaatcatatttaaatatgaatctattcatgctaacattatttttcaaaacatacatggaaatttagcccagattgtctacatataaggtttttatttgaattgtaaaatatttaaaagtatgaataaaatatatttataggtatttatcagagatgattattttgtgctacatacaggttggctaatgagctctagtgttaaactacctgattaatttcttataaagcagcataaccttggcttgattaaggaattctactttcaaaaattaatctgataatagtaacaaggtatattatactttcattacaatcaaattatagaaattacttgtgtaaaagggcttcaagaatatatccaatttttaaatattttaatatatctcctatctgataacttaattcttctaaattaccacttgccattaagctatttcataataaattctgtacagtttccccccaaaaaagagatttatttatgaaatatttaaagtttctaatgtggtattttaaataaagtatcataaatgtaataagtaaatatttatttaggaatactgtgaacactgaactaattattcctgtgtcagtctatgaaatccctgttttgaaatacgtaaacagcctaaaatgtgttgaaattattttgtaaatccatgacttaaaacaagatacatacatagtataacacacctcacagtgttaagatttatattgtgaaatgagacaccctaccttcaattgttcatcagtgggtaaaacaaattctgatgtacattcaggacaaatgattagccctaaatgaaactgtaataatttcagtggaaactcaatctgtttttacctttaaacagtgaattttacatgaatgaatgggttcttcactttttttttagtatgagaaaattatacagtgcttaattttcagagattctttccatatgttactaaaaaatgttttgttcagcctaacatactgagttttttttaactttctaaattattgaatttccatcatgcattcatccaaaattaaggcagactgtttggattcttccagtggccagatgagctaaattaaatcacaaaagcagatgcttttgtatgatctccaaattgccaactttaaggaaatattctcttgaaattgtctttaaagatcttttgcagctttgcagatacccagactgagctggaactggaatttgtcttcctattgactctacttctttaaaagcggctgcccattacattcctcagctgtccttgcagttaggtgtacatgtgactgagtgttggccagtgagatgaagtctcctcaaaggaaggcagcatgtgtcctttttcatcccttcatcttgctgctgggattgtggatataacaggagccctggcagctgtctccagaggatcaaagccacacccaaagagtaaggcagattagagaccagaaagaccttgactacttccctacttccactgctttttcctgcatttaagccattgtaaatctgggtgtgttacatgaagtgaaaattaattctttctgcccttcagttctttatcctgataccatttaacactgtctgaattaactagactgcaataattctttcttttgaaagcttttaaaggataatgtgcaattcacattaaaattgattttccattgtcaattagttatactcattttcctgccttgatctttcattagatattttgtatctgcttggaatatattatcttctttttaactgtgtaattggtaattactaaaactctgtaatctccaaaatattgctatcaaattacacaccatgttttctatcattctcatagatctgccttataaacatttaaata

SEQ ID NO: 30098 - DNA, 2235 bp, Homo sapiens
  source 1..2235: mol_type = unassigned DNA
gatccagcttgggtaggcggggaagcagctggagtgcgaccgccgcggcagccaccctgcaaccgccagtcggagagctaagggcaagtcctgaggttgggcccaggagaaagaaggcaaggagacattgtcccaggtaggatgtgtcccagatattcttggtgatcttggaagtgtccgtatcatggaatcaatctctatgatgggaagccctaagagccttagtgaaacttttttacctaatggcataaatggtatcaaagatgcaaggaaggtcactgtaggtgtgattggaagtggagattttgccaaatccttgaccattcgacttattagatgcggctatcatgtggtcataggaagtagaaatcctaagtttgcttctgaattttttcctcatgtggtagatgtcactcatcatgaagatgctctcacaaaaacaaatataatatttgttgctatacacagagaacattatacctccctgtgggacctgagacatctgcttgtgggtaaaatcctgattgatgtgagcaataacatgaggataaaccagtacccagaatccaatgctgaatatttggcttcattattcccagattctttgattgtcaaaggatttaatgttgtctcagcttgggcacttcagttaggacctaaggatgccagccggcaggtttatatatgcagcaacaatattcaagcgcgacaacaggttattgaacttgcccgccagttgaatttcattcccattgacttgggatccttatcatcagccagagagattgaaaatttacccctacgactctttactctctggagagggccagtggtggtagctataagcttggccacattttttttcctttattcctttgtcagagatgtgattcatccatatgctagaaaccaacagagtgacttttacaaaattcctatagagattgtgaataaaaccttacctatagttgccattactttgctctccctagtatacctcgcaggtcttctggcagctgcttatcaactttattacggcaccaagtataggagatttccaccttggttggaaacctggttacagtgtagaaaacagcttggattactaagttttttcttcgctatggtccatgttgcctacagcctctgcttaccgatgagaaggtcagagagatatttgtttctcaacatggcttatcagcaggttcatgcaaatattgaaaactcttggaatgaggaagaagtttggagaattgaaatgtatatctcctttggcataatgagccttggcttactttccctcctggcagtcacttctatcccttcagtgagcaatgctttaaactggagagaattcagttttattcagtctacacttggatatgtcgctctgctcataagtactttccatgttttaatttatggatggaaacgagcttttgaggaagagtactacagattttatacaccaccaaactttgttcttgctcttgttttgccctcaattgtaattctggatcttttgcagctttgcagatacccagactgagctggaactggaatttgtcttcctattgactctacttctttaaaagcggctgcccattacattcctcagctgtccttgcagttaggtgtacatgtgactgagtgttggccagtgagatgaagtctcctcaaaggaaggcagcatgtgtcctttttcatcccttcatcttgctgctgggattgtggatataacaggagccctggcagctgtctccagaggatcaaagccacacccaaagagtaaggcagattagagaccagaaagaccttgactacttccctacttccactgctttttcctgcatttaagccattgtaaatctgggtgtgttacatgaagtgaaaattaattctttctgcccttcagttctttatcctgataccatttaacactgtctgaattaactagactgcaataattctttcttttgaaagcttttaaaggataatgtgcaattcacattaaaattgattttccattgtcaattagttatactcattttcctgccttgatctttcattagatattttgtatctgcttggaatatattatcttctttttaactgtgtaattggtaattactaaaactctgtaatctccaaaatattgctatcaaattacacaccatgttttctatcattctcatagatctgccttataaacatttaaataaaaagtactattta

SEQ ID NO: 30099 - DNA, 2456 bp, Homo sapiens
  source 1..2456: mol_type = unassigned DNA
agcgttcctcgggccctcggcgccacgagctgtccgggcacgcagcccctagcggcgcgtcgctgccaagccggcctccgcgcgcctccctccttccttctcccctggctgttcgcgatccagcttgggtaggcggggaagcagctggagtgcgaccgccgcggcagccaccctgcaaccgccagtcggaggtgcagtccgtaggccctggcccccgggtgggcccttggggagtcggcgccgctcccggggagctgcaaggctcgcccctgcccggcgtggagggcgcggggggcgcggaggatattcttggtgatcttggaagtgtccgtatcatggaatcaatctctatgatgggaagccctaagagccttagtgaaacttttttacctaatggcataaatggtatcaaagatgcaaggaaggtcactgtaggtgtgattggaagtggagattttgccaaatccttgaccattcgacttattagatgcggctatcatgtggtcataggaagtagaaatcctaagtttgcttctgaattttttcctcatgtggtagatgtcactcatcatgaagatgctctcacaaaaacaaatataatatttgttgctatacacagagaacattatacctccctgtgggacctgagacatctgcttgtgggtaaaatcctgattgatgtgagcaataacatgaggataaaccagtacccagaatccaatgctgaatatttggcttcattattcccagattctttgattgtcaaaggatttaatgttgtctcagcttgggcacttcagttaggacctaaggatgccagccggcaggtttatatatgcagcaacaatattcaagcgcgacaacaggttattgaacttgcccgccagttgaatttcattcccattgacttgggatccttatcatcagccagagagattgaaaatttacccctacgactctttactctctggagagggccagtggtggtagctataagcttggccacattttttttcctttattcctttgtcagagatgtgattcatccatatgctagaaaccaacagagtgacttttacaaaattcctatagagattgtgaataaaaccttacctatagttgccattactttgctctccctagtatacctcgcaggtcttctggcagctgcttatcaactttattacggcaccaagtataggagatttccaccttggttggaaacctggttacagtgtagaaaacagcttggattactaagttttttcttcgctatggtccatgttgcctacagcctctgcttaccgatgagaaggtcagagagatatttgtttctcaacatggcttatcagcaggttcatgcaaatattgaaaactcttggaatgaggaagaagtttggagaattgaaatgtatatctcctttggcataatgagccttggcttactttccctcctggcagtcacttctatcccttcagtgagcaatgctttaaactggagagaattcagttttattcagtctacacttggatatgtcgctctgctcataagtactttccatgttttaatttatggatggaaacgagcttttgaggaagagtactacagattttatacaccaccaaactttgttcttgctcttgttttgccctcaattgtaattctggatcttttgcagctttgcagatacccagactgagctggaactggaatttgtcttcctattgactctacttctttaaaagcggctgcccattacattcctcagctgtccttgcagttaggtgtacatgtgactgagtgttggccagtgagatgaagtctcctcaaaggaaggcagcatgtgtcctttttcatcccttcatcttgctgctgggattgtggatataacaggagccctggcagctgtctccagaggatcaaagccacacccaaagagtaaggcagattagagaccagaaagaccttgactacttccctacttccactgctttttcctgcatttaagccattgtaaatctgggtgtgttacatgaagtgaaaattaattctttctgcccttcagttctttatcctgataccatttaacactgtctgaattaactagactgcaataattctttcttttgaaagcttttaaaggataatgtgcaattcacattaaaattgattttccattgtcaattagttatactcattttcctgccttgatctttcattagatattttgtatctgcttggaatatattatcttctttttaactgtgtaattggtaattactaaaactctgtaatctccaaaatattgctatcaaattacacaccatgttttctatcattctcatagatctgccttataaacatttaaataaaaagtactatttaatgatttaacttctgttttgaaatgttgtatacacgtggatttttttctcattaaataataattctagta

SEQ ID NO: 30100 - DNA, 2261 bp, Homo sapiens
  source 1..2261: mol_type = unassigned DNA
ttctgctatagagatggaacagtatatggaaagctcccaagaaagtgaagagaggaaattggaaaattgtgagtggaccttctgatactgctcctccttgcgtggaaaaggggaaagaactgcatgcatattattcagcgtcctatattcaaaggatattcttggtgatcttggaagtgtccgtatcatggaatcaatctctatgatgggaagccctaagagccttagtgaaacttttttacctaatggcataaatggtatcaaagatgcaaggaaggtcactgtaggtgtgattggaagtggagattttgccaaatccttgaccattcgacttattagatgcggctatcatgtggtcataggaagtagaaatcctaagtttgcttctgaattttttcctcatgtggtagatgtcactcatcatgaagatgctctcacaaaaacaaatataatatttgttgctatacacagagaacattatacctccctgtgggacctgagacatctgcttgtgggtaaaatcctgattgatgtgagcaataacatgaggataaaccagtacccagaatccaatgctgaatatttggcttcattattcccagattctttgattgtcaaaggatttaatgttgtctcagcttgggcacttcagttaggacctaaggatgccagccggcaggtttatatatgcagcaacaatattcaagcgcgacaacaggttattgaacttgcccgccagttgaatttcattcccattgacttgggatccttatcatcagccagagagattgaaaatttacccctacgactctttactctctggagagggccagtggtggtagctataagcttggccacattttttttcctttattcctttgtcagagatgtgattcatccatatgctagaaaccaacagagtgacttttacaaaattcctatagagattgtgaataaaaccttacctatagttgccattactttgctctccctagtatacctcgcaggtcttctggcagctgcttatcaactttattacggcaccaagtataggagatttccaccttggttggaaacctggttacagtgtagaaaacagcttggattactaagttttttcttcgctatggtccatgttgcctacagcctctgcttaccgatgagaaggtcagagagatatttgtttctcaacatggcttatcagcaggttcatgcaaatattgaaaactcttggaatgaggaagaagtttggagaattgaaatgtatatctcctttggcataatgagccttggcttactttccctcctggcagtcacttctatcccttcagtgagcaatgctttaaactggagagaattcagttttattcagtctacacttggatatgtcgctctgctcataagtactttccatgttttaatttatggatggaaacgagcttttgaggaagagtactacagattttatacaccaccaaactttgttcttgctcttgttttgccctcaattgtaattctggatcttttgcagctttgcagatacccagactgagctggaactggaatttgtcttcctattgactctacttctttaaaagcggctgcccattacattcctcagctgtccttgcagttaggtgtacatgtgactgagtgttggccagtgagatgaagtctcctcaaaggaaggcagcatgtgtcctttttcatcccttcatcttgctgctgggattgtggatataacaggagccctggcagctgtctccagaggatcaaagccacacccaaagagtaaggcagattagagaccagaaagaccttgactacttccctacttccactgctttttcctgcatttaagccattgtaaatctgggtgtgttacatgaagtgaaaattaattctttctgcccttcagttctttatcctgataccatttaacactgtctgaattaactagactgcaataattctttcttttgaaagcttttaaaggataatgtgcaattcacattaaaattgattttccattgtcaattagttatactcattttcctgccttgatctttcattagatattttgtatctgcttggaatatattatcttctttttaactgtgtaattggtaattactaaaactctgtaatctccaaaatattgctatcaaattacacaccatgttttctatcattctcatagatctgccttataaacatttaaataaaaagtactatttaatgatttaacttctgttttgaaa

SEQ ID NO: 30101 - DNA, 579 bp, Homo sapiens
  source 1..579: mol_type = unassigned DNA
taggcggggaagcagctggagtgcgaccgccgcggcagccaccctgcaaccgccagtcggaggtgcagtccgtaggccctggcccccgggtgggcccttggggagtcggcgccgctcccggggagctgcaaggctcgcccctgcccggcgtggagggcgcggggggcgcggagtgaagagaggaaattggaaaattgtgagtggaccttctgatactgctcctccttgcgtggaaaaggggaaagaactgcatgcatattattcagcgtcctatattcaaaggatattcttggtgatcttggaagtgtccgtatcatggaatcaatctctatgatgggaagccctaagagccttagtgaaacttttttacctaatggcataaatggtatcaaagatgcaaggaaggtcactgtaggtgtgattggaagtggagattttgccaaatccttgaccattcgacttattagatgcggctatcatgtggtcataggaagtagaaatcctaagtttgcttctgaattttttcctcatgtggtagatgtcactcatcatgaagatgctctcacaaaaacaaatata

SEQ ID NO: 30102 - DNA, 902 bp, Homo sapiens
  source 1..902: mol_type = unassigned DNA
caagcagagctctccttcctgaacaaaatgagtccacctggggtttattttctttaaagatttgctcaatagagattttattatctttggtttaaaataaaagttaaaatgatatatttactattttaatgagttacatttaatgttttatggcaacaaaaaagaaatatctgattctgatgtgatttttcagatcatagactacatgtctaaagaagcctataagaaattatggcctatgaagtgtggaatctgagactgctggcaagatggccgactaggaacagctctggtgcacagctcccagcaagatccacgcaggaggatattcttggtgatcttggaagtgtccgtatcatggaatcaatctctatgatgggaagccctaagagccttagtgaaacttttttacctaatggcataaatggtatcaaagatgcaaggaaggtcactgtaggtgtgattggaagtggagattttgccaaatccttgaccattcgacttattagatgcggctatcatgtggtcataggaagtagaaatcctaagtttgcttctgaattttttcctcatgtggtagatgtcactcatcatgaagatgctctcacaaaaacaaatataatatttgttgctatacacagagaacattatacctccctgtgggacctgagacatctgcttgtgggtaaaatcctgattgatgtgagcaataacatgaggataaaccagtacccagaatccaatgctgaatatttggcttcattattcccagattctttgattgtcaaaggatttaatgttgtctcagcttgggcacttcagttaggacctaaggatgccagccggcaggtttatatatgcagcaacaatattcaagcgcgacaacaggttattgaacttgc

SEQ ID NO: 30103 - DNA, 4282 bp, Homo sapiens
  source 1..4282: mol_type = unassigned DNA
gaggaggagcctcgggccgagccaccgccttcgccgcggaccttcagctgccgcggtcgctccgagcggcgggccgcagagatgacatttattcattttatgcatcctgggttctactggtcgtcccacctcagttcctgtagcaaagagacttgagtctgagccactaattatcacccgtgaggtttcctccccgagcaggaagcagcaggccagagctgcgctctctcagtgcactctccaaccaagcatcagtcaccactcccggtccagcccctgtggccaagagctggcgtgcaggctgcgggaggcagctggctgtgcaagaccctggcagggccctcgcctcctgagaaaccgagagtcagaaccaaagccaggctgtcctggttggagactgagccagaaagggtggctcacctcacggtgaggctgtcgagtgacctgagagcctcagaccctcacgtcagccggatgtcgcaccagcctgctgttgccaccaaaatgccagaagagatggacaagccactgatcagcctccacctggtggacagcgatagtagccttgccaaggtccccgatgaggcccccaaagtgggcatcctgggtagcggggactttgcccgctccctggccacacgcctggtgggctctggcttcaaagtggtggtggggagccgcaaccccaaacgcacagccaggctgtttccctcagcggcccaagtgactttccaagaggaggcagtgagctccccggaggtcatctttgtggctgtgttccgggagcactactcttcactgtgcagtctcagtgaccagctggcgggcaagatcctggtggatgtgagcaaccctacagagcaagagcaccttcagcatcgtgagtccaatgctgagtacctggcctccctcttccccacttgcacagtggtcaaggccttcaatgtcatctctgcctggaccctgcaggctggcccaagggatggtaacaggcaggtgcccatctgcggtgaccagccagaagccaagcgtgctgtctcggagatggcgctcgccatgggcttcatgcccgtggacatgggatccctggcgtcagcctgggaggtggaggccatgcccctgcgcctcctcccggcctggaaggtgcccaccctgctggccctggggctcttcgtctgcttctatgcctacaacttcgtccgggacgttctgcagccctatgtgcaggaaagccagaacaagttcttcaagctgcccgtgtccgtggtcaacaccacactgccgtgcgtggcctacgtgctgctgtcactcgtgtacttgcccggcgtgctggcggctgccctgcagctgcggcgcggcaccaagtaccagcgcttccccgactggctggaccactggctacagcaccgcaagcagatcgggctgctcagcttcttctgcgccgccctgcacgccctctacagcttctgcttgccgctgcgccgcgcccaccgctacgacctggtcaacctggcagtcaagcaggtcttggccaacaagagccacctctgggtggaggaggaggtctggcggatggagatctacctctccctgggagtgctggccctcggcacgttgtccctgctggccgtgacctcactgccgtccattgcaaactcgctcaactggagggagttcagcttcgttcagtcctcactgggctttgtggccctcgtgctgagcacactgcacacgctcacctacggctggacccgcgccttcgaggagagccgctacaagttctacctgcctcccaccttcacgctcacgctgctggtgccctgcgtcgtcatcctggccaaagccctgtttctcctgccctgcatcagccgcagactcgccaggatccggagaggctgggagagggagagcaccatcaagttcacgctgcccacagaccacgccctggccgagaagacgagccacgtatgaggtgcctgccctgggctctggaccccgggcacacgagggacggtgccctgagcccgttaggttttcttttcttggtggtgcaaagtggtataactgtgtgcaaataggaggtttgaggtccaaattcctgggactcaaatgtatgcagtactattcagaatgatatacacacatatgtgtatatgtatttacatatattccacatatataacaggatttgcaattatacatagctagctaaaaagttgggtctctgagatttcaacttgtagatttaaaaacaagtgccgtacgttaagagaagagcagatcatgctattgtgacatttgcagagatatacacacactttttgtacagaagaggcttgtgctgtggtgggttcgatttatccctgcccaccccacccccacaacttcccttttgctacttccccaaggctcttgcagagctagggctctgaaggggagggaaggcaacggctctgcccagagccatccctggagcatgtgagcagcggctggtctcttccctccacctggggcagcagcaggaggcctggggaggaggaaaatcaggcagtcggcctggagtctgtgcctggtcctttgcccggtggtgggaggatggagggattgggctgaagctgctccacctcatccttgctgagtgggggagacattttccctgaaagtcagaagtcaccatagagcctgcaaatggatcctcctgtgagagtgacgtcacctcctttccagagccattagtgagcctggcttgggaacaagtgtaatttccttccctcctttaacctggcgatgagcgtcctttaaaccactgtgccttctcaccctttccatcttcagtttgaatgactcccaggaaggcctagagcagaccctttagaaatcagcccaagggggagagcaagagaaaacactctagggagtaaagctccccgggcgtcagagttgagccctgcctgggctgaaggactgtcttcacgaagtcagtcctgaggaaaaatattggggactccaaatgtcctctggcagaggacccagaaaaccacactggctccaacttcctcctcatggggcattacacttcaaaacagtggggagcaacttttccaccaaagctacaaacctaaaatgctgctgccccaaagcacaagagggaagagcaccgccggggccacaggacgtctgtcctccagtcacaggccatccttgctgctccctactgactctagcttacttcccctgtgaagaaacaggtgttctcggctgagcccccaaccctctgcagaaccaggttgatctgccacagaaaaagcatctttgaagacaaagagggtgaggtcttcatgagtctcctgggcccaaagccatcttctgatggaaggaagagagtagggccagtgaaggctgcccagagagaatgtcacagatgaggctgcccctgccccccccccgccagggaggtttcatgagctcatgtctatgcagcacataagggttcttcagtgaaaagcaggagaagagcccactgcaaggatagctcattaggcacatgaccgatgcagggaaggccatgccggggaagctcttcctgcaggtattttccatctgctgtgccaaggctgagcggcagaaacttgtctcataaattggcactgatggagcatcagctgtggcccacagagagccttgctgagaagggggcaggtaaagcagagattttagcattgccttggcataacaagggcccatcgattccctactaatgagaggcagggagagcatgggcaatggagacccaccaatgatccccaaccccggtgggtactggctgcctgccctgggccagggaatggctccttataccaaagatgctggcacatagcagaacccagtgcacgtcctccccttcccacccacctctggctgaaggtgctcaagagggaagcaattataaggtgggtggcaggagggaacaggtgccacctgctggacaatcacacgaaaggcaggcgggctgtgtactgggccctgactgtgcgtccactgctgtcttccctacctcaccaggctactggcagcagcatcccgagagcacatcatctccacagcctggtaaattccatgtgcctctgggtacaaaagtgcctcaacgacatgctctggaaatcccaaatgccacagtctgaggttgatatctaaaatctatgccttcaaaagagtctctgttttttttttttaacctggtagacagtataaaagcagtgcaaataaacacctaaccttctgc

SEQ ID NO: 30104 - DNA, 3915 bp, Homo sapiens
  source 1..3915: mol_type = unassigned DNA
accgccttcgccgcggaccttcagctgccgcggtcgctccgagcggcgggccgcagaggttcaagcgattctcctgcttcagcctccggagtagctgggattacaggcacgtgccaacacacccagccaccaaaatgccagaagagatggacaagccactgatcagcctccacctggtggacagcgatagtagccttgccaaggtccccgatgaggcccccaaagtgggcatcctgggtagcggggactttgcccgctccctggccacacgcctggtgggctctggcttcaaagtggtggtggggagccgcaaccccaaacgcacagccaggctgtttccctcagcggcccaagtgactttccaagaggaggcagtgagctccccggaggtcatctttgtggctgtgttccgggagcactactcttcactgtgcagtctcagtgaccagctggcgggcaagatcctggtggatgtgagcaaccctacagagcaagagcaccttcagcatcgtgagtccaatgctgagtacctggcctccctcttccccacttgcacagtggtcaaggccttcaatgtcatctctgcctggaccctgcaggctggcccaagggatggtaacaggcaggtgcccatctgcggtgaccagccagaagccaagcgtgctgtctcggagatggcgctcgccatgggcttcatgcccgtggacatgggatccctggcgtcagcctgggaggtggaggccatgcccctgcgcctcctcccggcctggaaggtgcccaccctgctggccctggggctcttcgtctgcttctatgcctacaacttcgtccgggacgttctgcagccctatgtgcaggaaagccagaacaagttcttcaagctgcccgtgtccgtggtcaacaccacactgccgtgcgtggcctacgtgctgctgtcactcgtgtacttgcccggcgtgctggcggctgccctgcagctgcggcgcggcaccaagtaccagcgcttccccgactggctggaccactggctacagcaccgcaagcagatcgggctgctcagcttcttctgcgccgccctgcacgccctctacagcttctgcttgccgctgcgccgcgcccaccgctacgacctggtcaacctggcagtcaagcaggtcttggccaacaagagccacctctgggtggaggaggaggtctggcggatggagatctacctctccctgggagtgctggccctcggcacgttgtccctgctggccgtgacctcactgccgtccattgcaaactcgctcaactggagggagttcagcttcgttcagtcctcactgggctttgtggccctcgtgctgagcacactgcacacgctcacctacggctggacccgcgccttcgaggagagccgctacaagttctacctgcctcccaccttcacgctcacgctgctggtgccctgcgtcgtcatcctggccaaagccctgtttctcctgccctgcatcagccgcagactcgccaggatccggagaggctgggagagggagagcaccatcaagttcacgctgcccacagaccacgccctggccgagaagacgagccacgtatgaggtgcctgccctgggctctggaccccgggcacacgagggacggtgccctgagcccgttaggttttcttttcttggtggtgcaaagtggtataactgtgtgcaaataggaggtttgaggtccaaattcctgggactcaaatgtatgcagtactattcagaatgatatacacacatatgtgtatatgtatttacatatattccacatatataacaggatttgcaattatacatagctagctaaaaagttgggtctctgagatttcaacttgtagatttaaaaacaagtgccgtacgttaagagaagagcagatcatgctattgtgacatttgcagagatatacacacactttttgtacagaagaggcttgtgctgtggtgggttcgatttatccctgcccaccccacccccacaacttcccttttgctacttccccaaggctcttgcagagctagggctctgaaggggagggaaggcaacggctctgcccagagccatccctggagcatgtgagcagcggctggtctcttccctccacctggggcagcagcaggaggcctggggaggaggaaaatcaggcagtcggcctggagtctgtgcctggtcctttgcccggtggtgggaggatggagggattgggctgaagctgctccacctcatccttgctgagtgggggagacattttccctgaaagtcagaagtcaccatagagcctgcaaatggatcctcctgtgagagtgacgtcacctcctttccagagccattagtgagcctggcttgggaacaagtgtaatttccttccctcctttaacctggcgatgagcgtcctttaaaccactgtgccttctcaccctttccatcttcagtttgaatgactcccaggaaggcctagagcagaccctttagaaatcagcccaagggggagagcaagagaaaacactctagggagtaaagctccccgggcgtcagagttgagccctgcctgggctgaaggactgtcttcacgaagtcagtcctgaggaaaaatattggggactccaaatgtcctctggcagaggacccagaaaaccacactggctccaacttcctcctcatggggcattacacttcaaaacagtggggagcaacttttccaccaaagctacaaacctaaaatgctgctgccccaaagcacaagagggaagagcaccgccggggccacaggacgtctgtcctccagtcacaggccatccttgctgctccctactgactctagcttacttcccctgtgaagaaacaggtgttctcggctgagcccccaaccctctgcagaaccaggttgatctgccacagaaaaagcatctttgaagacaaagagggtgaggtcttcatgagtctcctgggcccaaagccatcttctgatggaaggaagagagtagggccagtgaaggctgcccagagagaatgtcacagatgaggctgcccctgccccccccccgccagggaggtttcatgagctcatgtctatgcagcacataagggttcttcagtgaaaagcaggagaagagcccactgcaaggatagctcattaggcacatgaccgatgcagggaaggccatgccggggaagctcttcctgcaggtattttccatctgctgtgccaaggctgagcggcagaaacttgtctcataaattggcactgatggagcatcagctgtggcccacagagagccttgctgagaagggggcaggtaaagcagagattttagcattgccttggcataacaagggcccatcgattccctactaatgagaggcagggagagcatgggcaatggagacccaccaatgatccccaaccccggtgggtactggctgcctgccctgggccagggaatggctccttataccaaagatgctggcacatagcagaacccagtgcacgtcctccccttcccacccacctctggctgaaggtgctcaagagggaagcaattataaggtgggtggcaggagggaacaggtgccacctgctggacaatcacacgaaaggcaggcgggctgtgtactgggccctgactgtgcgtccactgctgtcttccctacctcaccaggctactggcagcagcatcccgagagcacatcatctccacagcctggtaaattccatgtgcctctgggtacaaaagtgcctcaacgacatgctctggaaatcccaaatgccacagtctgaggttgatatctaaaatctatgccttcaaaagagtctctgttttttttttttaacctggtagacagtataaaagcagtgcaaataaacacctaaccttctgcaaa

SEQ ID NO: 30105 - DNA, 1871 bp, Homo sapiens
  source 1..1871: mol_type = unassigned DNA
agctgccgcggtcgctccgagcggcgggccgcagagccaccaaaatgccagaagagatggacaagccactgatcagcctccacctggtggacagcgatagtagccttgccaaggtccccgatgaggcccccaaagtgggcatcctgggtagcggggactttgcccgctccctggccacacgcctggtgggctctggcttcaaagtggtggtggggagccgcaaccccaaacgcacagccaggctgtttccctcagcggcccaagtgactttccaagaggaggcagtgagctccccggaggtcatctttgtggctgtgttccgggagcactactcttcactgtgcagtctcagtgaccagctggcgggcaagatcctggtggatgtgagcaaccctacagagcaagagcaccttcagcatcgtgagtccaatgctgagtacctggcctccctcttccccacttgcacagtggtcaaggccttcaatgtcatctctgcctggaccctgcaggctggcccaagggatggtaacaggcaggtgcccatctgcggtgaccagccagaagccaagcgtgctgtctcggagatggcgctcgccatgggcttcatgcccgtggacatgggatccctggcgtcagcctgggaggtggaggccatgcccctgcgcctcctcccggcctggaaggtgcccaccctgctggccctggggctcttcgtctgcttctatgcctacaacttcgtccgggacgttctgcagccctatgtgcaggaaagccagaacaagttcttcaagctgcccgtgtccgtggtcaacaccacactgccgtgcgtggcctacgtgctgctgtcactcgtgtacttgcccggcgtgctggcggctgccctgcagctgcggcgcggcaccaagtaccagcgcttccccgactggctggaccactggctacagcaccgcaagcagatcgggctgctcagcttcttctgcgccgccctgcacgccctctacagcttctgcttgccgctgcgccgcgcccaccgctacgacctggtcaacctggcagtcaagcaggtcttggccaacaagagccacctctgggtggaggaggaggtctggcggatggagatctacctctccctgggagtgctggccctcggcacgttgtccctgctggccgtgacctcactgccgtccattgcaaactcgctcaactggagggagttcagcttcgttcagtcctcactgggctttgtggccctcgtgctgagcacactgcacacgctcacctacggctggacccgcgccttcgaggagagccgctacaagttctacctgcctcccaccttcacgctcacgctgctggtgccctgcgtcgtcatcctggccaaagccctgtttctcctgccctgcatcagccgcagactcgccaggatccggagaggctgggagagggagagcaccatcaagttcacgctgcccacagaccacgccctggccgagaagacgagccacgtatgaggtgcctgccctgggctctggaccccgggcacacgagggacggtgccctgagcccgttaggttttcttttcttggtggtgcaaagtggtataactgtgtgcaaataggaggtttgaggtccaaattcctgggactcaaatgtatgcagtactattcagaatgatatacacacatatgtgtatatgtatttacatatattccacatatataacaggatttgcaattatacatagctagctaaaaagttgggtctctgagatttcaacttgtagatttaaaaacaagtgccgtacgttaagagaagagcagatcatgctattgtgacatttgcagagatatacacacactttttgtacagaa

SEQ ID NO: 30106 - DNA, 3934 bp, Homo sapiens
  source 1..3934: mol_type = unassigned DNA
gaggaggagcctcgggccgagccaccgccttcgccgcggaccttcagctgccgcggtcgctccgagcggcgggccgcagaggtgagtgtaccctcccccggtctccgcggggctgcgtgctgcgcccggtccccgagacgcccagccaccaaaatgccagaagagatggacaagccactgatcagcctccacctggtggacagcgatagtagccttgccaaggtccccgatgaggcccccaaagtgggcatcctgggtagcggggactttgcccgctccctggccacacgcctggtgggctctggcttcaaagtggtggtggggagccgcaaccccaaacgcacagccaggctgtttccctcagcggcccaagtgactttccaagaggaggcagtgagctccccggaggtcatctttgtggctgtgttccgggagcactactcttcactgtgcagtctcagtgaccagctggcgggcaagatcctggtggatgtgagcaaccctacagagcaagagcaccttcagcatcgtgagtccaatgctgagtacctggcctccctcttccccacttgcacagtggtcaaggccttcaatgtcatctctgcctggaccctgcaggctggcccaagggatggtaacaggcaggtgcccatctgcggtgaccagccagaagccaagcgtgctgtctcggagatggcgctcgccatgggcttcatgcccgtggacatgggatccctggcgtcagcctgggaggtggaggccatgcccctgcgcctcctcccggcctggaaggtgcccaccctgctggccctggggctcttcgtctgcttctatgcctacaacttcgtccgggacgttctgcagccctatgtgcaggaaagccagaacaagttcttcaagctgcccgtgtccgtggtcaacaccacactgccgtgcgtggcctacgtgctgctgtcactcgtgtacttgcccggcgtgctggcggctgccctgcagctgcggcgcggcaccaagtaccagcgcttccccgactggctggaccactggctacagcaccgcaagcagatcgggctgctcagcttcttctgcgccgccctgcacgccctctacagcttctgcttgccgctgcgccgcgcccaccgctacgacctggtcaacctggcagtcaagcaggtcttggccaacaagagccacctctgggtggaggaggaggtctggcggatggagatctacctctccctgggagtgctggccctcggcacgttgtccctgctggccgtgacctcactgccgtccattgcaaactcgctcaactggagggagttcagcttcgttcagtcctcactgggctttgtggccctcgtgctgagcacactgcacacgctcacctacggctggacccgcgccttcgaggagagccgctacaagttctacctgcctcccaccttcacgctcacgctgctggtgccctgcgtcgtcatcctggccaaagccctgtttctcctgccctgcatcagccgcagactcgccaggatccggagaggctgggagagggagagcaccatcaagttcacgctgcccacagaccacgccctggccgagaagacgagccacgtatgaggtgcctgccctgggctctggaccccgggcacacgagggacggtgccctgagcccgttaggttttcttttcttggtggtgcaaagtggtataactgtgtgcaaataggaggtttgaggtccaaattcctgggactcaaatgtatgcagtactattcagaatgatatacacacatatgtgtatatgtatttacatatattccacatatataacaggatttgcaattatacatagctagctaaaaagttgggtctctgagatttcaacttgtagatttaaaaacaagtgccgtacgttaagagaagagcagatcatgctattgtgacatttgcagagatatacacacactttttgtacagaagaggcttgtgctgtggtgggttcgatttatccctgcccaccccacccccacaacttcccttttgctacttccccaaggctcttgcagagctagggctctgaaggggagggaaggcaacggctctgcccagagccatccctggagcatgtgagcagcggctggtctcttccctccacctggggcagcagcaggaggcctggggaggaggaaaatcaggcagtcggcctggagtctgtgcctggtcctttgcccggtggtgggaggatggagggattgggctgaagctgctccacctcatccttgctgagtgggggagacattttccctgaaagtcagaagtcaccatagagcctgcaaatggatcctcctgtgagagtgacgtcacctcctttccagagccattagtgagcctggcttgggaacaagtgtaatttccttccctcctttaacctggcgatgagcgtcctttaaaccactgtgccttctcaccctttccatcttcagtttgaatgactcccaggaaggcctagagcagaccctttagaaatcagcccaagggggagagcaagagaaaacactctagggagtaaagctccccgggcgtcagagttgagccctgcctgggctgaaggactgtcttcacgaagtcagtcctgaggaaaaatattggggactccaaatgtcctctggcagaggacccagaaaaccacactggctccaacttcctcctcatggggcattacacttcaaaacagtggggagcaacttttccaccaaagctacaaacctaaaatgctgctgccccaaagcacaagagggaagagcaccgccggggccacaggacgtctgtcctccagtcacaggccatccttgctgctccctactgactctagcttacttcccctgtgaagaaacaggtgttctcggctgagcccccaaccctctgcagaaccaggttgatctgccacagaaaaagcatctttgaagacaaagagggtgaggtcttcatgagtctcctgggcccaaagccatcttctgatggaaggaagagagtagggccagtgaaggctgcccagagagaatgtcacagatgaggctgcccctgccccccccccgccagggaggtttcatgagctcatgtctatgcagcacataagggttcttcagtgaaaagcaggagaagagcccactgcaaggatagctcattaggcacatgaccgatgcagggaaggccatgccggggaagctcttcctgcaggtattttccatctgctgtgccaaggctgagcggcagaaacttgtctcataaattggcactgatggagcatcagctgtggcccacagagagccttgctgagaagggggcaggtaaagcagagattttagcattgccttggcataacaagggcccatcgattccctactaatgagaggcagggagagcatgggcaatggagacccaccaatgatccccaaccccggtgggtactggctgcctgccctgggccagggaatggctccttataccaaagatgctggcacatagcagaacccagtgcacgtcctccccttcccacccacctctggctgaaggtgctcaagagggaagcaattataaggtgggtggcaggagggaacaggtgccacctgctggacaatcacacgaaaggcaggcgggctgtgtactgggccctgactgtgcgtccactgctgtcttccctacctcaccaggctactggcagcagcatcccgagagcacatcatctccacagcctggtaaattccatgtgcctctgggtacaaaagtgcctcaacgacatgctctggaaatcccaaatgccacagtctgaggttgatatctaaaatctatgccttcaaaagagtctctgttttttttttttaacctggtagacagtataaaagcagtgcaaataaacacctaaccttctgcaaa

SEQ ID NO: 30107 - DNA, 4262 bp, Homo sapiens
  source 1..4262: mol_type = unassigned DNA
accgccttcgccgcggaccttcagctgccgcggtcgctccgagcggcgggccgcagagatgacatttattcattttatgcatcctgggttctactggtcgtcccacctcagttcctgtagcaaagagacttgagtctgagccactaattatcacccgtgaggtttcctccccgagcaggaagcagcaggccagagctgcgctctctcagtgcactctccaaccaagcatcagtcaccactcccggtccagcccctgtggccaagagctggcgtgcaggctgcgggaggcagctggctgtgcaagaccctggcagggccctcgcctcctgagaaaccgagagtcagaaccaaagccaggctgtcctggttggagactgagccagaaagggtggctcacctcacggtgaggctgtcgagtgacctgagagcctcagaccctcacgtcagccggatgtcgcaccagcctgctgttgccaccaaaatgccagaagagatggacaagccactgatcagcctccacctggtggacagcgatagtagccttgccaaggtccccgatgaggcccccaaagtgggcatcctgggtagcggggactttgcccgctccctggccacacgcctggtgggctctggcttcaaagtggtggtggggagccgcaaccccaaacgcacagccaggctgtttccctcagcggcccaagtgactttccaagaggaggcagtgagctccccggaggtcatctttgtggctgtgttccgggagcactactcttcactgtgcagtctcagtgaccagctggcgggcaagatcctggtggatgtgagcaaccctacagagcaagagcaccttcagcatcgtgagtccaatgctgagtacctggcctccctcttccccacttgcacagtggtcaaggccttcaatgtcatctctgcctggaccctgcaggctggcccaagggatggtaacaggcaggtgcccatctgcggtgaccagccagaagccaagcgtgctgtctcggagatggcgctcgccatgggcttcatgcccgtggacatgggatccctggcgtcagcctgggaggtggaggccatgcccctgcgcctcctcccggcctggaaggtgcccaccctgctggccctggggctcttcgtctgcttctatgcctacaacttcgtccgggacgttctgcagccctatgtgcaggaaagccagaacaagttcttcaagctgcccgtgtccgtggtcaacaccacactgccgtgcgtggcctacgtgctgctgtcactcgtgtacttgcccggcgtgctggcggctgccctgcagctgcggcgcggcaccaagtaccagcgcttccccgactggctggaccactggctacagcaccgcaagcagatcgggctgctcagcttcttctgcgccgccctgcacgccctctacagcttctgcttgccgctgcgccgcgcccaccgctacgacctggtcaacctggcagtcaagcaggtcttggccaacaagagccacctctgggtggaggaggaggtctggcggatggagatctacctctccctgggagtgctggccctcggcacgttgtccctgctggccgtgacctcactgccgtccattgcaaactcgctcaactggagggagttcagcttcgttcagtcctcactgggctttgtggccctcgtgctgagcacactgcacacgctcacctacggctggacccgcgccttcgaggagagccgctacaagttctacctgcctcccaccttcacgctcacgctgctggtgccctgcgtcgtcatcctggccaaagccctgtttctcctgccctgcatcagccgcagactcgccaggatccggagaggctgggagagggagagcaccatcaagttcacgctgcccacagaccacgccctggccgagaagacgagccacgtatgaggtgcctgccctgggctctggaccccgggcacacgagggacggtgccctgagcccgttaggttttcttttcttggtggtgcaaagtggtataactgtgtgcaaataggaggtttgaggtccaaattcctgggactcaaatgtatgcagtactattcagaatgatatacacacatatgtgtatatgtatttacatatattccacatatataacaggatttgcaattatacatagctagctaaaaagttgggtctctgagatttcaacttgtagatttaaaaacaagtgccgtacgttaagagaagagcagatcatgctattgtgacatttgcagagatatacacacactttttgtacagaagaggcttgtgctgtggtgggttcgatttatccctgcccaccccacccccacaacttcccttttgctacttccccaaggctcttgcagagctagggctctgaaggggagggaaggcaacggctctgcccagagccatccctggagcatgtgagcagcggctggtctcttccctccacctggggcagcagcaggaggcctggggaggaggaaaatcaggcagtcggcctggagtctgtgcctggtcctttgcccggtggtgggaggatggagggattgggctgaagctgctccacctcatccttgctgagtgggggagacattttccctgaaagtcagaagtcaccatagagcctgcaaatggatcctcctgtgagagtgacgtcacctcctttccagagccattagtgagcctggcttgggaacaagtgtaatttccttccctcctttaacctggcgatgagcgtcctttaaaccactgtgccttctcaccctttccatcttcagtttgaatgactcccaggaaggcctagagcagaccctttagaaatcagcccaagggggagagcaagagaaaacactctagggagtaaagctccccgggcgtcagagttgagccctgcctgggctgaaggactgtcttcacgaagtcagtcctgaggaaaaatattggggactccaaatgtcctctggcagaggacccagaaaaccacactggctccaacttcctcctcatggggcattacacttcaaaacagtggggagcaacttttccaccaaagctacaaacctaaaatgctgctgccccaaagcacaagagggaagagcaccgccggggccacaggacgtctgtcctccagtcacaggccatccttgctgctccctactgactctagcttacttcccctgtgaagaaacaggtgttctcggctgagcccccaaccctctgcagaaccaggttgatctgccacagaaaaagcatctttgaagacaaagagggtgaggtcttcatgagtctcctgggcccaaagccatcttctgatggaaggaagagagtagggccagtgaaggctgcccagagagaatgtcacagatgaggctgcccctgccccccccccgccagggaggtttcatgagctcatgtctatgcagcacataagggttcttcagtgaaaagcaggagaagagcccactgcaaggatagctcattaggcacatgaccgatgcagggaaggccatgccggggaagctcttcctgcaggtattttccatctgctgtgccaaggctgagcggcagaaacttgtctcataaattggcactgatggagcatcagctgtggcccacagagagccttgctgagaagggggcaggtaaagcagagattttagcattgccttggcataacaagggcccatcgattccctactaatgagaggcagggagagcatgggcaatggagacccaccaatgatccccaaccccggtgggtactggctgcctgccctgggccagggaatggctccttataccaaagatgctggcacatagcagaacccagtgcacgtcctccccttcccacccacctctggctgaaggtgctcaagagggaagcaattataaggtgggtggcaggagggaacaggtgccacctgctggacaatcacacgaaaggcaggcgggctgtgtactgggccctgactgtgcgtccactgctgtcttccctacctcaccaggctactggcagcagcatcccgagagcacatcatctccacagcctggtaaattccatgtgcctctgggtacaaaagtgcctcaacgacatgctctggaaatcccaaatgccacagtctgaggttgatatctaaaatctatgccttcaaaagagtctctgttttttttttttaacctggtagacagtataaaagcagtgcaaataaacacctaaccttctgcaaa

SEQ ID NO: 30108 - DNA, 2103 bp, Homo sapiens
  source 1..2103: mol_type = unassigned DNA
agctgccgcggtcgctccgagcggcgggccgcagagccaccaaaatgccagaagagatggacaagccactgatcagcctccacctggtggacagcgatagtagccttgccaaggtccccgatgaggcccccaaagtgggcatcctgggtagcggggactttgcccgctccctggccacacgcctggtgggctctggcttcaaagtggtggtggggagccgcaaccccaaacgcacagccaggctgtttccctcagcggcccaagtgactttccaagaggaggcagtgagctccccggaggtcatctttgtggctgtgttccgggagcactactcttcactgtgcagtctcagtgaccagctggcgggcaagatcctggtggatgtgagcaaccctacagagcaagagcaccttcagcatcgtgagtccaatgctgagtacctggcctccctcttccccacttgcacagtggtcaaggccttcaatgtcatctctgcctggaccctgcaggctggcccaagggatggtaacaggcaggtgcccatctgcggtgaccagccagaagccaagcgtgctgtctcggagatggcgctcgccatgggcttcatgcccgtggacatgggatccctggcgtcagcctgggaggtggaggccatgcccctgcgcctcctcccggcctggaaggtgcccaccctgctggccctggggctcttcgtctgcttctatgcctacaacttcgtccgggacgttctgcagccctatgtgcaggaaagccagaacaagttcttcaagctgcccgtgtccgtggtcaacaccacactgccgtgcgtggcctacgtgctgctgtcactcgtgtacttgcccggcgtgctggcggctgccctgcagctgcggcgcggcaccaagtaccagcgcttccccgactggctggaccactggctacagcaccgcaagcagatcgggctgctcagcttcttctgcgccgccctgcacgccctctacagcttctgcttgccgctgcgccgcgcccaccgctacgacctggtcaacctggcagtcaagcaggtcttggccaacaagagccacctctgggtggaggaggaggtctggcggatggagatctacctctccctgggagtgctggccctcggcacgttgtccctgctggccgtgacctcactgccgtccattgcaaactcgctcaactggagggagttcagcttcgttcagtgtgtggcaacttccagtgcaggaaacacaggcagtggaacccgaagacctgaatctcagtcccaagacccccacttacctgccccgcatcatcagacaagtttcctaggccctcggagcttctgctgctcacttgtgcctgtgtccaccccatatggtcatcaagaggatttgagctggacacgttaaatgcaggatgcgtgcagccaacagtggcatgctggcttttgagtcctcactgggctttgtggccctcgtgctgagcacactgcacacgctcacctacggctggacccgcgccttcgaggagagccgctacaagttctacctgcctcccaccttcacgctcacgctgctggtgccctgcgtcgtcatcctggccaaagccctgtttctcctgccctgcatcagccgcagactcgccaggatccggagaggctgggagagggagagcaccatcaagttcacgctgcccacagaccacgccctggccgagaagacgagccacgtatgaggtgcctgccctgggctctggaccccgggcacacgagggacggtgccctgagcccgttaggttttcttttcttggtggtgcaaagtggtataactgtgtgcaaataggaggtttgaggtccaaattcctgggactcaaatgtatgcagtactattcagaatgatatacacacatatgtgtatatgtatttacatatattccacatatataacaggatttgcaattatacatagctagctaaaaagttgggtctctgagatttcaacttgtagatttaaaaacaagtgccgtacgttaagagaagagcagatcatgctattgtgacatttgcagagatatacacacactttttgtacagaa

SEQ ID NO: 30109 - DNA, 3852 bp, Homo sapiens
  source 1..3852: mol_type = unassigned DNA
tcaagcgattctcctgccttgacctcctgaagtgctaagattacaggtgtgagccactgcacgcagccaccaaaatgccagaagagatggacaagccactgatcagcctccacctggtggacagcgatagtagccttgccaaggtccccgatgaggcccccaaagtgggcatcctgggtagcggggactttgcccgctccctggccacacgcctggtgggctctggcttcaaagtggtggtggggagccgcaaccccaaacgcacagccaggctgtttccctcagcggcccaagtgactttccaagaggaggcagtgagctccccggaggtcatctttgtggctgtgttccgggagcactactcttcactgtgcagtctcagtgaccagctggcgggcaagatcctggtggatgtgagcaaccctacagagcaagagcaccttcagcatcgtgagtccaatgctgagtacctggcctccctcttccccacttgcacagtggtcaaggccttcaatgtcatctctgcctggaccctgcaggctggcccaagggatggtaacaggcaggtgcccatctgcggtgaccagccagaagccaagcgtgctgtctcggagatggcgctcgccatgggcttcatgcccgtggacatgggatccctggcgtcagcctgggaggtggaggccatgcccctgcgcctcctcccggcctggaaggtgcccaccctgctggccctggggctcttcgtctgcttctatgcctacaacttcgtccgggacgttctgcagccctatgtgcaggaaagccagaacaagttcttcaagctgcccgtgtccgtggtcaacaccacactgccgtgcgtggcctacgtgctgctgtcactcgtgtacttgcccggcgtgctggcggctgccctgcagctgcggcgcggcaccaagtaccagcgcttccccgactggctggaccactggctacagcaccgcaagcagatcgggctgctcagcttcttctgcgccgccctgcacgccctctacagcttctgcttgccgctgcgccgcgcccaccgctacgacctggtcaacctggcagtcaagcaggtcttggccaacaagagccacctctgggtggaggaggaggtctggcggatggagatctacctctccctgggagtgctggccctcggcacgttgtccctgctggccgtgacctcactgccgtccattgcaaactcgctcaactggagggagttcagcttcgttcagtcctcactgggctttgtggccctcgtgctgagcacactgcacacgctcacctacggctggacccgcgccttcgaggagagccgctacaagttctacctgcctcccaccttcacgctcacgctgctggtgccctgcgtcgtcatcctggccaaagccctgtttctcctgccctgcatcagccgcagactcgccaggatccggagaggctgggagagggagagcaccatcaagttcacgctgcccacagaccacgccctggccgagaagacgagccacgtatgaggtgcctgccctgggctctggaccccgggcacacgagggacggtgccctgagcccgttaggttttcttttcttggtggtgcaaagtggtataactgtgtgcaaataggaggtttgaggtccaaattcctgggactcaaatgtatgcagtactattcagaatgatatacacacatatgtgtatatgtatttacatatattccacatatataacaggatttgcaattatacatagctagctaaaaagttgggtctctgagatttcaacttgtagatttaaaaacaagtgccgtacgttaagagaagagcagatcatgctattgtgacatttgcagagatatacacacactttttgtacagaagaggcttgtgctgtggtgggttcgatttatccctgcccaccccacccccacaacttcccttttgctacttccccaaggctcttgcagagctagggctctgaaggggagggaaggcaacggctctgcccagagccatccctggagcatgtgagcagcggctggtctcttccctccacctggggcagcagcaggaggcctggggaggaggaaaatcaggcagtcggcctggagtctgtgcctggtcctttgcccggtggtgggaggatggagggattgggctgaagctgctccacctcatccttgctgagtgggggagacattttccctgaaagtcagaagtcaccatagagcctgcaaatggatcctcctgtgagagtgacgtcacctcctttccagagccattagtgagcctggcttgggaacaagtgtaatttccttccctcctttaacctggcgatgagcgtcctttaaaccactgtgccttctcaccctttccatcttcagtttgaatgactcccaggaaggcctagagcagaccctttagaaatcagcccaagggggagagcaagagaaaacactctagggagtaaagctccccgggcgtcagagttgagccctgcctgggctgaaggactgtcttcacgaagtcagtcctgaggaaaaatattggggactccaaatgtcctctggcagaggacccagaaaaccacactggctccaacttcctcctcatggggcattacacttcaaaacagtggggagcaacttttccaccaaagctacaaacctaaaatgctgctgccccaaagcacaagagggaagagcaccgccggggccacaggacgtctgtcctccagtcacaggccatccttgctgctccctactgactctagcttacttcccctgtgaagaaacaggtgttctcggctgagcccccaaccctctgcagaaccaggttgatctgccacagaaaaagcatctttgaagacaaagagggtgaggtcttcatgagtctcctgggcccaaagccatcttctgatggaaggaagagagtagggccagtgaaggctgcccagagagaatgtcacagatgaggctgcccctgccccccccccgccagggaggtttcatgagctcatgtctatgcagcacataagggttcttcagtgaaaagcaggagaagagcccactgcaaggatagctcattaggcacatgaccgatgcagggaaggccatgccggggaagctcttcctgcaggtattttccatctgctgtgccaaggctgagcggcagaaacttgtctcataaattggcactgatggagcatcagctgtggcccacagagagccttgctgagaagggggcaggtaaagcagagattttagcattgccttggcataacaagggcccatcgattccctactaatgagaggcagggagagcatgggcaatggagacccaccaatgatccccaaccccggtgggtactggctgcctgccctgggccagggaatggctccttataccaaagatgctggcacatagcagaacccagtgcacgtcctccccttcccacccacctctggctgaaggtgctcaagagggaagcaattataaggtgggtggcaggagggaacaggtgccacctgctggacaatcacacgaaaggcaggcgggctgtgtactgggccctgactgtgcgtccactgctgtcttccctacctcaccaggctactggcagcagcatcccgagagcacatcatctccacagcctggtaaattccatgtgcctctgggtacaaaagtgcctcaacgacatgctctggaaatcccaaatgccacagtctgaggttgatatctaaaatctatgccttcaaaagagtctctgttttttttttttaacctggtagacagtataaaagcagtgcaaataaacacctaaccttctgc

SEQ ID NO: 30110 - DNA, 1878 bp, Homo sapiens
  source 1..1878: mol_type = unassigned DNA
gaggaggagcctcgggccgagccaccgccttcgccgcggaccttcagctgccgcggtcgctccgagcggcgggccgcagagatgacatttattcattttatgcatcctgggttctactggtcgtcccacctcagttcctgtagcaaagagacttgagtctgagccactaattatcacccgtgaggtttcctccccgagcaggaagcagcaggccagagctgcgctctctcagtgcactctccaaccaagcatcagtcaccactcccggtccagcccctgtggccaagagctggcgtgcaggctgcgggaggcagctggctgtgcaagaccctggcagggccctcgcctcctgagaaaccgagagtcagaaccaaagccaggctgtcctggttggagactgagccagaaagggtggctcacctcacggtgaggctgtcgagtgacctgagagcctcagaccctcacgtcagccggatgtcgcaccagcctgctgttgccaccaaaatgccagaagagatggacaagccactgatcagcctccacctggtggacagcgatagtagccttgccaaggtccccgatgaggcccccaaagtgggcatcctgggtagcggggactttgcccgctccctggccacacgcctggtgggctctggcttcaaagtggtggtggggagccgcaaccccaaacgcacagccaggctgtttccctcagcggcccaagtgactttccaagaggaggcagtgagctccccggaggtcatctttgtggctgtgttccgggagcactactcttcactgtgcagtctcagtgaccagctggcgggcaagatcctggtggatgtgagcaaccctacagagcaagagcaccttcagcatcgtgagtccaatgctgagtacctggcctccctcttccccacttgcacagtggtcaaggccttcaatgtcatctctgcctggaccctgcaggctggcccaagggatggtaacaggcaggtgcccatctgcggtgaccagccagaagccaagcgtgctgtctcggagatggcgctcgccatgggcttcatgcccgtggacatgggatccctggcgtcagcctgggaggtggaggccatgcccctgcgcctcctcccggcctggaaggtgcccaccctgctggccctggggctcttcgtctgcttctatgcctacaacttcgtccgggacgttctgcagccctatgtgcaggaaagccagaacaagttcttcaagctgcccgtgtccgtggtcaacaccacactgccgtgcgtggcctacgtgctgctgtcactcgtgtacttgcccggcgtgctggcggctgccctgcagctgcggcgcggcaccaagtaccagcgcttccccgactggctggaccactggctacagcaccgcaagcagatcgggctgctcagcttcttctgcgccgccctgcacgccctctacagcttctgcttgccgctgcgccgcgcccaccgctacgacctggtcaacctggcagtcaagcaggtcttggccaacaagagccacctctgggtggaggaggaggtctggcggatggagatctacctctccctgggagtgctggccctcggcacgttgtccctgctggccgtgacctcactgccgtccattgcaaactcgctcaactggagggagttcagcttcgttcagtgtgtggcaacttccagtgcaggaaacacaggcagtggaacccgaagacctgaatctcagtcccaagacccccacttacctgccccgcatcatcagacaagtttcctaggccctcggagcttctgctgctcacttgtgcctgtgtccaccccatatggtcatcaagaggatttgagctggacacgttaa

SEQ ID NO: 30111 - DNA, 2826 bp, Homo sapiens
  source 1..2826: mol_type = unassigned DNA
ctggctggaccactggctacagcaccgcaagcagatcgggctgctcagcttcttctgcgccgccctgcacgccctctacagcttctgcttgccgctgcgccgcgcccaccgctacgacctggtcaacctggcagtcaagcaggtcttggccaacaagagccacctctgggtggaggaggaggtctggcggatggagatctacctctccctgggagtgctggccctcggcacgttgtccctgctggccgtgacctcactgccgtccattgcaaactcgctcaactggagggagttcagcttcgttcagtcctcactgggctttgtggccctcgtgctgagcacactgcacacgctcacctacggctggacccgcgccttcgaggagagccgctacaagttctacctgcctcccaccttcacgctcacgctgctggtgccctgcgtcgtcatcctggccaaagccctgtttctcctgccctgcatcagccgcagactcgccaggatccggagaggctgggagagggagagcaccatcaagttcacgctgcccacagaccacgccctgagcccgttaggttttcttttcttggtggtgcaaagtggtataactgtgtgcaaataggaggtttgaggtccaaattcctgggactcaaatgtatgcagtactattcagaatgatatacacacatatgtgtatatgtatttacatatattccacatatataacaggatttgcaattatacatagctagctaaaaagttgggtctctgagatttcaacttgtagatttaaaaacaagtgccgtacgttaagagaagagcagatcatgctattgtgacatttgcagagatatacacacactttttgtacagaagaggcttgtgctgtggtgggttcgatttatccctgcccaccccacccccacaacttcccttttgctacttccccaaggctcttgcagagctagggctctgaaggggagggaaggcaacggctctgcccagagccatccctggagcatgtgagcagcggctggtctcttccctccacctggggcagcagcaggaggcctggggaggaggaaaatcaggcagtcggcctggagtctgtgcctggtcctttgcccggtggtgggaggatggagggattgggctgaagctgctccacctcatccttgctgagtgggggagacattttccctgaaagtcagaagtcaccatagagcctgcaaatggatcctcctgtgagagtgacgtcacctcctttccagagccattagtgagcctggcttgggaacaagtgtaatttccttccctcctttaacctggcgatgagcgtcctttaaaccactgtgccttctcaccctttccatcttcagtttgaatgactcccaggaaggcctagagcagaccctttagaaatcagcccaagggggagagcaagagaaaacactctagggagtaaagctccccgggcgtcagagttgagccctgcctgggctgaaggactgtcttcacgaagtcagtcctgaggaaaaatattggggactccaaatgtcctctggcagaggacccagaaaaccacactggctccaacttcctcctcatggggcattacacttcaaaacagtggggagcaacttttccaccaaagctacaaacctaaaatgctgctgccccaaagcacaagagggaagagcaccgccggggccacaggacgtctgtcctccagtcacaggccatccttgctgctccctactgactctagcttacttcccctgtgaagaaacaggtgttctcggctgagcccccaaccctctgcagaaccaggttgatctgccacagaaaaagcatctttgaagacaaagagggtgaggtcttcatgagtctcctgggcccaaagccatcttctgatggaaggaagagagtagggccagtgaaggctgcccagagagaatgtcacagatgaggctgcccctgccccccccccgccagggaggtttcatgagctcatgtctatgcagcacataagggttcttcagtgaaaagcaggagaagagcccactgcaaggatagctcattaggcacatgaccgatgcagggaaggccatgccggggaagctcttcctgcaggtattttccatctgctgtgccaaggctgagcggcagaaacttgtctcataaattggcactgatggagcatcagctgtggcccacagagagccttgctgagaagggggcaggtaaagcagagattttagcattgccttggcataacaagggcccatcgattccctactaatgagaggcagggagagcatgggcaatggagacccaccaatgatccccaaccccggtgggtactggctgcctgccctgggccagggaatggctccttataccaaagatgctggcacatagcagaacccagtgcacgtcctccccttcccacccacctctggctgaaggtgctcaagagggaagcaattataaggtgggtggcaggagggaacaggtgccacctgctggacaatcacacgaaaggcaggcgggctgtgtactgggccctgactgtgcgtccactgctgtcttccctacctcaccaggctactggcagcagcatcccgagagcacatcatctccacagcctggtaaattccatgtgcctctgggtacaaaagtgcctcaacgacatgctctggaaatcccaaatgccacagtctgaggttgatatctaaaatctatgccttcaaaagagtctctgttttttttttttaacctggtagacagtataaaagcagtgcaaataaacacctaaccttctgc

SEQ ID NO: 30112 - DNA, 2321 bp, Homo sapiens
  source 1..2321: mol_type = unassigned DNA
gagctgcaggcgcggcgaaacttccctctacccgcccggcccgcggcgcgcaccgttggcgctggacgcttcctccttggaagcgcctctccctcagttatggagaaaacttgtatagatgcacttcctcttactatgaattcttcagaaaagcaagagactgtatgtatttttggaactggtgattttggaagatcactgggattgaaaatgctccagtgtggttattctgttgtttttggaagtcgaaacccccagaagaccaccctactgcccagtggtgcagaagtcttgagctattcagaagcagccaagaagtctggcatcataatcatagcaatccacagagagcattatgattttctcacagaattaactgaggttctcaatggaaaaatattggtagacatcagcaacaacctcaaaatcaatcaatatccagaatctaatgcagagtaccttgctcatttggtgccaggagcccacgtggtaaaagcatttaacaccatctcagcctgggctctccagtcaggagcactggatgcaagtcggcaggcaatactcaagaaggagaatccatttagcacctcctcagcctggctcagtgattcatatgtggctttgggaatacttgggttttttctgtttgtactcttgggaatcacttctttgccatctgttagcaatgcagtcaactggagagagttccgatttgtccagtccaaactgggttatttgaccctgatcttgtgtacagcccacaccctggtgtacggtgggaagagattcctcagcccttcaaatctcagatggtatcttcctgcagcctacgtgttagggcttatcattccttgcactgtgctggtgatcaagtttgtcctaatcatgccatgtgtagacaacacccttacaaggatccgccagggctgggaaaggaactcaaaacactagaaaaagcattgaatggaaaatcaatatttaaaacaaagttcaatttagctggatttctgaactatggttttgaatgtttaaagaagaatgatgggtacagttaggaaagtttttttcttacaccgtgactgagggaaacattgcttgtctttgagaaattgactgacatactggaagagaacaccattttatctcaggttagtgaagaatcagtgcaggtccctgactcttattttcccagaggccatggagctgagattgagactagccttgtggtttcacactaaagagtttccttgttatgggcaacatgcatgacctaatgtcttgcaaaatccaatagaagtattgcagcttccttctctggctcaagggctgagttaagtgaaaggaaaaacagcacaatggtgaccactgataaaggctttattaggtatatctgaggaagtgggtcacatgaaatgtaaaaagggaatgaggtttttgttgttttttggaagtaaaggcaaacataaatattaccatgatgaattctagtgaaatgaccccttgactttgcttttcttaatacagatatttactgagaggaactatttttataacacaagaaaaatttacaattgattaaaagtatccatgtcttggatacatacgtatctatagagctggcatgtaattcttcctctataaagaataggtataggaaagactgaataaaaatggagggatatccccttggatttcacttgcattgtgcaataagcaaagaagggttgataaaagttcttgatcaaaaagttcaaagaaaccagaattttagacagcaagctaaataaatattgtaaaattgcactatattaggttaagtattatttaggtattataatatgctttgtaaattttatattccaaatattgctcaatatttttcatctattaaattaatttctagtgtaaataagtagcttctatatctgtcttagtctattataattgtaaggagtaaaattaaatgaatagtctgcaggtataaatttgaacaatgcatagatgatcgaaaattacggaaaatcatagggcagagaggtgtgaagattcatcattatgtgaaatttggatctttctcaaatccttgctgaaatttaggatggttctcactgtttttctgtgctgatagtaccctttccaaggtgaccttcagggggattaaccttcctagctcaagcaatgagctaaaaggagccttatgcatgatcttcccacatatcaaaataactaaaaggcactgagtttggcatttttctgcctgctctgctaagacctttttttttttttactttcattataacatattatacatgacattatac

SEQ ID NO: 30113 - DNA, 9988 bp, Homo sapiens
  source 1..9988: mol_type = unassigned DNA
gctgagctgcaggcgcggcgaaacttccctctacccgcccggcccgcggcgcgcaccgttggcgctggacgcttcctccttggaagcgcctctccctcagttatggagaaaacttgtatagatgcacttcctcttactatgaattcttcagaaaagcaagagactgtatgtatttttggaactggtgattttggaagatcactgggattgaaaatgctccagtgtggttattctgttgtttttggaagtcgaaacccccagaagaccaccctactgcccagtggtgcagaagtcttgagctattcagaagcagccaagaagtctggcatcataatcatagcaatccacagagagcattatgattttctcacagaattaactgaggttctcaatggaaaaatattggtagacatcagcaacaacctcaaaatcaatcaatatccagaatctaatgcagagtaccttgctcatttggtgccaggagcccacgtggtaaaagcatttaacaccatctcagcctgggctctccagtcaggagcactggatgcaagtcggcaggtgtttgtgtgtggaaatgacagcaaagccaagcaaagagtgatggatattgttcgtaatcttggacttactccaatggatcaaggatcactcatggcagccaaagaaattgaaaagtaccccctgcagctatttccaatgtggaggttccccttctatttgtctgctgtgctgtgtgtcttcttgtttttctattgtgttataagagacgtaatctacccttatgtttatgaaaagaaagataatacatttcgtatggctatttccattccaaatcgtatctttccaataacagcacttacactgcttgctttggtttacctccctggtgttattgctgccattctacaactgtaccgaggcacaaaataccgtcgattcccagactggcttgaccactggatgctttgccgaaagcagcttggcttggtagctctgggatttgccttccttcatgtcctctacacacttgtgattcctattcgatattatgtacgatggagattgggaaacttaaccgttacccaggcaatactcaagaaggagaatccatttagcacctcctcagcctggctcagtgattcatatgtggctttgggaatacttgggttttttctgtttgtactcttgggaatcacttctttgccatctgttagcaatgcagtcaactggagagagttccgatttgtccagtccaaactgggttatttgaccctgatcttgtgtacagcccacaccctggtgtacggtgggaagagattcctcagcccttcaaatctcagatggtatcttcctgcagcctacgtgttagggcttatcattccttgcactgtgctggtgatcaagtttgtcctaatcatgccatgtgtagacaacacccttacaaggatccgccagggctgggaaaggaactcaaaacactagaaaaagcattgaatggaaaatcaatatttaaaacaaagttcaatttagctggatttctgaactatggttttgaatgtttaaagaagaatgatgggtacagttaggaaagtttttttcttacaccgtgactgagggaaacattgcttgtctttgagaaattgactgacatactggaagagaacaccattttatctcaggttagtgaagaatcagtgcaggtccctgactcttattttcccagaggccatggagctgagattgagactagccttgtggtttcacactaaagagtttccttgttatgggcaacatgcatgacctaatgtcttgcaaaatccaatagaagtattgcagcttccttctctggctcaagggctgagttaagtgaaaggaaaaacagcacaatggtgaccactgataaaggctttattaggtatatctgaggaagtgggtcacatgaaatgtaaaaagggaatgaggtttttgttgttttttggaagtaaaggcaaacataaatattaccatgatgaattctagtgaaatgaccccttgactttgcttttcttaatacagatatttactgagaggaactatttttataacacaagaaaaatttacaattgattaaaagtatccatgtcttggatacatacgtatctatagagctggcatgtaattcttcctctataaagaataggtataggaaagactgaataaaaatggagggatatccccttggatttcacttgcattgtgcaataagcaaagaagggttgataaaagttcttgatcaaaaagttcaaagaaaccagaattttagacagcaagctaaataaatattgtaaaattgcactatattaggttaagtattatttaggtattataatatgctttgtaaattttatattccaaatattgctcaatatttttcatctattaaattaatttctagtgtaaataagtagcttctatatctgtcttagtctattataattgtaaggagtaaaattaaatgaatagtctgcaggtataaatttgaacaatgcatagatgatcgaaaattacggaaaatcatagggcagagaggtgtgaagattcatcattatgtgaaatttggatctttctcaaatccttgctgaaatttaggatggttctcactgtttttctgtgctgatagtaccctttccaaggtgaccttcagggggattaaccttcctagctcaagcaatgagctaaaaggagccttatgcatgatcttcccacatatcaaaataactaaaaggcactgagtttggcatttttctgcctgctctgctaagacctttttttttttttactttcattataacatattatacatgacattatacaaaaatgattaaaatatattaaaacaacatcaacaatccaggatatttttctataaaactttttaaaaataattgtatctatatattcaattttacatcctttttcaaaggctttgtttttctaaaggctttgttttcctttttattatttttttcttttttatttttttgagacagtcttgctctgtcgctcaggctggagtgcagtggcacgatctcagctcactgcaacctcctcctcccaggttcaagtgattcttgttcatcagcctcccgagtagctgggactacaggcatgtgccactatgcccagctaatttttgtacttttagtagagacagggtttcaccacattggtcaggctggtcttgaaatgctggcgtcaagtgatctgcctgcctccgcctcacaaagcactgggattacaggcatgaatctggccttacgtaatatattttcttaatggctgcataatatcacatcaaataggcatttttcaaacctctttccttattaaacatgtagactatatccattttttactaaaataaataacatttcagataatatctttgcactgataatgttgccaagccatttctaaagtgaccttatcaatttaattaccattggatgagggtgttgctttcatcgcaccattgtagattgtcttttttatttcaatttgcgtttatttataactggttgcaaaggtacacagaacacacgctccttcaacttatctttgataaacccaagcaaggatacaaaaagttggacgacattgagtagagtcatggtatacggtgctgaccctacagtatcagtggaaaagataaggaaaatgtcactactcacctatgttatgcaaaacagttaggtgtgctggggctggatactgctcttttacttgagcattggttgattaaagtttaggtaccatccaggctggtctagagaagtctttggagttaaccatgctctttttgttaaagaagagagtaatgtgtttatcctggctcatagtccgtcaccgaaaatagaaaatgccatccataggtaaaatgctgacctatagaaaaaaatgaactctacttttatagcctagtaaaaatgctctacctgagtagttaaaagcaattcatgaagcctgaagctaaagagcactctgatggttttggcataatagctgcatttccagacctgacctttggccccaaccacaagtgctccaagccccaccagctgaccaaagaaagcccaagttctccttctgtccttcccacaacctccctgctcccaaaactatgaaattaatttgaccatattaacacagctgactcctccagtttacttaaggtagaaagaatgagtttacaacagatgaaaataagtgctttgggcgaactgtattccttttaacagatccaaactattttacatttaaaaaaaaagttaaactaaacttctttactgctgatatgtttcctgtattctagaaaaatttttacactttcacattatttttgtacactttccccatgttaagggatgatggcttttataaatgtgtattcattaaatgttactttaaaaatatttcctagttttgtttaattctggttttaactcatcagcattccaaataaagttactaaaaggttttgaatcacagtagttccagcatctgggactaaaaatacttcccttcagggataagcaaaagagaaggcagtgcatgggtttgaaagtgcattaacagatctgcagcttcttgcaatgtaagcttgagctcagcggggtggcacagtccagtatgctgtgtgtgcttcagtattaccctcagagaggggagagcatcagatggctaaatggggaggactgcactatcccacgctggatttttgtgagaatttggaggtaaaaaaggctttccttctccatgcagacgccacagggataaggctaatggcttgacaagcagacttcaggttggattcagactgcgtgactgggcattaaatgccttgcacaactggactgctgcagctctgatgggtgttatcctgctttcaaaaatagtattaaaacttacaaataaagagaggactgacaacctggaggaagctggaagcaaatggaaagcccctactgaaaaagccatttcaattagaaattcattcaggagctcttcattcatctattgttcagggatcacaaaagagccatgataatgataaatgcatattatgcatttcacctctgagagcataaaagcttctggaactctgttccaaaattaaggtgtaatggcagtcatggtactgcacacagtagttgcaattttcattctccatcatcacaaccatcatcttcactaccacttctccaacacacacacacacacacacacacacacacacacaccccatgagagcccacagatagccttacagggtcctacttcaattttctataatgaattaggtttacattctagaaaaatccttcactcttctaaaggtttgttcagtagaatttgggaaaagagtataagttactcttcaatgtatcagaagcatttggaccaggtgactccatcttcaatagaggctgagtaaaataagcctgagactggccgggcgcagtgactcacacctgtaatcccagcactttgggaggccaagtcaggtggatcacctgaggtcaggagtttgagaccagcctggccaacatggtgaaaccccatctctactaaaaatataaaaaattagccagcatggtggcgcatgcctgtaatcccagctactctggaggctgaggcaggagaagtgcttggacccaggaagcagaggttacaatgagccaagatcgcgccattgcactccagcctgggtgacaagagtgaaactccgtctcaaaataaataaataaataaataagactgagacctactgggctgcattcccaggacagcaggtgttcttagtcacaggatgagataggagtaagcacaaggtacaggtcacaaagaccttgctgataaaacaggatgcaataaagaagccgtccaaaacctaccaaaaccaagatggcaatgaaagtgatctttggctgtctcagctgttcattatatgctaattataatatattagcagcctaaaatacactcccactagcaccatgacagtttacaaattccatggccacatccagaagttaccctatatgttctaaaagcaggaggagccctcagttctgggaatcatctgcccctttcctgaacatctcatgaataatccatcccttgtttagcatataatcaagaaataactataactatactcagccaggcagcccatgccactgctctgcctatgaaatagcccttttattcctttacagtcttaataaacttgctttcattttatggattcacctcaaattctttcttgtgcaagatccaagaactctctcttggggtctgtattggaccccctttctggtaacatatgcattacctctcctcaagctcgaggcaaagtcctaaagtttcggataagacccatatgagggaggtgaaggatgaagggattgagggcaaagggactgagaaaaggggagtgtggaagagcaagacagtgctcttgccattacccagcaaaagccaaaaggatccagtactacttgctttctgctgtaagggaattttggaaggcttttaatgatacttacagcagagtgccatgcgtaaagcctatgctaacaatttcacatgcattatcttatttaatcctcataacagttctctaaggttctcttcttatccttatttatcagaagaggaaactgagctttgaaatctcagtactttgactaagttcacacaactaatgagaggcagagctgggatctaggcagtctgactccaggcccatctccttttaacacaacgatataataggggacacccatgctgtcctcttaaatgtccctttgaatccacaaaatagactaagtgaacgaaaccactgcaactcttcttaaaaacatttttaaagacaagaagcttattcgcattttaaatattcctgattgcccagtcctcaatactccaggtttatctatgctgatttcaattcgtcctctaaggttgtagaaacacaggatctgtggttcccgcattaagttcaattccattgcaattgccattttaatcttcccactctagtctggccacaaggtttcctaaactctaaagggagctttgttctggtggagggaggtaaaatccccagacctgaggactcgaaggggcagtcaaggagaggatagctcttctccagagcttaaaggcaaatattttctttttccctggtttctcaccttattgctttgtgtactgagtgaacttatttgtttttgagatccagtaacccatgcaagaaatttcataacacttctcatttagtactttaatactagttgaagaatctagggttacacacacacacacacacacacaccaggcttagttccattacctatagctgtaaaaatgagatttttttctcagttttgtgaaaatgaaaggctgctggactggaactcacagtattgtatatcaaaaagtatcagattgtgataaaatagaaacccagaattaaacttggccttatgatttttagaaagtcaacagattttgaaggagcccacccagtgtattcatttcatttttactaatcctttctttcatgctaagatagagatgaaaaagaatgacagacttcctgttctcatttcattacagcaaaataaataagttttagtgttccatagctctgtaggatgactatagttaaaaataacatataatttcaaatagccaggaggacattgactgttcccaacacaaagaaatgataaatgtttgcaatgatggatatgctaattacactgatctgatcactatacattgtacatacataaacatgactatgtacctcatggatatgtacaactgttatttgtcagttttagaaaataaaaaagcagaagagatctgctaccaaatgcaggaattttctatagagtctgttatagctagccttctacaggcttaactcttctcatgatggagtattgaccatcaccaacaggaaatcttttgttttaggcactccaggaaattatcagggagttctctctgtagataaccaaagtttccctagttgtacttctacccatttttcttagtgtgatcatttaaagcagtgcctcaccaactatcagagatgggggccagtaatttttgtttcatttttttccagttcattacaaatcaatgcatatgtctgtaaaacacaaaatcacacccttaaatgtgatggcaacatcaaattgccataaaagtttctaaacttttcaccccaatttctgaatttatcacagactggtaaaaaacagctcacaagccagcaccacgggcagaccacactttgcacagtgctcaaacgtaggcctaacaacctggcttggcttggcacttctaaaaaccgatcctgaggcaaggcttcttgtaaaagagtttatactggaagttaaaaatcatcaaattattagatactgggaatggagtagtaaagtagacagagcagggaaggaataaagtatgaattttcaagctggttacccatctgggcaactggagctcagttttgctgggaaagtctggaagacagtgtcagatataactaagagttattcccatcaaggggaaaggaaactgtgcttttcatccaccaaatccttgcttaacattggaatacagatgcttccaagacattaactttgtggcacttctggcttttcctacacacttattgtgtatgccaccatgtctagggggaaaaaggcccacaggcaaagaggtaccagcattcataccaccagctttcagcttgtagaggtggccgccaagaggaactcgtagttggcagtgccaactacaactactacaccaaccagctggaaactatacaaagagtatgaacaaagttcacaggagaaacaaggctctgcaacatatgaaaatatattctacttcattcataatgagacgcatgaaaattgtaactgtatcaataccatttctcacctagtagatgggcaaaaatccaaatgtttgagcacacattctgtgggtgaggctgtggaaacgtaggttcacatacattgctcttggatatgcagattaggaccgctcctgtggagagcagttagggaatatctttcaaaattaaaaaatgcagagttaagttttgatccaggagtctcactcctgagaatttatgctatagatatgcctacaagcatttgagatgaaaaagaagcattgctatttgtttttcttgtttttcatgaataacattgtaaaagtagaatatgggcagtgattcaagcattcatctttgggactggttaaggaaactatgatgctttcacagaatgaaattctatgcagctgtttaaaacaaaccaagacaccttctttcacatatatggaaagatgtccaaaatatactgttcagtttttaaaaaggtacaaaataacatatatagtatgattccttttgcatatgtgtatttgcttttaattgcctaaagaaactctcagaaggattcaaaagatccataccaaacaagatgggagaacagaggagtagtgacaggagtagaagcactgtagaccttttcatatcattttggtttttaaattacatgagtaggttacctaattattaaaataaatttaatttaaaaggtaatgggggataggaagaaatttgttaaaagatacaaaattacagctagataggaagattaagttgtagtgttctatagctctgtaggatgactacagttaacaataatatatattctaaatagctagaaggaggatattgaatgttctcaacagaaagaaatgataaatgcttaagatgatggatatactaattaccctaatctgatcactgtatattttgtgtattgcaatgtcactatgtaccccataaatatgtataattatcgtgtgtcaattaaaaatttttaattaaaaaattataaacaaaaaa

SEQ ID NO: 30114 - DNA, 5362 bp, Homo sapiens
  source 1..5362: mol_type = unassigned DNA
gtggtgtcggtgtcggcagcatccccggcgccctgctgcggtcgccgcgagcctcggcctctgtctcctccccctcccgcccttacctccacgcgggaccgcccgcgccagtcaactcctcgcactttgcccctgcttggcagcggataaaagggggctgaggaaataccggacacggtcacccgttgccagctctagcctttaaattcccggctcggggacctccacgcaccgcggctagcgccgacaaccagctagcgtgcaaggcgccgcggctcagcgcgtaccggcgggcttcgaaaccgcagtcctccggcgaccccgaactccgctccggagcctcagccccctggaaagtgatcccggcatccgagagccaagatgccggcccacttgctgcaggacgatatctctagctcctataccaccaccaccaccattacagcgcctccctccagggtcctgcagaatggaggagataagttggagacgatgcccctctacttggaagacgacattcgccctgatataaaagatgatatatatgaccccacctacaaggataaggaaggcccaagccccaaggttgaatatgtctggagaaacatcatccttatgtctctgctacacttgggagccctgtatgggatcactttgattcctacctgcaagttctacacctggctttggggggtattctactattttgtcagtgccctgggcataacagcaggagctcatcgtctgtggagccaccgctcttacaaagctcggctgcccctacggctctttctgatcattgccaacacaatggcattccagaatgatgtctatgaatgggctcgtgaccaccgtgcccaccacaagttttcagaaacacatgctgatcctcataattcccgacgtggctttttcttctctcacgtgggttggctgcttgtgcgcaaacacccagctgtcaaagagaaggggagtacgctagacttgtctgacctagaagctgagaaactggtgatgttccagaggaggtactacaaacctggcttgctgatgatgtgcttcatcctgcccacgcttgtgccctggtatttctggggtgaaacttttcaaaacagtgtgttcgttgccactttcttgcgatatgctgtggtgcttaatgccacctggctggtgaacagtgctgcccacctcttcggatatcgtccttatgacaagaacattagcccccgggagaatatcctggtttcacttggagctgtgggtgagggcttccacaactaccaccactcctttccctatgactactctgccagtgagtaccgctggcacatcaacttcaccacattcttcattgattgcatggccgccctcggtctggcctatgaccggaagaaagtctccaaggccgccatcttggccaggattaaaagaaccggagatggaaactacaagagtggctgagtttggggtccctcaggttcctttttcaaaaaccagccaggcagaggttttaatgtctgtttattaactactgaataatgctaccaggatgctaaagatgatgatgttaacccattccagtacagtattcttttaaaattcaaaagtattgaaagccaacaactctgcctttatgatgctaagctgatattatttcttctcttatcctctctctcttctaggcccattgtcctccttttcactttattgctatcgccctcctttcccttattgcctcccaggcaagcagctggtcagtctttgctcagtgtccagcttccaaagcctagacaacctttctgtagcctaaaacgaatggtctttgctccagataactctctttccttgagctgttgtgagctttgaagtaggtggcttgagctagagataaaacagaatcttctgggtagtcccctgttgattatcttcagcccaggcttttgctagatggaatggaaaagcaacttcatttgacacaaagcttctaaagcaggtaaattgtcgggggagagagttagcatgtatgaatgtaaggatgagggaagcgaagcaagaggaacctctcgccatgatcagacatacagctgcctacctaatgaggacttcaagccccaccacatagcatgcttcctttctctcctggctcggggtaaaaagtggctgcggtgtttggcaatgctaattcaatgccgcaacatatagttgaggccgaggataaagaaaagacattttaagtttgtagtaaaagtggtctctgctggggaagggttttcttttctttttttctttaataacaaggagatttcttagttcatatatcaagaagtcttgaagttgggtgtttccagaattggtaaaaacagcagctcatagaattttgagtattccatgagctgctcattacagttctttcctctttctgctctgccatcttcaggatattggttcttcccctcatagtaataagatggctgtggcatttccaaacatccaaaaaaagggaaggatttaaggaggtgaagtcgggtcaaaaataaaatatatatacatatatacattgcttagaacgttaaactattagagtatttcccttccaaagagggatgtttggaaaaaactctgaaggagaggaggaattagttgggatgccaatttcctctccactgctggacatgagatggagaggctgagggacaggatctataggcagcttctaagagcgaacttcacataggaagggatctgagaacacgttgccaggggcttgagaaggttactgagtgagttattgggagtcttaataaaataaactagatattaggtccattcattaattagttccagtttctccttgaaatgagtaaaaactagaaggcttctctccacagtgttgtgccccttcactcatttttttttgaggagaagggggtctctgttaacatctagcctaaagtatacaactgcctggggggcagggttaggaatctcttcactaccctgattcttgattcctggctctaccctgtctgtcccttttctttgaccagatctttctcttccctgaacgttttcttctttccctggacaggcagcctcctttgtgtgtattcagaggcagtgatgacttgctgtccaggcagctccctcctgcacacagaatgctcagggtcactgaaccactgcttctcttttgaaagtagagctagctgccactttcacgtggcctccgcagtgtctccacctacacccctgtgctcccctgccacactgatggctcaagacaaggctggcaaaccctcccagaaacatctctggcccagaaagcctctctctccctccctctctcatgaggcacagccaagccaagcgctcatgttgagccagtgggccagccacagagcaaaagagggtttattttcagtcccctctctctgggtcagaaccagagggcatgctgaatgccccctgcttacttggtgagggtgccccgcctgagtcagtgctctcagctggcagtgcaatgcttgtagaagtaggaggaaacagttctcactgggaagaagcaagggcaagaacccaagtgcctcacctcgaaaggaggccctgttccctggagtcagggtgaactgcaaagctttggctgagacctgggatttgagataccacaaaccctgctgaacacagtgtctgttcagcaaactaaccagcattccctacagcctagggcagacaatagtatagaagtctggaaaaaaacaaaaacagaatttgagaaccttggaccactcctgtccctgtagctcagtcatcaaagcagaagtctggctttgctctattaagattggaaatgtacactaccaaacactcagtccactgttgagccccagtgctggaagggaggaaggcctttcttctgtgttaattgcgtagaggctacaggggttagcctggactaaaggcatccttgtcttttgagctattcacctcagtagaaaaggatctaagggaagatcactgtagtttagttctgttgacctgtgcacctaccccttggaaatgtctgctggtatttctaattccacaggtcatcagatgcctgcttgataatatataaacaataaaaacaactttcacttcttcctattgtaatcgtgtgccatggatctgatctgtaccatgaccctacataaggctggatggcacctcaggctgagggccccaatgtatgtgtggctgtgggtgtgggtgggagtgtgtctgctgagtaaggaacacgattttcaagattctaaagctcaattcaagtgacacattaatgataaactcagatctgatcaagagtccggatttctaacagtccttgctttggggggtgtgctgacaacttagctcaggtgccttacatcttttctaatcacagtgttgcatatgagcctgccctcactccctctgcagaatccctttgcacctgagaccctactgaagtggctggtagaaaaaggggcctgagtggaggattatcagtatcacgatttgcaggattcccttctgggcttcattctggaaacttttgttagggctgcttttcttaagtgcccacatttgatggagggtggaaataatttgaatgtatttgatttataagttttttttttttttttgggttaaaagatggttgtagcatttaaaatggaaaattttctccttggtttgctagtatcttgggtgtattctctgtaagtgtagctcaaataggtcatcatgaaaggttaaaaaagcgaggtggccatgttatgctggtggttaaggccagggcctctccaaccactgtgccactgacttgctgtgtgaccctgggcaagtcacttaactataaggtgcctcagttttccttctgttaaaatggggataataatactgacctacctcaaagggcagttttgaggcatgactaatgctttttagaaagcattttgggatccttcagcacaggaattctcaagacctgagtattttttataataggaatgtccaccatgaacttgatacgtccgtgtgtcccagatgctgtcattagtctatatggttctccaagaaactgaatgaatccattggagaagcggtggataactagccagacaaaatttgagaatacataaacaacgcattgccacggaaacatacagaggatgccttttctgtgattgggtgggattttttccctttttatgtgggatatagtagttacttgtgacaagaataattttggaataatttctattaatatcaactctgaagctaattgtactaatctgagattgtgtttgttcataataaaagtgaagtgaatctgattgcactg

SEQ ID NO: 30115 - DNA, 894 bp, Homo sapiens
  source 1..894: mol_type = unassigned DNA
tggtgtggtgtcggtgtcggcagcatccccggcgccctgctgcggtcgccgcgagcctcggcctctgtctcctccccctcccgcccttacctccacgcgggaccgcccgcgccagtcaactcctcgcactttgcccctggaaagtgatcccggcatccgagagccaagatgccggcccacttgctgcaggacgatatctctagctcctataccaccaccaccaccattacagcgcctccctccagggtcctgcagaatggaggagataagttggagacgatgcccctctacttggaagacgacattcgccctgatataaaagatgatatatatgaccccacctacaaggataaggaaggcccaagccccaaggttgaatatgtctggagaaacatcatccttatgtctctgctacacttgggagccctgtatgggatcactttgattcctacctgcaagttctacacctggctttggggggtattctactattttgtcagtgccctgggcataacagcaggagctcatcgtctgtggagccaccgctcttacaaagctcggctgcccctacggctctttctgatcattgccaacacaatggcattccagaatgatgtctatgaatgggctcgtgaccaccgtgcccaccacaagttttcagaaacacatgctgatcctcataattcccgacgtggctttttcttctctcacgtgggttggctgcttgtgcgcaaacacccagctgtcaaagagaaggggagtacgctagacttgtctgacctagaagctgagaaactggtgatgttccagaggaggtactacaaacctggcttgctgatgatgtgcttcatcctgcccacgcttgtgccctggtatttctggggtgaaactttt

SEQ ID NO: 30116 - DNA, 1977 bp, Homo sapiens
  source 1..1977: mol_type = unassigned DNA
aggcctctcctcagcccacggcgtccatctggctcccgagccgagggccgggcagtcgggcttcgcggctgcccgcggtcccgaggcctcgccctagccccagtcggctcgcgaggcgcgcacagctgagtggacccctgcggcgtggcccgatggtctcgcccgacccggcgcgcgcgggaggccgaggggcggggcccggcgcccacataaaggcggttgggggcggggcgcgcagagctcgtgagcgccggcgcggggacgcgggtttctgcctcaggccctgccctgctctactctgcgctctctgcccgcgccgccgccgcctcagcctcggccctgcgctgcgcgcccggcccgtgctgccatggcctgccgcccgcgaagcccgccgaggcatcagagccgctgcgacggtgacgccagcccgccgtcccccgcgcgatggagcctgggacggaagcgcagagccgacggcaggcgctggaggcccgaagacgccgaggaggcagagcaccgcggcgccgagcgcagacccgagagctttaccactcctgaaggccctaaaccccgttccagatgctctgactgggcaagtgcagttgaagaagatgaaatgaggaccagagttaacaaagaaatggcaagatataaaaggaaactcctcatcaatgactttggaagagagagaaaatcatcatcaggaagttctgattcaaaggagtctatgtctactgtgccggctgactttgagacagatgaaagtgtcctaatgaggagacagaagcagatcaactatgggaagaacacaattgcctacgatcgttatattaaagaagtcccaagacaccttcgacaacctggcattcatcccaagacccctaataaatttaagaagtatagtcgacgttcatgggaccagcaaatcaaactctggaaggtggctctgcatttttgggatcctccagcggaagaaggatgtgatttgcaagaaatacaccctgtagaccttgaatctgcagaaagcagctccgagccccagaccagctctcaggatgactttgatgtgtactctggcacacccaccaaggtgagacacatggacagtcaagtggaggatgagtttgatttggaagcttgtttaactgaacccttgagagacttctcagccatgagctaactgccccctggcggccaggaagagaaacagctcctccccgactaggtggaaggctggccaggcaccaagcatgtgtgtgcacttgtacctggtggtttctctgttagcagtccattagctcatgctgaattatttttgccttactttcttaagaaacattaattttatgtatagtgagtatattttgcatgttttaaattgtaaatggagctaagtccaagaaagtacttgaagctctcttccagcgagcttaattgcgtaatccctgttgtcctccagggtaagctgacacgtctacataactggttttccacaggcatcttcagttattgcttgtcaggtggactgttttggatttaaccatgtaatccatgggaccaattgagagtcagctacttttataggcatcaaagtattctcagacacctttaatatctttatggaaacttaatttttggccttttatcaatatgtcataacagcattctgaagtcagacattgttaaattgagctattaaactaatgagttttatgtaagttatatggtcttaatttggtacttgtaaatagcactagttagactctttagaatactccaagagttagggcagcagagtggagcgatttagaaagaacattttaaaacaatcagttaatttaccatgtaaaattgctgtaaatgataatgtgtacagattttctgttcaaatattcaattgtaaacttcttgttaagactgttacgtttctattgcttttgtatgggatattgcaaaaataaaaaggaaagaaccctc

SEQ ID NO: 30117 - DNA, 5515 bp, Homo sapiens
  source 1..5515: mol_type = unassigned DNA
gccctgccctcacctggctatcccacacaggtgagaataaccagaactcacctccggtaccagtgttcacttggaaacatggctctcagcctctggcccctgctgctgctgctgctgctgctgctgctgctgtcctttgcagtgactctggcccctactgggcctcattccctggaccctggtctctccttcctgaagtcattgctctccactctggaccaggctccccagggctccctgagccgctcacggttctttacattcctggccaacatttcttcttcctttgagcctgggagaatgggggaaggaccagtaggagagcccccacctctccagccgcctgctctgcggctccatgattttctagtgacactgagaggtagccccgactgggagccaatgctagggctgctaggggatatgctggcactgctgggacaggagcagactccccgagatttcctggtgcaccaggcaggggtgctgggtggacttgtggaggtgctgctgggagccttagttcctgggggcccccctaccccaactcggcccccatgcacccgtgatgggccgtctgactgtgtcctggctgctgactggttgccttctctgctgctgttgttagagggcacacgctggcaagctctggtgcaggtgcagcccagtgtggaccccaccaatgccacaggcctcgatgggagggaggcagctcctcactttttgcagggtctgttgggtttgcttaccccaacaggggagctaggctccaaggaggctctttggggcggtctgctacgcacagtgggggcccccctctatgctgcctttcaggaggggctgctccgtgtcactcactccctgcaggatgaggtcttctccattttggggcagccagagcctgataccaatgggcagtgccagggaggtaaccttcaacagctgctcttatggggcgtccggcacaacctttcctgggatgtccaggcgctgggctttctgtctggatcaccacccccaccccctgccctccttcactgcctgagcacgggcgtgcctctgcccagagcttctcagccgtcagcccacatcagcccacgccaacggcgagccatcactgtggaggccctctgtgagaaccacttaggcccagcaccaccctacagcatttccaacttctccatccacttgctctgccagcacaccaagcctgccactccacagccccatcccagcaccactgccatctgccagacagctgtgtggtatgcagtgtcctgggcaccaggtgcccaaggctggctacaggcctgccacgaccagtttcctgatgagtttttggatgcgatctgcagtaacctctccttttcagccctgtctggctccaaccgccgcctggtgaagcggctctgtgctggcctgctcccaccccctaccagctgccctgaaggcctgccccctgttcccctcaccccagacatcttttggggctgcttcttggagaatgagactctgtgggctgagcgactgtgtggggaggcaagtctacaggctgtgccccccagcaaccaggcttgggtccagcatgtgtgccagggccccaccccagatgtcactgcctccccaccatgccacattggaccctgtggggaacgctgcccggatgggggcagcttcctggtgatggtctgtgccaatgacaccatgtatgaggtcctggtgcccttctggccttggctagcaggccaatgcaggataagtcgtgggggcaatgacacttgcttcctagaagggctgctgggcccccttctgccctctctgccaccactgggaccatccccactctgtctgacccctggccccttcctccttggcatgctatcccagttgccacgctgtcagtcctctgtcccagctcttgctcaccccacacgcctacactatctcctccgcctgctgaccttcctcttgggtccaggggctgggggcgctgaggcccaggggatgctgggtcgggccctactgctctccagtctcccagacaactgctccttctgggatgcctttcgcccagagggccggcgcagtgtgctacggacgattggggaatacctggaacaagatgaggagcagccaaccccatcaggctttgaacccactgtcaaccccagctctggtataagcaagatggagctgctggcctgctttagtcctgtgctgtgggatctgctccagagggaaaagagtgtttgggccctgcagattctagtgcaggcgtacctgcatatgcccccagaaaacctccagcagctggtgctttcagcagagagggaggctgcacagggcttcctgacactcatgctgcaggggaagctgcaggggaagctgcaggtaccaccatccgaggagcaggccctgggtcgcctgacagccctgctgctccagcggtacccacgcctcacctcccagctcttcattgacctgtcaccactcatccctttcttggctgtctctgacctgatgcgcttcccaccatccctgttagccaacgacagtgtcctggctgccatccgggattacagcccaggaatgaggcctgaacagaaggaggctctggcaaagcgactgctggcccctgaactgtttggggaagtgcctgcctggccccaggagctgctgtgggcagtgctgcccctgctcccccacctccctctggagaactttttgcagctcagccctcaccagatccaggccctggaggatagctggccagcagcaggtctggggccagggcatgcccgccatgtgctgcgcagcctggtaaaccagagtgtccaggatggtgaggagcaggtacgcaggcttgggcccctcgcctgtttcctgagccctgaggagctgcagagcctagtgcccctgagtgatccaacggggccagtagaacgggggctgctggaatgtgcagccaatgggaccctcagcccagaaggacgggtggcatatgaacttctgggtgtgttgcgctcatctggaggagcggtgctgagcccccgggagctgcgggtctgggcccctctcttctctcagctgggcctccgcttccttcaggagctgtcagagccccagcttagagccatgcttcctgtcctgcagggaactagtgttacacctgctcaggctgtcctgctgcttggacggctccttcctaggcacgatctatccctggaggaactctgctccttgcaccttctgctaccaggcctcagcccccagacactccaggccatccctaggcgagtcctggtcggggcttgttcctgcctggcccctgaactgtcacgcctctcagcctgccagaccgcagcactgctgcagacctttcgggttaaagatggtgttaaaaatatgggtacaacaggtgctggtccagctgtgtgtatccctggtcagcctattcccaccacctggccagactgcctgcttcccctgctcccattaaagctgctacaactggattccttggctcttctggcaaatcgaagacgctactgggagctgccctggtctgagcagcaggcacagtttctctggaagaagatgcaagtacccaccaaccttaccctcaggaatctgcaggctctgggcaccctggcaggaggcatgtcctgtgagtttctgcagcagatcaactccatggtagacttccttgaagtggtgcacatgatctatcagctgcccactagagttcgagggagcctgagggcctgtatctgggcagagctacagcggaggatggcaatgccagaaccagaatggacaactgtagggccagaactgaacgggctggatagcaagctactcctggacttaccgatccagttgatggacagactatccaatgaatccattatgttggtggtggagctggtgcaaagagctccagagcagctgctggcactgacccccctccaccaggcagccctggcagagagggcactacaaaacctggctccaaaggagactccagtctcaggggaagtgctggagaccttaggccctttggttggattcctggggacagagagcacacgacagatccccctacagatcctgctgtcccatctcagtcagctgcaaggcttctgcctaggagagacatttgccacagagctgggatggctgctattgcaggagtctgttcttgggaaaccagagttgtggagccaggatgaagtagagcaagctggacgcctagtattcactctgtctactgaggcaatttccttgatccccagggaggccttgggtccagagaccctggagcggcttctagaaaagcagcagagctgggagcagagcagagttggacagctgtgtagggagccacagcttgctgccaagaaagcagccctggtagcaggggtggtgcgaccagctgctgaggatcttccagaacctgtgccaaattgtgcagatgtacgagggacattcccagcagcctggtctgcaacccagattgcagagatggagctctcagactttgaggactgcctgacattatttgcaggagacccaggacttgggcctgaggaactgcgggcagccatgggcaaagcaaaacagttgtggggtcccccccggggatttcgtcctgagcagatcctgcagcttggtaggctcttaataggtctaggagatcgggaactacaggagctgatcctagtggactggggagtgctgagcaccctggggcagatagatggctggagcaccactcagctccgcattgtggtctccagtttcctacggcagagtggtcggcatgtgagccacctggacttcgttcatctgacagcgctgggttatactctctgtggactgcggccagaggagctccagcacatcagcagttgggagttcagccaagcagctctcttcctcggcaccctgcatctccagtgctctgaggaacaactggaggttctggcccacctacttgtactgcctggtgggtttggcccaatcagtaactgggggcctgagatcttcactgaaattggcaccatagcagctgggatcccagacctggctctttcagcactgctgcggggacagatccagggcgttactcctcttgccatttctgtcatccctcctcctaaatttgctgtggtgtttagtcccatccaactatctagtctcaccagtgctcaggctgtggctgtcactcctgagcaaatggcctttctgagtcctgagcagcgacgagcagttgcatgggcccaacatgagggaaaggagagcccagaacagcaaggtcgaagtacagcctggggcctccaggactggtcacgaccttcctggtccctggtattgactatcagcttccttggccacctgctatgagcctgtctctacagtagaaggagattgtggggagagaaatcttaagtcataatgaataaagtgcaaacagaagtgcatcctgattattttcagaagctgatgaggaata

SEQ ID NO: 30118 - DNA, 1711 bp, Homo sapiens
  source 1..1711: mol_type = unassigned DNA
agagactcactcttccgatattttgagttgctagaaaagcttcagtgtaacctagaggagcataagaagttacaagagtttgcagaaccccagattacacccctggtctccagttctccatctccatgtctgcctgttcctttctgcatcactggctcctaactcaagcaatctccttgggtttctctgaggggcccctgggatcccctatcattagtccctctcacagaagcatacccttctccagagctaaaggatcagatattcagcggctcaggtgagaataaccagaactcacctccggtaccagtgttcacttggaaacatggctctcagcctctggcccctgctgctgctgctgctgctgctgctgctgctgtcctttgcagtgactctggcccctactgggcctcattccctggaccctggtctctccttcctgaagtcattgctctccactctggaccaggctccccagggctccctgagccgctcacggttctttacattcctggccaacatttcttcttcctttgagcctgggagaatgggggaaggaccagtaggagagcccccacctctccagccgcctgctctgcggctccatgattttctagtgacactgagaggtagccccgactgggagccaatgctagggctgctaggggatatgctggcactgctgggacaggagcagactccccgagatttcctggtgcaccaggcaggggtgctgggtggacttgtggaggtgctgctgggagccttagttcctgggggcccccctaccccaactcagcccccatgcacccgtgatgggccgtctgactgtgtcctggctgctgactggttgccttctctgctgctgttgttagagggcacacgctggcaagctctggtgcaggtgcagcccagtgtggaccccaccaatgccacaggcctcgatgggagggaggcagctcctcactttttgcagggtctgttgggtttgcttaccccaacaggggagctaggctccaaggaggctctttggggcggtctgctacgcacagtgggggcccccctctatgctgcctttcaggaggggctgctccgtgtcactcactccctgcaggatgaggtcttctccattttggggcagccagagcctgataccaatgggcagtgccagggaggtaaccttcaacagctgctcttatggggcgtccggcacaacctttcctgggatgtccaggcgctgggctttctgtctggatcaccacccccaccccctgccctccttcactgcctgagcacgggcgtgcctctgcccagagcttctcagccgtcagcccacatcagcccacgccaacggcgagccatcactgtggaggccctctagggccggcgcagtgtgctacggacgattggggaatacctggaacaagatgaggagcagccaaccccatcaggctttgaacccactgtcaaccccagctctggtataagcaagatggagctgctggcctgctttagtcctgtgctgtgggatctgctccagagggaaaagagtgtttgggccctgcagattctagtgcaggcgtacctgcatatgcccccagaaaacctccagcagctggtgctttcagcagagagggaggctgcacagggcttcctgacactcatgctgcaggggaagctgcaggtaccaccatccgaggagcaggccctg

SEQ ID NO: 30119 - DNA, 5680 bp, Homo sapiens
  source 1..5680: mol_type = unassigned DNA
gccctgccctcacctggctatcccacacaggtgagaataaccagaactcacctccggtaccagtgttcacttggaaacatggctctcagcctctggcccctgctgctgctgctgctgctgctgctgctgctgtcctttgcagtgactctggcccctactgggcctcattccctggaccctggtctctccttcctgaagtcattgctctccactctggaccaggctccccagggctccctgagccgctcacggttctttacattcctggccaacatttcttcttcctttgagcctgggagaatgggggaaggaccagtaggagagcccccacctctccagccgcctgctctgcggctccatgattttctagtgacactgagaggtagccccgactgggagccaatgctagggctgctaggggatatgctggcactgctgggacaggagcagactccccgagatttcctggtgcaccaggcaggggtgctgggtggacttgtggaggtgctgctgggagccttagttcctgggggcccccctaccccaactcggcccccatgcacccgtgatgggccgtctgactgtgtcctggctgctgactggttgccttctctgctgctgttgttagagggcacacgctggcaagctctggtgcaggtgcagcccagtgtggaccccaccaatgccacaggcctcgatgggagggaggcagctcctcactttttgcagggtctgttgggtttgcttaccccaacaggggagctaggctccaaggaggctctttggggcggtctgctacgcacagtgggggcccccctctatgctgcctttcaggaggggctgctccgtgtcactcactccctgcaggatgaggtcttctccattttggggcagccagagcctgataccaatgggcagtgccagggaggtaaccttcaacagctgctcttatggggcgtccggcacaacctttcctgggatgtccaggcgctgggctttctgtctggatcaccacccccaccccctgccctccttcactgcctgagcacgggcgtgcctctgcccagagcttctcagccgtcagcccacatcagcccacgccaacggcgagccatcactgtggaggccctctgtgagaaccacttaggcccagcaccaccctacagcatttccaacttctccatccacttgctctgccagcacaccaagcctgccactccacagccccatcccagcaccactgccatctgccagacagctgtgtggtatgcagtgtcctgggcaccaggtgcccaaggctggctacaggcctgccacgaccagtttcctgatgagtttttggatgcgatctgcagtaacctctccttttcagccctgtctggctccaaccgccgcctggtgaagcggctctgtgctggcctgctcccaccccctaccagctgccctgaaggcctgccccctgttcccctcaccccagacatcttttggggctgcttcttggagaatgagactctgtgggctgagcgactgtgtggggaggcaagtctacaggctgtgccccccagcaaccaggcttgggtccagcatgtgtgccagggccccaccccagatgtcactgcctccccaccatgccacattggaccctgtggggaacgctgcccggatgggggcagcttcctggtgatggtctgtgccaatgacaccatgtatgaggtcctggtgcccttctggccttggctagcaggccaatgcaggataagtcgtgggggcaatgacacttgcttcctagaagggctgctgggcccccttctgccctctctgccaccactgggaccatccccactctgtctgacccctggccccttcctccttggcatgctatcccagttgccacgctgtcagtcctctgtcccagctcttgctcaccccacacgcctacactatctcctccgcctgctgaccttcctcttgggtccaggggctgggggcgctgaggcccaggggatgctgggtcgggccctactgctctccagtctcccagacaactgctccttctgggatgcctttcgcccagagggccggcgcagtgtgctacggacgattggggaatacctggaacaagatgaggagcagccaaccccatcaggctttgaacccactgtcaaccccagctctggtataagcaagatggagctgctggcctgctttagtcctgtgctgtgggatctgctccagagggaaaagagtgtttgggccctgcagattctagtgcaggcgtacctgcatatgcccccagaaaacctccagcagctggtgctttcagcagagagggaggctgcacagggcttcctgacactcatgctgcaggggaagctgcaggggaagctgcaggtaccaccatccgaggagcaggccctgggtcgcctgacagccctgctgctccagcggtacccacgcctcacctcccagctcttcattgacctgtcaccactcatccctttcttggctgtctctgacctgatgcgcttcccaccatccctgttagccaacgacagtgtcctggctgccatccgggattacagcccaggaatgaggcctgaacagaaggaggctctggcaaagcgactgctggcccctgaactgtttggggaagtgcctgcctggccccaggagctgctgtgggcagtgctgcccctgctcccccacctccctctggagaactttttgcagctcagccctcaccagatccaggccctggaggatagctggccagcagcaggtctggggccagggcatgcccgccatgtgctgcgcagcctggtaaaccagagtgtccaggatggtgaggagcaggtacgcaggcttgggcccctcgcctgtttcctgagccctgaggagctgcagagcctagtgcccctgagtgatccaacggggccagtagaacgggggctgctggaatgtgcagccaatgggaccctcagcccagaaggacgggtggcatatgaacttctgggtgtgttgcgctcatctggaggagcggtgctgagcccccgggagctgcgggtctgggcccctctcttctctcagctgggcctccgcttccttcaggagctgtcagagccccagcttagagccatgcttcctgtcctgcagggaactagtgttacacctgctcaggctgtcctgctgcttggacggctccttcctaggcacgatctatccctggaggaactctgctccttgcaccttctgctaccaggcctcagcccccagacactccaggccatccctaggcgagtcctggtcggggcttgttcctgcctggcccctgaactgtcacgcctctcagcctgccagaccgcagcactgctgcagacctttcgggttaaagatggtgttaaaaatatgggtacaacaggtgctggtccagctgtgtgtatccctggtcagcctattcccaccacctggccagactgcctgcttcccctgctcccattaaagctgctacaactggattccttggctcttctggcaaatcgaagacgctactgggagctgccctggtctgagcagcaggcacagtttctctggaagaagatgcaagtacccaccaaccttaccctcaggaatctgcaggctctgggcaccctggcaggaggcatgtcctgtgagtttctgcagcagatcaactccatggtagacttccttgaagtggtgcacatgatctatcagctgcccactagagttcgagggagcctgagggcctgtatctgggcagagctacagcggaggatggcaatgccagaaccagaatggacaactgtagggccagaactgaacgggctggatagcaagctactcctggacttaccgatccagttgatggacagactatccaatgaatccattatgttggtggtggagctggtgcaaagagctccagagcagctgctggcactgacccccctccaccaggcagccctggcagagagggcactacaaaacctggctccaaaggagactccagtctcaggggaagtgctggagaccttaggccctttggttggattcctggggacagagagcacacgacagatccccctacagatcctgctgtcccatctcagtcagctgcaaggcttctgcctaggagagacatttgccacagagctgggatggctgctattgcaggagtctgttcttgggaaaccagagttgtggagccaggatgaagtagagcaagctggacgcctagtattcactctgtctactgaggcaatttccttgatccccagggaggccttgggtccagagaccctggagcggcttctagaaaagcagcagagctgggagcagagcagagttggacagctgtgtagggagccacagcttgctgccaagaaagcagccctggtagcaggggtggtgcgaccagctgctgaggatcttccagaacctgtgccaaattgtgcagatgtacgagggacattcccagcagcctggtctgcaacccagattgcagagatggagctctcagactttgaggactgcctgacattatttgcaggagacccaggacttgggcctgaggaactgcgggcagccatgggcaaagcaaaacagttgtggggtcccccccggggatttcgtcctgagcagatcctgcagcttggtaggctcttaataggtctaggagatcgggaactacaggagctgatcctagtggactggggagtgctgagcaccctggggcagatagatggctggagcaccactcagctccgcattgtggtctccagtttcctacggcagagtggtcggcatgtgagccacctggacttcgttcatctgacagcgctgggttatactctctgtggactgcggccagaggagctccagcacatcagcagttgggagttcagccaagcagctctcttcctcggcaccctgcatctccagtgctctgaggaacaactggaggttctggcccacctacttgtactgcctggtgggtttggcccaatcagtaactgggggcctgagatcttcactgaaattggcaccatagcagctgggatcccagacctggctctttcagcactgctgcggggacagatccagggcgttactcctcttgccatttctgtcatccctcctcctaaatttgctgtggtgtttagtcccatccaactatctagtctcaccagtgctcaggctgtggctgtcactcctgagcaaatggcctttctgagtcctgagcagcgacgagcagttgcatgggcccaacatgagggaaaggagagcccagaacagcaaggtcgaagtacagcctggggcctccaggactggtcacgaccttcctggtccctggtattgactatcagcttccttggccacctgctatgagcctgtctctacagtagaaggagattgtggggagagaaatcttaagtcataatgaataaagtgcaaacagaagtgcatcctgattattttcagaagctgatgaggaatatgggtaaaatgttaatgctttccacccacctgagaatcagtgttcctgggttgccatatctggagtctctttccatcataaataatcccactgcctcttttcatttcctgaaggctgctccctcctcaccccaccattagaagtaacacagacagctgcagcata

SEQ ID NO: 30120 - DNA, 1711 bp, Homo sapiens
  source 1..1711: mol_type = unassigned DNA
agagactcactcttccgatattttgagttgctagaaaagcttcagtataacctagaggaacgtaagaagttacaagagtttgcagaaccccagattacacccctggtctccagttctccatctccatgtctgcctgttcctttctgcatcactggctcctaactcaagcaatctccttgggtttctctgaggggcccctgggatcccctatcattagtccctctcacagaagcatacccttctccagagctaaaggatcagatattcagcggctcaggtgagaataaccagaactcacctccggtaccagtgttcacttggaaacatggctctcagcctctggcccctgctgctgctgctgctgctgctgctgctgctgtcctttgcagtgactctggcccctactgggcctcattccctggaccctggtctctccttcctgaagtcattgctctccactctggaccaggctccccagggctccctgagccgctcacggttctttacattcctggccaacatttcttcttcctttgagcctgggagaatgggggaaggaccagtaggagagcccccacctctccagccgcctgctctgcggctccatgattttctagtgacactgagaggtagccccgactgggagccaatgctagggctgctaggggatatgctggcactgctgggacaggagcagactccccgagatttcctggtgcaccaggcaggggtgctgggtggacttgtggaggtgctgctgggagccttagttcctgggggcccccctaccccaactcggcccccatgcacccgtgatgggccgtctgactgtgtcctggctgctgactggttgccttctctgctgctgttgttagagggcacacgctggcaagctctggtgcaggtgcagcccagtgtggaccccaccaatgccacaggcctcgatgggagggaggcagctcctcactttttgcagggtctgttgggtttgcttaccccaacaggggagctaggctccaaggaggctctttggggcggtctgctacgcacagtgggggcccccctctatgctgcctttcaggaggggctgctccgtgtcactcactccctgcaggatgaggtcttctccattttggggcagccagagcctgataccaatgggcagtgccagggaggtaaccttcaacagctgctcttatggggcgtccggcacaacctttcctgggatgtccaggcgctgggctttctgtctggatcaccacccccaccccctgccctccttcactgcctgagcacgggcgtgcctctgcccagagcttctcagccgtcagcccacatcagcccacgccaacggcgagccatcactgtggaggccctctagggccggcgcagtgtgctacggacgattggggaatacctggaacaagatgaggagcagccaaccccatcaggctttgaacccactgtcaaccccagctctggtataagcaagatggagctgctggcctgctttagtcctgtgctgtgggatctgctccagagggaaaagagtgtttgggccctgcagattctagtgcaggcgtacctgcatatgcccccagaaaacctccagcagctggtgctttcagcagagagggaggctgcacagggcttcctgacactcatgctgcaggggaagctgcaggtaccaccatccgaggagcaggccctg

SEQ ID NO: 30121 - DNA, 2178 bp, Homo sapiens
  source 1..2178: mol_type = unassigned DNA
gccctgccctcacctggctatcccacacaggtgagaataaccagaactcacctccggtaccagtgttcacttggaaacatggctctcagcctctggcccctgctgctgctgctgctgctgctgctgctgctgtcctttgcagtgactctggcccctactgggcctcattccctggaccctggtctctccttcctgaagtcattgctctccactctggaccaggctccccagggctccctgagccgctcacggttctttacattcctggccaacatttcttcttcctttgagcctgggagaatgggggaaggaccagtaggagagcccccacctctccagccgcctgctctgcggctccatgattttctagtgacactgagaggtagccccgactgggagccaatgctagggctgctaggggatatgctggcactgctgggacaggagcagactccccgagatttcctggtgcaccaggcaggggtgctgggtggacttgtggaggtgctgctgggagccttagttcctgggggcccccctaccccaactcagcccccatgcacccgtgatgggccgtctgactgtgtcctggctgctgactggttgccttctctgctgctgttgttagagggcacacgctggcaagctctggtgcaggtgcagcccagtgtggaccccaccaatgccacaggcctcgatgggagggaggcagctcctcactttttgcagggtctgttgggtttgcttaccccaacaggggagctaggctccaaggaggctctttggggcggtctgctacgcacagtgggggcccccctctatgctgcctttcaggaggggctgctccgtgtcactcactccctgcaggatgaggtcttctccattttggggcagccagagcctgataccaatgggcagtgccagggaggtaaccttcaacagctgctcttatggggcgtccggcacaacctttcctgggatgtccaggcgctgggctttctgtctggatcaccacccccaccccctgccctccttcactgcctgagcacgggcgtgcctctgcccagagcttctcagccgtcagcccacatcagcccacgccaacggcgagccatcactgtggaggccctctgtgagaaccacttaggcccagcaccaccctacagcatttccaacttctccatccacttgctctgccagcacaccaagcctgccactccacagccccatcccagcaccactgccatctgccagacagctgtgtggtatgcagtgtcctgggcaccaggtgcccaaggctggctacaggcctgccacgaccagtttcctgatgagtttttggatgcgatctgcagtaacctctccttttcagccctgtctggctccaaccgccgcctggtgaagcggctctgtgctggcctgctcccaccccctaccagctgccctgaaggcctgccccctgttcccctcaccccagacatcttttggggctgcttcttggagaatgagactctgtgggctgagcgactgtgtggggaggcaagtctacaggctgtgccccccagcaaccaggcttgggtccagcatgtgtgccagggccccaccccagatgtcactgcctccccaccatgccacattggaccctgtggggaacgctgcccggatgggggcagcttcctggtgatggtctgtgccaatgacaccatgtatgaggtcctggtgcccttctggccttggctagcaggccaatgcaggataagtcgtgggggcaatgacacttgcttcctagaagggctgctgggcccccttctgccctctctgccaccactgggaccatccccactctgtctgacccctggccccttcctccttggcatgctatcccagttgccacgctgtcagtcctctgtcccagctcttgctcaccccacacgcctacactatctcctccgcctgctgaccttcctcttgggtccaggggctgggggcgctgaggcccaggggatgctgggtcgggccctactgctctccagtctcccagacaactgctccttctgggatgcctttcgcccagagggccggcgcagtgtgctacggacgattggggaatacaacaagatgaggagcagccaaccccatcaggctttgaacccactgtcaaccccagctctggtataa

SEQ ID NO: 30122 - DNA, 4291 bp, Homo sapiens
  source 1..4291: mol_type = unassigned DNA
cctgccctcacctggctatcccacacaggtgagaataaccagaactcacctccggtaccagtgttcacttggaaacatggctctcagcctctggcccctgctgctgctgctgctgctgctgctgctgctgtcctttgcagtgactctggcccctactgggcctcattccctggaccctggtctctccttcctgaagtcattgctctccactctggaccaggctccccagggctccctgagccgctcacggttctttacattcctggccaacatttcttcttcctttgagcctgggagaatgggggaaggaccagtaggagagcccccacctctccagccgcctgctctgcggctccatgattttctagtgacactgagaggtagccccgactgggagccaatgctagggctgctaggggatatgctggcactgctgggacaggagcagactccccgagatttcctggtgcaccaggcaggggtgctgggtggacttgtggaggtgctgctgggagccttagttcctgggggcccccctaccccaactcggcccccatgcacccgtgatgggccgtctgactgtgtcctggctgctgactggttgccttctctgctgctgttgttagagggcacacgctggcaagctctggtgcaggtgcagcccagtgtggaccccaccaatgccacaggcctcgatgggagggaggcagctcctcactttttgcagggtctgttgggtttgcttaccccaacaggggagctaggctccaaggaggctctttggggcggtctgctacgcacagtgggggcccccctctatgctgcctttcaggaggggctgctccgtgtcactcactccctgcaggatgaggtcttctccattttggggcagccagagcctgataccaatgggcagtgccagggaggtaaccttcaacagctgctcttatggggcgtccggcacaacctttcctgggatgtccaggcgctgggctttctgtctggatcaccacccccaccccctgccctccttcactgcctgagcacgggcgtgcctctgcccagagcttctcagccgtcagcccacatcagcccacgccaacggcgagccatcactgtggaggccctctagggccggcgcagtgtgctacggacgattggggaatacctggaacaagatgaggagcagccaaccccatcaggctttgaacccactgtcaaccccagctctggtataagcaagatggagctgctggcctgctttagtcctgtgctgtgggatctgctccagagggaaaagagtgtttgggccctgcagattctagtgcaggcgtacctgcatatgcccccagaaaacctccagcagctggtgctttcagcagagagggaggctgcacagggcttcctgacactcatgctgcaggggaagctgcaggggaagctgcaggtaccaccatccgaggagcaggccctgggtcgcctgacagccctgctgctccagcggtacccacgcctcacctcccagctcttcattgacctgtcaccactcatccctttcttggctgtctctgacctgatgcgcttcccaccatccctgttagccaacgacagtgtacagcagggctacagagggtcagaggaaaacagtttggaggaagacaaagggttaagacccatgactcctcgcagcctggctgccatccgggattacagcccaggaatgaggcctgaacagaaggaggctctggcaaagcgactgctggcccctgaactgtttggggaagtgcctgcctggccccaggagctgctgtgggcagtgctgcccctgctcccccacctccctctggagaactttttgcagctcagccctcaccagatccaggccctggaggatagctggccagcagcaggtctggggccagggcatgcccgccatgtgctgcgcagcctggtaaaccagagtgtccaggatggtgaggagcaggtacgcaggcttgggcccctcgcctgtttcctgagccctgaggagctgcagagcctagtgcccctgagtgatccaacggggccagtagaacgggggctgctggaatgtgcagccaatgggaccctcagcccagaaggacgggtggcatatgaacttctgggtgtgttgcgctcatctggaggagcggtgctgagcccccgggagctgcgggtctgggcccctctcttctctcagctgggcctccgcttccttcaggagctgtcagagccccagcttagagccatgcttcctgtcctgcagggaactagtgttacacctgctcaggctgtcctgctgcttggacggctccttcctaggcacgatctgctacaactggattccttggctcttctggcaaatcgaagacgctactgggagctgccctggtctgagcagcaggcacagtttctctggaagaagatgcaagtacccaccaaccttaccctcaggaatctgcaggctctgggcaccctggcaggaggcatgtcctgtgagtttctgcagcagatcaactccatggtagacttccttgaagtggtgcacatgatctatcagctgcccactagagttcgagggagcctgagggcctgtatctgggcagagctacagcggaggatggcaatgccagaaccagaatggacaactgtagggccagaactgaacgggctggatagcaagctactcctggacttaccgatccagttgatggacagactatccaatgaatccattatgttggtggtggagctggtgcaaagagctccagagcagctgctggcactgacccccctccaccaggcagccctggcagagagggcactacaaaacctggctccaaaggagactccagtctcaggggaagtgctggagaccttaggccctttggttggattcctggggacagagagcacacgacagatccccctacagatcctgctgtcccatctcagtcagctgcaaggcttctgcctaggagagacatttgccacagagctgggatggctgctattgcaggagtctgttcttgggaaaccagagttgtggagccaggatgaagtagagcaagctggacgcctagtattcactctgtctactgaggcaatttccttgatccccagggaggccttgggtccagagaccctggagcggcttctagaaaagcagcagagctgggagcagagcagagttggacagctgtgtagggagccacagcttgctgccaagaaagcagccctggtagcaggggtggtgcgaccagctgctgaggatcttccagaacctgtgccaaattgtgcagatgtacgagggacattcccagcagcctggtctgcaacccagattgcagagatggagctctcagactttgaggactgcctgacattatttgcaggagacccaggacttgggcctgaggaactgcgggcagccatgggcaaagcaaaacagttgtggggtcccccccggggatttcgtcctgagcagatcctgcagcttggtaggctcttaataggtctaggagatcgggaactacaggagctgatcctagtggactggggagtgctgagcaccctggggcagatagatggctggagcaccactcagctccgcattgtggtctccagtttcctacggcagagtggtcggcatgtgagccacctggacttcgttcatctgacagcgctgggttatactctctgtggactgcggccagaggagctccagcacatcagcagttgggagttcagccaagcagctctcttcctcggcaccctgcatctccagtgctctgaggaacaactggaggttctggcccacctacttgtactgcctggtgggtttggcccaatcagtaactgggggcctgagatcttcactgaaattggcaccatagcagctgggatcccagacctggctctttcagcactgctgcggggacagatccagggcgttactcctcttgccatttctgtcatccctcctcctaaatttgctgtggtgtttagtcccatccaactatctagtctcaccagtgctcaggctgtggctgtcactcctgagcaaatggcctttctgagtcctgagcagcgacgagcagttgcatgggcccaacatgagggaaaggagagcccagaacagcaaggtcgaagtacagcctggggcctccaggactggtcacgaccttcctggtccctggtattgactatcagcttccttggccacctgctatgagcctgtctctacagtagaaggagattgtggggagagaaa

SEQ ID NO: 30123 - DNA, 6258 bp, Homo sapiens
  source 1..6258: mol_type = unassigned DNA
gatgtttcgcgaccaggtcggggtgctggcgggctggtttaagggctggaacgagtgcgagcagactgttgcgctgctgtcgctgctcaagcgcgtgagccagacccaggcccgcttcctccagctctgcctggagcactcgctggccgactgcgccgagctgcacgtcctcgaacgcgaggccaacagccccggaatcattaaccaatggcaacaggaatccaaggataaagtgatttccctcctgttaactcatctgcctttgctgaagccaggaaacctcgacgcgaaagtagaatatatgaaactgctgcccaaaatcctggctcactctattgaacacaaccagcacattgaggagagcaggcagctgctgtcctatgctttgatacatccagccacttcgttagaagaccgtagtgctttagccatgtggctgaatcacttggaggaccgcacgtcgaccagctttggtggccagaaccgaggccgctcagactctgtggattatggacagacacactactatcaccaaagacagaactctgatgacaagctcaatgggtggcagaactctcgggattctgggatttgcatcaatgcctccaactggcaggacaaaagcatggggtgtgagaatggccatgtgcccctctactcctcctcatctgtccccaccacaatcaatacgattggaaccagcacaagtacaaatgttccagcctggctgaaaagcctccgcctgcacaaatatgccgcgcttttctcccagatgacctatgaggagatgatggccctcaccgagtgccagctggaggcgcagaatgttaccaaaggtgcaagacacaaaattgtcatcagtattcagaagctcaaagaaagacaaaatctcctgaagtctttggaaagggacatcatcgaggggggcagcctgcgcatcccgctccaggaactgcaccagatgatcctgactccgatcaaggcctacagctccccgagcaccacccccgaggctcgccgccgggagccccaggccccgcgtcagccctcactgatgggccccgagagccagagccccgactgcaaagatggggccgcagccactggcgccacggccaccccctcggccggggccagcggggggctccagccgcaccagctgagcagctgcgatggggagctggccgtcgcccccctgccagagggggacctccccgggcagttcacacgcgtcatggggaaagtgtgcacacagctcttggtctccagacctgatgaggaaaatataagttcctatttacagctcatagacaagtgtctaattcatgaggcatttacagagacacagaaaaaaagattgttgtcatggaaacagcaggtgcagaagctctttcggtctttccctcggaaaacccttctagacatatcaggatatcgacagcaaagaaatcgaggctttgggcaatccaactccctcccgacggctggctctgtgggcggtggcatgggcagacggaacccgcgccagtaccagatcccctctcggaacgtcccttccgcccgcctgggcctcttgggcaccagtggattcgtcagctccaaccagcgcaacaccacagctacccccaccatcatgaaacaaggaagacagaacctgtggtttgccaaccccgggggcagcaatagcatgccaagccgcacccacagctcagtccagaggacccgctcgctgcccgtgcacacttccccacagaacatgctgatgttccagcagccagaattccagcttcccgtgaccgaacctgacatcaacaacaggctggagtcgttgtgcctcagtatgaccgaacacgccctgggagacggggttgaccggacctccaccatctagaagctgaagacgagagtgaccgcgctggccgtgaaatcgactgctgcgggtccagtgtccgccatcttcagggttgcacagaatcctccaagatactttgcagccttttttccccctggtccctctcccgttttgattttgtgagagcgtaggtcatcctcgtaaacatatcagtagacctggggttggttattttgtcatttgtttctgtcatgggatggtttggtgtgtggggtggggaggggtctctagggaattatgagactgggaggggggtggagggaatgcaggtagctctctggatggaacggggacaggggaaagagtactgccatgaaagagataggagacacataagaggacagcagaagccctggccctggggaggcttctcggaaggcctggcttcacaggcaggccacagaaggatatcgcgggcacgtgcacccaaagcaagatagtggcttcccttttatatccaatctaatcctgattggatgtccctgaggcccctgctggaaacagccataggagagggcccatggcagtaggggaaagaaggaagaaattccctgcaacaaaacttcagctaaactttgatttgtgtattgtttacataataattttaaagggtacataatgtgtaaagagtttggatagaacctctcttcatactatggttttcgtaaaggatctgttgttgttacggattcattttttccctctatttttataagagcagcagagttgtcttctcaaaacggctgccaagctctgcttcttgggaagatggatgcagtcatgtaggcctgagctgtccgtctttcaccgttaggtgggaggagcgtatgggtggacttgaaggacatggacgtggctggaatgagcacagcattgggtgagcgcacaaggatgaggacatcatgtgatcagttatgggtttgctcgcagggcacccagagattctcaaagaatcctgcagcctctttctgtgctggatttgcttgtcacggagaggcctccctccctttccaccccacccatggggcattatcctgtcactcccagccttgctccacacacacacaggtgggtacaagttccactggaggagaaaaggcaaggatggactttttccccttgtgagaggtttgatacccagaaaatgagctcaaaacctttacattagggttgcttgtaggaactggagcctggaggctgcatctacttcacctgtcactgctgagggagaggaggggagaaaggcccagcaacagcgtacagaggggtcagtcagcaagtccagagagcacatgcagggagatgtttggcccacaccgcacagccccgccatctccagtgggcgatgaaagatgtaggaaaggttgatttcaagatggaaatgacagcgctatccgcacagtatgaattagggatttgctgtgttagttgatttatccatccacacagaggggaggaaaaagacactcgttacttggtgggagattgagaaactgtggtacctaccacaaagtaatagctctgtttatgaagggcaagaaaggctacatttcagaatttgacacagtggagggtattagaggaaatcaaagaggagttgtgtggaaaatcaggttgtgtaaatgaaggtatgaatgctcagccagaggcaagatcagggagatggtacaaggcctgtttgttacatggatgagtcgggtgcctggttgtgtgtgtgtgtgtgtgtgtgtgtgtgtgtgtgtgaagtcagagttgaaattcagaagatcagactatggaaatcactgcccttttttttttaaaagctaatgaactacatacagacctaaaaggccttaatgaaatccgaacaattttcttttactttcaagatcaaaaacatgcacccaacccagccttggatgccaccaccaggtttttgaagcccttttgagtctaagaaggtgagaacaatgtaaccatagaaagcctttcgtgagcagagaaggcttgaatccacaatttcattcgctgaattaaaaaaaaaaggttcagacctctccttgggtgactaagttctaaagatgcaaatccatgtgcagaaagagatggcattttttagttgattatttttaaccaagtgccattaacattcatcccccacatcccttttctaaacaagcttagtgttacttggggaatgtgttgggatggacgatcacatgtaaggcaggaagaataggtcaaaggttgaaggccaaaggtaagaccagagggtttgcgaatgtgggtttgtaggatactgagaaagtgaataaagaggagaaaaaaccatggtattacacatcttgctgagaaaggaaagcattcggatctgctgcaaaaacacatatatccataaagactcatgttattcagaaaacagattgtgaacacaatcacattcgcatgaatcctttaaaaggaagaagaccttaaagtatctgcaaatctgaatttctatttattccttcactgaatatagaaacaatggttatctgattattagagatattattttggatatgttacttattaacttgctatggctggtaaccatgataaagtctgttattaataacaacataattctttttttaaagaagaaaagcttatttttcattgacagtgtatagatttatctacttagttgtgttttgctattagtgttttaattttttttttaagttgagtgtttgataaattttaagaccctgtccccaccttgttttgagtcctgtgttgactacaggtatatagctcaatttaaaaatcctaaagcaaaagaattttatttataaaagaatcaaacagttgcatgcatgaggctgtgaagtcagatatttagtaataaaagcagcagtgcctttttttgtatttacccattgacccccaccaaatgcaactgttttatattaagaaaatagtaacaattttaaaatctcagagtaaaatctatttcactacatgcttttccccccttgttctgatttaagcagtgtgtacttggcatctctacattgtcctagggacagtggtgttctacaatattatcatgtatgatgttttattggtgctttttattcatagtggcttcttaccagaaacagtaggaagaaacacatgaactgtgtacaagacatgaaacattgctgctgatatgttgttttttcacatgcttttgagttttcactttttaaacgagagccagcaagcaaaatagatgtggctgggtctgcctgtccgggcggctctttgcaccgagctctcaaatcctgtgtattgagggttcctttttggtactcaggattggagctacagctgggcccccctctctcccattcgtttgaagagacactgagggaaacaagggtttcttttgaggtgtccttggctgccttttacgggatgggagccttctccggatcttttgttcttctgcacctcttgtagctactgccggtgcaaggttgtagatgttattccccaggagcctgggcttgggggctgagctgggctgaatgcaaaagcatgcaaccagaaggcgggcaaggggaggaaaagcaggcctggcctcattggtcccctggagatgtctgtagcagtcagctccagcttgggcctggggaagcagcctgaccaaggcgctcaggtgtgcctgttacaagaagaacctgcagaaggataatttgcacatggagctgtgataacactaatgttgattttttttttttttacaagtcatcagagatgtttgcaaagtgagttttatttttttgtaattcctttatctttacttaaaggtgaatgtgtattcctctgggaggaataggaagaaaacaggaatgttaataatgtcgaacagaaaacttcctcccttattaatatataatcctcatgtatttatgcctaatgtaagctgacttttaaaaagctttcttttgttgcatgccctgtgcaggcatctgtattgtacatgcatgcctttcgtcctgttttcctgtataaagttagtgaacaaagaaatatttttgcctagttcatgttgccaagcaatgcatattttttaaatttgtcatatatggaaagagcatgtttgttacatgtaaaagctttactgatatacagatatactaatgtttgaagatgctgttctttgcaagtgtacagttttcaaatgttgttaccagtgaaacacccttgtggtttaaacttgctacaatgtatttattattcatttcctcccatgtaactaagaatcatggctatatttcatatcaacgttatattgaaagtgaagggaaatgattaatacaaggttttgtaac

SEQ ID NO: 30124 - DNA, 6264 bp, Homo sapiens
  source 1..6264: mol_type = unassigned DNA
atgatgtttcgcgaccaggtcggggtgctggcgggctggtttaagggctggaacgagtgcgagcagactgttgcgctgctgtcgctgctcaagcgcgtgagccagacccaggcccgcttcctccagctctgcctggagcactcgctggccgactgcgccgagctgcacgtcctcgaacgcgaggccaacagccccggaatcattaaccaatggcaacaggaatccaaggataaagtgatttccctcctgttaactcatctgcctttgctgaagccaggaaacctcgacgcgaaagtagaatatatgaaactgctgcccaaaatcctggctcactctattgaacacaaccagcacattgaggagagcaggcagctgctgtcctatgctttgatacatccagccacttcgttagaagaccgtagtgctttagccatgtggctgaatcacttggaggaccgcacgtcgaccagctttggtggccagaaccgaggccgctcagactctgtggattatggacagacacactactatcaccaaagacagaactctgatgacaagctcaatgggtggcagaactctcgggattctgggatttgcatcaatgcctccaactggcaggacaaaagcatggggtgtgagaatggccatgtgcccctctactcctcctcatctgtccccaccacaatcaatacgattggaaccagcacaagtacaaatgttccagcctggctgaaaagcctccgcctgcacaaatatgccgcgcttttctcccagatgacctatgaggagatgatggccctcaccgagtgccagctggaggcgcagaatgttaccaaaggtgcaagacacaaaattgtcatcagtattcagaagctcaaagaaagacaaaatctcctgaagtctttggaaagggacatcatcgaggggggcagcctgcgcatcccgctccaggaactgcaccagatgatcctgactccgatcaaggcctacagctccccgagcaccacccccgaggctcgccgccgggagccccaggccccgcgtcagccctcactgatgggccccgagagccagagccccgactgcaaagatggggccgcagccactggcgccacggccaccccctcggccggggccagcggggggctccagccgcaccagctgagcagctgcgatggggagctggccgtcgcccccctgccagagggggacctccccgggcagttcacacgcgtcatggggaaagtgtgcacacagctcttggtctccagacctgatgaggaaaatataagttcctatttacagctcatagacaagtgtctaattcatgaggcatttacagagacacagaaaaaaagattgttgtcatggaaacagcaggtgcagaagctctttcggtctttccctcggaaaacccttctagacatatcaggatatcgacagcaaagaaatcgaggctttgggcaatccaactccctcccgacggctggctctgtgggcggtggcatgggcagacggaacccgcgccagtaccagatcccctctcggaacgtcccttccgcccgcctgggcctcttgggcaccagtggattcgtcagctccaaccagcgcaacaccacagctacccccaccatcatgaaacaaggaagacagaacctgtggtttgccaaccccgggggcagcaatagcatgccaagccgcacccacagctcagtccagaggacccgctcgctgcccgtgcacacttccccacagaacatgctgatgttccagcagccagaattccagcttcccgtgaccgaacctgacatcaacaacaggctggagtcgttgtgcctcagtatgaccgaacacgccctgggagacggggttgaccggacctccaccatctagaagctgaagacgagagtgaccgcgctggccgtgaaatcgactgctgcgggtccagtgtccgccatcttcagggttgcacagaatcctccaagatactttgcagccttttttccccctggtccctctcccgttttgattttgtgagagcgtaggtcatcctcgtaaacatatcagtagacctggggttggttattttgtcatttgtttctgtcatgggatggtttggtgtgtggggtggggaggggtctctagggaattatgagactgggaggggggtggagggaatgcaggtagctctctggatggaacggggacaggggaaagagtactgccatgaaagagataggagacacataagaggacagcagaagccctggccctggggaggcttctcggaaggcctggcttcacaggcaggccacagaaggatatcgcgggcacgtgcacccaaagcaagatagtggcttcccttttatatccaatctaatcctgattggatgtccctgaggcccctgctggaaacagccataggagagggcccatggcagtaggggaaagaaggaagaaattccctgcaacaaaacttcagctaaactttgatttgtgtattgtttacataataattttaaagggtacataatgtgtaaagagtttggatagaacctctcttcatactatggttttcgtaaaggatctgttgttgttacggattcattttttccctctatttttataagagcagcagagttgtcttctcaaaacggctgccaagctctgcttcttgggaagatggatgcagtcatgtaggcctgagctgtccgtctttcaccgttaggtgggaggagcgtatgggtggacttgaaggacatggacgtggctggaatgagcacagcattgggtgagcgcacaaggatgaggacatcatgtgatcagttatgggtttgctcgcagggcacccagagattctcaaagaatcctgcagcctctttctgtgctggatttgcttgtcacggagaggcctccctccctttccaccccacccatggggcattatcctgtcactcccagccttgctccacacacacacaggtgggtacaagttccactggaggagaaaaggcaaggatggactttttccccttgtgagaggtttgatacccagaaaatgagctcaaaacctttacattagggttgcttgtaggaactggagcctggaggctgcatctacttcacctgtcactgctgagggagaggaggggagaaaggcccagcaacagcgtacagaggggtcagtcagcaagtccagagagcacatgcagggagatgtttggcccacaccgcacagccccgccatctccagtgggcgatgaaagatgtaggaaaggttgatttcaagatggaaatgacagcgctatccgcacagtatgaattagggatttgctgtgttagttgatttatccatccacacagaggggaggaaaaagacactcgttacttggtgggagattgagaaactgtggtacctaccacaaagtaatagctctgtttatgaagggcaagaaaggctacatttcagaatttgacacagtggagggtattagaggaaatcaaagaggagttgtgtggaaaatcaggttgtgtaaatgaaggtatgaatgctcagccagaggcaagatcagggagatggtacaaggcctgtttgttacatggatgagtcgggtgcctggttgtgtgtgtgtgtgtgtgtgtgtgtgtgtgtgtgtgaagtcagagttgaaattcagaagatcagactatggaaatcactgcccttttttttttaaaagctaatgaactacatacagacctaaaaggccttaatgaaatccgaacaattttcttttactttcaagatcaaaaacatgcacccaacccagccttggatgccaccaccaggtttttgaagcccttttgagtctaagaaggtgagaacaatgtaaccatagaaagcctttcgtgagcagagaaggcttgaatccacaatttcattcgctgaattaaaaaaaaaaggttcagacctctccttgggtgactaagttctaaagatgcaaatccatgtgcagaaagagatggcattttttagttgattatttttaaccaagtgccattaacattcatcccccacatcccttttctaaacaagcttagtgttacttggggaatgtgttgggatggacgatcacatgtaaggcaggaagaataggtcaaaggttgaaggccaaaggtaagaccagagggtttgcgaatgtgggtttgtaggatactgagaaagtgaataaagaggagaaaaaaccatggtattacacatcttgctgagaaaggaaagcattcggatctgctgcaaaaacacatatatccataaagactcatgttattcagaaaacagattgtgaacacaatcacattcgcatgaatcctttaaaaggaagaagaccttaaagtatctgcaaatctgaatttctatttattccttcactgaatatagaaacaatggttatctgattattagagatattattttggatatgttacttattaacttgctatggctggtaaccatgataaagtctgttattaataacaacataattctttttttaaagaagaaaagcttatttttcattgacagtgtatagatttatctacttagttgtgttttgctattagtgttttaattttttttttaagttgagtgtttgataaattttaagaccctgtccccaccttgttttgagtcctgtgttgactacaggtatatagctcaatttaaaaatcctaaagcaaaagaattttatttataaaagaatcaaacagttgcatgcatgaggctgtgaagtcagatatttagtaataaaagcagcagtgcctttttttgtatttacccattgacccccaccaaatgcaactgttttatattaagaaaatagtaacaattttaaaatctcagagtaaaatctatttcactacatgcttttccccccttgttctgatttaagcagtgtgtacttggcatctctacattgtcctagggacagtggtgttctacaatattatcatgtatgatgttttattggtgctttttattcatagtggcttcttaccagaaacagtaggaagaaacacatgaactgtgtacaagacatgaaacattgctgctgatatgttgttttttcacatgcttttgagttttcactttttaaacgagagccagcaagcaaaatagatgtggctgggtctgcctgtccgggcggctctttgcaccgagctctcaaatcctgtgtattgagggttcctttttggtactcaggattggagctacagctgggcccccctctctcccattcgtttgaagagacactgagggaaacaagggtttcttttgaggtgtccttggctgccttttacgggatgggagccttctccggatcttttgttcttctgcacctcttgtagctactgccggtgcaaggttgtagatgttattccccaggagcctgggcttgggggctgagctgggctgaatgcaaaagcatgcaaccagaaggcgggcaaggggaggaaaagcaggcctggcctcattggtcccctggagatgtctgtagcagtcagctccagcttgggcctggggaagcagcctgaccaaggcgctcaggtgtgcctgttacaagaagaacctgcagaaggataatttgcacatggagctgtgataacactaatgttgattttttttttttttacaagtcatcagagatgtttgcaaagtgagttttatttttttgtaattcctttatctttacttaaaggtgaatgtgtattcctctgggaggaataggaagaaaacaggaatgttaataatgtcgaacagaaaacttcctcccttattaatatataatcctcatgtatttatgcctaatgtaagctgacttttaaaaagctttcttttgttgcatgccctgtgcaggcatctgtattgtacatgcatgcctttcgtcctgttttcctgtataaagttagtgaacaaagaaatatttttgcctagttcatgttgccaagcaatgcatattttttaaatttgtcatatatggaaagagcatgtttgttacatgtaaaagctttactgatatacagatatactaatgtttgaagatgctgttctttgcaagtgtacagttttcaaatgttgttaccagtgaaacacccttgtggtttaaacttgctacaatgtatttattattcatttcctcccatgtaactaagaatcatggctatatttcatatcaacgttatattgaaagtgaagggaaatgattaatacaaggttttgtaacactg

SEQ ID NO: 30125 - DNA, 6526 bp, Homo sapiens
  source 1..6526: mol_type = unassigned DNA
gatgtttcgcgaccaggtcggggtgctggcgggctggtttaagggctggaacgagtgcgagcagactgttgcgctgctgtcgctgctcaagcgcgtgagccagacccaggcccgcttcctccagctctgcctggagcactcgctggccgactgcgccgagctgcacgtcctcgaacgcgaggccaacagccccggaatcattaaccaatggcaacaggaatccaaggataaagtgatttccctcctgttaactcatctgcctttgctgaagccaggaaacctcgacgcgaaagtagaatatatgaaactgctgcccaaaatcctggctcactctattgaacacaaccagcacattgaggagagcaggcagctgctgtcctatgctttgatacatccagccacttcgttagaagaccgtagtgctttagccatgtggctgaatcacttggaggaccgcacgtcgaccagctttggtggccagaaccgaggccgctcagactctgtggattatggacagacacactactatcaccaaagacagaactctgatgacaagctcaatgggtggcagaactctcgggattctgggatttgcatcaatgcctccaactggcaggacaaaagcatggggtgtgagaatggccatgtgcccctctactcctcctcatctgtccccaccacaatcaatacgattggaaccagcacaagtacaattctctcaggccaggcacaccacagccctttgaaacgatctgtgtcccttaccccacccatgaatgtgccaaaccagcctctaggacatggatggatgtctcatgaggacttacgagctagaggaccccagtgcctcccatccgatcatgcccccctgtctccacaaagcagtgtagcctcttcaggaagtggtgggagtgaacacttagaagatcagaccactgctcgtaacacattccaagaagaaggtagtgggatgaaagatgttccagcctggctgaaaagcctccgcctgcacaaatatgccgcgcttttctcccagatgacctatgaggagatgatggccctcaccgagtgccagctggaggcgcagaatgttaccaaaggtgcaagacacaaaattgtcatcagtattcagaagctcaaagaaagacaaaatctcctgaagtctttggaaagggacatcatcgaggggggcagcctgcgcatcccgctccaggaactgcaccagatgatcctgactccgatcaaggcctacagctccccgagcaccacccccgaggctcgccgccgggagccccaggccccgcgtcagccctcactgatgggccccgagagccagagccccgactgcaaagatggggccgcagccactggcgccacggccaccccctcggccggggccagcggggggctccagccgcaccagctgagcagctgcgatggggagctggccgtcgcccccctgccagagggggacctccccgggcagttcacacgcgtcatggggaaagtgtgcacacagctcttggtctccagacctgatgaggaaaatataagttcctatttacagctcatagacaagtgtctaattcatgaggcatttacagagacacagaaaaaaagattgttgtcatggaaacagcaggtgcagaagctctttcggtctttccctcggaaaacccttctagacatatcaggatatcgacagcaaagaaatcgaggctttgggcaatccaactccctcccgacggctggctctgtgggcggtggcatgggcagacggaacccgcgccagtaccagatcccctctcggaacgtcccttccgcccgcctgggcctcttgggcaccagtggattcgtcagctccaaccagcgcaacaccacagctacccccaccatcatgaaacaaggaagacagaacctgtggtttgccaaccccgggggcagcaatagcatgccaagccgcacccacagctcagtccagaggacccgctcgctgcccgtgcacacttccccacagaacatgctgatgttccagcagccagaattccagcttcccgtgaccgaacctgacatcaacaacaggctggagtcgttgtgcctcagtatgaccgaacacgccctgggagacggggttgaccggacctccaccatctagaagctgaagacgagagtgaccgcgctggccgtgaaatcgactgctgcgggtccagtgtccgccatcttcagggttgcacagaatcctccaagatactttgcagccttttttccccctggtccctctcccgttttgattttgtgagagcgtaggtcatcctcgtaaacatatcagtagacctggggttggttattttgtcatttgtttctgtcatgggatggtttggtgtgtggggtggggaggggtctctagggaattatgagactgggaggggggtggagggaatgcaggtagctctctggatggaacggggacaggggaaagagtactgccatgaaagagataggagacacataagaggacagcagaagccctggccctggggaggcttctcggaaggcctggcttcacaggcaggccacagaaggatatcgcgggcacgtgcacccaaagcaagatagtggcttcccttttatatccaatctaatcctgattggatgtccctgaggcccctgctggaaacagccataggagagggcccatggcagtaggggaaagaaggaagaaattccctgcaacaaaacttcagctaaactttgatttgtgtattgtttacataataattttaaagggtacataatgtgtaaagagtttggatagaacctctcttcatactatggttttcgtaaaggatctgttgttgttacggattcattttttccctctatttttataagagcagcagagttgtcttctcaaaacggctgccaagctctgcttcttgggaagatggatgcagtcatgtaggcctgagctgtccgtctttcaccgttaggtgggaggagcgtatgggtggacttgaaggacatggacgtggctggaatgagcacagcattgggtgagcgcacaaggatgaggacatcatgtgatcagttatgggtttgctcgcagggcacccagagattctcaaagaatcctgcagcctctttctgtgctggatttgcttgtcacggagaggcctccctccctttccaccccacccatggggcattatcctgtcactcccagccttgctccacacacacacaggtgggtacaagttccactggaggagaaaaggcaaggatggactttttccccttgtgagaggtttgatacccagaaaatgagctcaaaacctttacattagggttgcttgtaggaactggagcctggaggctgcatctacttcacctgtcactgctgagggagaggaggggagaaaggcccagcaacagcgtacagaggggtcagtcagcaagtccagagagcacatgcagggagatgtttggcccacaccgcacagccccgccatctccagtgggcgatgaaagatgtaggaaaggttgatttcaagatggaaatgacagcgctatccgcacagtatgaattagggatttgctgtgttagttgatttatccatccacacagaggggaggaaaaagacactcgttacttggtgggagattgagaaactgtggtacctaccacaaagtaatagctctgtttatgaagggcaagaaaggctacatttcagaatttgacacagtggagggtattagaggaaatcaaagaggagttgtgtggaaaatcaggttgtgtaaatgaaggtatgaatgctcagccagaggcaagatcagggagatggtacaaggcctgtttgttacatggatgagtcgggtgcctggttgtgtgtgtgtgtgtgtgtgtgtgtgtgtgtgtgtgaagtcagagttgaaattcagaagatcagactatggaaatcactgcccttttttttttaaaagctaatgaactacatacagacctaaaaggccttaatgaaatccgaacaattttcttttactttcaagatcaaaaacatgcacccaacccagccttggatgccaccaccaggtttttgaagcccttttgagtctaagaaggtgagaacaatgtaaccatagaaagcctttcgtgagcagagaaggcttgaatccacaatttcattcgctgaattaaaaaaaaaaggttcagacctctccttgggtgactaagttctaaagatgcaaatccatgtgcagaaagagatggcattttttagttgattatttttaaccaagtgccattaacattcatcccccacatcccttttctaaacaagcttagtgttacttggggaatgtgttgggatggacgatcacatgtaaggcaggaagaataggtcaaaggttgaaggccaaaggtaagaccagagggtttgcgaatgtgggtttgtaggatactgagaaagtgaataaagaggagaaaaaaccatggtattacacatcttgctgagaaaggaaagcattcggatctgctgcaaaaacacatatatccataaagactcatgttattcagaaaacagattgtgaacacaatcacattcgcatgaatcctttaaaaggaagaagaccttaaagtatctgcaaatctgaatttctatttattccttcactgaatatagaaacaatggttatctgattattagagatattattttggatatgttacttattaacttgctatggctggtaaccatgataaagtctgttattaataacaacataattctttttttaaagaagaaaagcttatttttcattgacagtgtatagatttatctacttagttgtgttttgctattagtgttttaattttttttttaagttgagtgtttgataaattttaagaccctgtccccaccttgttttgagtcctgtgttgactacaggtatatagctcaatttaaaaatcctaaagcaaaagaattttatttataaaagaatcaaacagttgcatgcatgaggctgtgaagtcagatatttagtaataaaagcagcagtgcctttttttgtatttacccattgacccccaccaaatgcaactgttttatattaagaaaatagtaacaattttaaaatctcagagtaaaatctatttcactacatgcttttccccccttgttctgatttaagcagtgtgtacttggcatctctacattgtcctagggacagtggtgttctacaatattatcatgtatgatgttttattggtgctttttattcatagtggcttcttaccagaaacagtaggaagaaacacatgaactgtgtacaagacatgaaacattgctgctgatatgttgttttttcacatgcttttgagttttcactttttaaacgagagccagcaagcaaaatagatgtggctgggtctgcctgtccgggcggctctttgcaccgagctctcaaatcctgtgtattgagggttcctttttggtactcaggattggagctacagctgggcccccctctctcccattcgtttgaagagacactgagggaaacaagggtttcttttgaggtgtccttggctgccttttacgggatgggagccttctccggatcttttgttcttctgcacctcttgtagctactgccggtgcaaggttgtagatgttattccccaggagcctgggcttgggggctgagctgggctgaatgcaaaagcatgcaaccagaaggcgggcaaggggaggaaaagcaggcctggcctcattggtcccctggagatgtctgtagcagtcagctccagcttgggcctggggaagcagcctgaccaaggcgctcaggtgtgcctgttacaagaagaacctgcagaaggataatttgcacatggagctgtgataacactaatgttgattttttttttttttacaagtcatcagagatgtttgcaaagtgagttttatttttttgtaattcctttatctttacttaaaggtgaatgtgtattcctctgggaggaataggaagaaaacaggaatgttaataatgtcgaacagaaaacttcctcccttattaatatataatcctcatgtatttatgcctaatgtaagctgacttttaaaaagctttcttttgttgcatgccctgtgcaggcatctgtattgtacatgcatgcctttcgtcctgttttcctgtataaagttagtgaacaaagaaatatttttgcctagttcatgttgccaagcaatgcatattttttaaatttgtcatatatggaaagagcatgtttgttacatgtaaaagctttactgatatacagatatactaatgtttgaagatgctgttctttgcaagtgtacagttttcaaatgttgttaccagtgaaacacccttgtggtttaaacttgctacaatgtatttattattcatttcctcccatgtaactaagaatcatggctatatttcatatcaacgttatattgaaagtgaagggaaatgattaatacaaggttttgtaacactg

SEQ ID NO: 30126 - DNA, 6528 bp, Homo sapiens
  source 1..6528: mol_type = unassigned DNA
atgatgtttcgcgaccaggtcggggtgctggcgggctggtttaagggctggaacgagtgcgagcagactgttgcgctgctgtcgctgctcaagcgcgtgagccagacccaggcccgcttcctccagctctgcctggagcactcgctggccgactgcgccgagctgcacgtcctcgaacgcgaggccaacagccccggaatcattaaccaatggcaacaggaatccaaggataaagtgatttccctcctgttaactcatctgcctttgctgaagccaggaaacctcgacgcgaaagtagaatatatgaaactgctgcccaaaatcctggctcactctattgaacacaaccagcacattgaggagagcaggcagctgctgtcctatgctttgatacatccagccacttcgttagaagaccgtagtgctttagccatgtggctgaatcacttggaggaccgcacgtcgaccagctttggtggccagaaccgaggccgctcagactctgtggattatggacagacacactactatcaccaaagacagaactctgatgacaagctcaatgggtggcagaactctcgggattctgggatttgcatcaatgcctccaactggcaggacaaaagcatggggtgtgagaatggccatgtgcccctctactcctcctcatctgtccccaccacaatcaatacgattggaaccagcacaagtacaattctctcaggccaggcacaccacagccctttgaaacgatctgtgtcccttaccccacccatgaatgtgccaaaccagcctctaggacatggatggatgtctcatgaggacttacgagctagaggaccccagtgcctcccatccgatcatgcccccctgtctccacaaagcagtgtagcctcttcaggaagtggtgggagtgaacacttagaagatcagaccactgctcgtaacacattccaagaagaaggtagtgggatgaaagatgttccagcctggctgaaaagcctccgcctgcacaaatatgccgcgcttttctcccagatgacctatgaggagatgatggccctcaccgagtgccagctggaggcgcagaatgttaccaaaggtgcaagacacaaaattgtcatcagtattcagaagctcaaagaaagacaaaatctcctgaagtctttggaaagggacatcatcgaggggggcagcctgcgcatcccgctccaggaactgcaccagatgatcctgactccgatcaaggcctacagctccccgagcaccacccccgaggctcgccgccgggagccccaggccccgcgtcagccctcactgatgggccccgagagccagagccccgactgcaaagatggggccgcagccactggcgccacggccaccccctcggccggggccagcggggggctccagccgcaccagctgagcagctgcgatggggagctggccgtcgcccccctgccagagggggacctccccgggcagttcacacgcgtcatggggaaagtgtgcacacagctcttggtctccagacctgatgaggaaaatataagttcctatttacagctcatagacaagtgtctaattcatgaggcatttacagagacacagaaaaaaagattgttgtcatggaaacagcaggtgcagaagctctttcggtctttccctcggaaaacccttctagacatatcaggatatcgacagcaaagaaatcgaggctttgggcaatccaactccctcccgacggctggctctgtgggcggtggcatgggcagacggaacccgcgccagtaccagatcccctctcggaacgtcccttccgcccgcctgggcctcttgggcaccagtggattcgtcagctccaaccagcgcaacaccacagctacccccaccatcatgaaacaaggaagacagaacctgtggtttgccaaccccgggggcagcaatagcatgccaagccgcacccacagctcagtccagaggacccgctcgctgcccgtgcacacttccccacagaacatgctgatgttccagcagccagaattccagcttcccgtgaccgaacctgacatcaacaacaggctggagtcgttgtgcctcagtatgaccgaacacgccctgggagacggggttgaccggacctccaccatctagaagctgaagacgagagtgaccgcgctggccgtgaaatcgactgctgcgggtccagtgtccgccatcttcagggttgcacagaatcctccaagatactttgcagccttttttccccctggtccctctcccgttttgattttgtgagagcgtaggtcatcctcgtaaacatatcagtagacctggggttggttattttgtcatttgtttctgtcatgggatggtttggtgtgtggggtggggaggggtctctagggaattatgagactgggaggggggtggagggaatgcaggtagctctctggatggaacggggacaggggaaagagtactgccatgaaagagataggagacacataagaggacagcagaagccctggccctggggaggcttctcggaaggcctggcttcacaggcaggccacagaaggatatcgcgggcacgtgcacccaaagcaagatagtggcttcccttttatatccaatctaatcctgattggatgtccctgaggcccctgctggaaacagccataggagagggcccatggcagtaggggaaagaaggaagaaattccctgcaacaaaacttcagctaaactttgatttgtgtattgtttacataataattttaaagggtacataatgtgtaaagagtttggatagaacctctcttcatactatggttttcgtaaaggatctgttgttgttacggattcattttttccctctatttttataagagcagcagagttgtcttctcaaaacggctgccaagctctgcttcttgggaagatggatgcagtcatgtaggcctgagctgtccgtctttcaccgttaggtgggaggagcgtatgggtggacttgaaggacatggacgtggctggaatgagcacagcattgggtgagcgcacaaggatgaggacatcatgtgatcagttatgggtttgctcgcagggcacccagagattctcaaagaatcctgcagcctctttctgtgctggatttgcttgtcacggagaggcctccctccctttccaccccacccatggggcattatcctgtcactcccagccttgctccacacacacacaggtgggtacaagttccactggaggagaaaaggcaaggatggactttttccccttgtgagaggtttgatacccagaaaatgagctcaaaacctttacattagggttgcttgtaggaactggagcctggaggctgcatctacttcacctgtcactgctgagggagaggaggggagaaaggcccagcaacagcgtacagaggggtcagtcagcaagtccagagagcacatgcagggagatgtttggcccacaccgcacagccccgccatctccagtgggcgatgaaagatgtaggaaaggttgatttcaagatggaaatgacagcgctatccgcacagtatgaattagggatttgctgtgttagttgatttatccatccacacagaggggaggaaaaagacactcgttacttggtgggagattgagaaactgtggtacctaccacaaagtaatagctctgtttatgaagggcaagaaaggctacatttcagaatttgacacagtggagggtattagaggaaatcaaagaggagttgtgtggaaaatcaggttgtgtaaatgaaggtatgaatgctcagccagaggcaagatcagggagatggtacaaggcctgtttgttacatggatgagtcgggtgcctggttgtgtgtgtgtgtgtgtgtgtgtgtgtgtgtgtgtgaagtcagagttgaaattcagaagatcagactatggaaatcactgcccttttttttttaaaagctaatgaactacatacagacctaaaaggccttaatgaaatccgaacaattttcttttactttcaagatcaaaaacatgcacccaacccagccttggatgccaccaccaggtttttgaagcccttttgagtctaagaaggtgagaacaatgtaaccatagaaagcctttcgtgagcagagaaggcttgaatccacaatttcattcgctgaattaaaaaaaaaaggttcagacctctccttgggtgactaagttctaaagatgcaaatccatgtgcagaaagagatggcattttttagttgattatttttaaccaagtgccattaacattcatcccccacatcccttttctaaacaagcttagtgttacttggggaatgtgttgggatggacgatcacatgtaaggcaggaagaataggtcaaaggttgaaggccaaaggtaagaccagagggtttgcgaatgtgggtttgtaggatactgagaaagtgaataaagaggagaaaaaaccatggtattacacatcttgctgagaaaggaaagcattcggatctgctgcaaaaacacatatatccataaagactcatgttattcagaaaacagattgtgaacacaatcacattcgcatgaatcctttaaaaggaagaagaccttaaagtatctgcaaatctgaatttctatttattccttcactgaatatagaaacaatggttatctgattattagagatattattttggatatgttacttattaacttgctatggctggtaaccatgataaagtctgttattaataacaacataattctttttttaaagaagaaaagcttatttttcattgacagtgtatagatttatctacttagttgtgttttgctattagtgttttaattttttttttaagttgagtgtttgataaattttaagaccctgtccccaccttgttttgagtcctgtgttgactacaggtatatagctcaatttaaaaatcctaaagcaaaagaattttatttataaaagaatcaaacagttgcatgcatgaggctgtgaagtcagatatttagtaataaaagcagcagtgcctttttttgtatttacccattgacccccaccaaatgcaactgttttatattaagaaaatagtaacaattttaaaatctcagagtaaaatctatttcactacatgcttttccccccttgttctgatttaagcagtgtgtacttggcatctctacattgtcctagggacagtggtgttctacaatattatcatgtatgatgttttattggtgctttttattcatagtggcttcttaccagaaacagtaggaagaaacacatgaactgtgtacaagacatgaaacattgctgctgatatgttgttttttcacatgcttttgagttttcactttttaaacgagagccagcaagcaaaatagatgtggctgggtctgcctgtccgggcggctctttgcaccgagctctcaaatcctgtgtattgagggttcctttttggtactcaggattggagctacagctgggcccccctctctcccattcgtttgaagagacactgagggaaacaagggtttcttttgaggtgtccttggctgccttttacgggatgggagccttctccggatcttttgttcttctgcacctcttgtagctactgccggtgcaaggttgtagatgttattccccaggagcctgggcttgggggctgagctgggctgaatgcaaaagcatgcaaccagaaggcgggcaaggggaggaaaagcaggcctggcctcattggtcccctggagatgtctgtagcagtcagctccagcttgggcctggggaagcagcctgaccaaggcgctcaggtgtgcctgttacaagaagaacctgcagaaggataatttgcacatggagctgtgataacactaatgttgattttttttttttttacaagtcatcagagatgtttgcaaagtgagttttatttttttgtaattcctttatctttacttaaaggtgaatgtgtattcctctgggaggaataggaagaaaacaggaatgttaataatgtcgaacagaaaacttcctcccttattaatatataatcctcatgtatttatgcctaatgtaagctgacttttaaaaagctttcttttgttgcatgccctgtgcaggcatctgtattgtacatgcatgcctttcgtcctgttttcctgtataaagttagtgaacaaagaaatatttttgcctagttcatgttgccaagcaatgcatattttttaaatttgtcatatatggaaagagcatgtttgttacatgtaaaagctttactgatatacagatatactaatgtttgaagatgctgttctttgcaagtgtacagttttcaaatgttgttaccagtgaaacacccttgtggtttaaacttgctacaatgtatttattattcatttcctcccatgtaactaagaatcatggctatatttcatatcaacgttatattgaaagtgaagggaaatgattaatacaaggttttgtaacactg

SEQ ID NO: 30127 - DNA, 3003 bp, Homo sapiens
  source 1..3003: mol_type = unassigned DNA
ttagctcccacccccacccccgcgccccttcgcagccgcattgcaagttttctgcgcggggaagatctgttgctggtgctggcgttcttaagcacggcgcccgaggccaccccaggcgggccgtgaggggagcaccagccgttggcagcggcagcaacaggaagccgcggggtctcctcccgcacctgggaagcaggcttctcgctgttacccggtggggaatagcccatctcccacatcggtggtgatcgccgctcgggaatgcgggcgtgaagggtccgagttgccgcccagcggggaggagaccccaggacgccggaaatcaccatcccaaagctgcaagaaggggggagaaagcattcttcattcagttgtgtgccttgtgggggatttttaaaaagtcgtttttttttttaaagaaacatttccgtgctactgtctgtcatcgtctctggggaaatcagccagaaccaccggaacgtaactgaaaccagacaagagaggcaggagcccaggcagtacctgcagcgtccgggcaccagagccaccttggaacaggaacgcgtctccggccgcggggctgcggctccgccaaactttggggcgggcggggcgggctggggcgcccagggggctctgtagaccgagggcggccccctaaccatgatgtttcgcgaccaggtcggggtgctggcgggctggtttaagggctggaacgagtgcgagcagactgttgcgctgctgtcgctgctcaagcgcgtgagccagacccaggcccgcttcctccagctctgcctggagcactcgctggccgactgcgccgagctgcacgtcctcgaacgcgaggccaacagccccggaatcattaaccaatggcaacaggaatccaaggataaagtgatttccctcctgttaactcatctgcctttgctgaagccaggaaacctcgacgcgaaagtagaatatatgaaactgctgcccaaaatcctggctcactctattgaacacaaccagcacattgaggagagcaggcagctgctgtcctatgctttgatacatccagccacttcgttagaagaccgtagtgctttagccatgtggctgaatcacttggaggaccgcacgtcgaccagctttggtggccagaaccgaggccgctcagactctgtggattatggacagacacactactatcaccaaagacagaactctgatgacaagctcaatgggtggcagaactctcgggattctgggatttgcatcaatgcctccaactggcaggacaaaagcatggggtgtgagaatggccatgtgcccctctactcctcctcatctgtccccaccacaatcaatacgattggaaccagcacaagtacaattctctcaggccaggcacaccacagccctttgaaacgatctgtgtcccttaccccacccatgaatgtgccaaaccagcctctaggacatggatggatgtctcatgaggacttacgagctagaggaccccagtgcctcccatccgatcatgcccccctgtctccacaaagcagtgtagcctcttcaggaagtggtgggagtgaacacttagaagatcagaccactgctcgtaacacattccaagaagaaggtagtgggatgaaagatgttccagcctggctgaaaagcctccgcctgcacaaatatgccgcgcttttctcccagatgacctatgaggagatgatggccctcaccgagtgccagctggaggcgcagaatgttaccaaaggtgcaagacacaaaattgtcatcagtattcagaagctcaaagaaagacaaaatctcctgaagtctttggaaagggacatcatcgaggggggcagcctgcgcatcccgctccaggaactgcaccagatgatcctgactccgatcaaggcctacagctccccgagcaccacccccgaggctcgccgccgggagccccaggccccgcgtcagccctcactgatgggccccgagagccagagccccgactgcaaagatggggccgcagccactggcgccacggccaccccctcggccggggccagcggggggctccagccgcaccagctgagcagctgcgatggggagctggccgtcgcccccctgccagagggggacctccccgggcagttcacacgcgtcatggggaaagtgtgcacacagctcttggtctccagacctgatgaggaaaatataagttcctatttacagctcatagacaagtgtctaattcatgaggcatttacagagacacagaaaaaaagattgttgtcatggaaacagcaggtgcagaagctctttcggtctttccctcggaaaacccttctagacatatcaggatatcgacagcaaagaaatcgaggctttgggcaatccaactccctcccgacggctggctctgtgggcggtggcatgggcagacggaacccgcgccagtaccagatcccctctcggaacgtcccttccgcccgcctgggcctcttgggcaccagtggattcgtcagctccaaccagcgcaacaccacagctacccccaccatcatgaaacaaggaagacagaacctgtggtttgccaaccccgggggcagcaatagcatgccaagccgcacccacagctcagtccagaggacccgctcgctgcccgtgcacacttccccacagaacatgctgatgttccagcagccagaattccagcttcccgtgaccgaacctgacatcaacaacaggctggagtcgttgtgcctcagtatgaccgaacacgccctgggagacggggttgaccggacctccaccatctagaagctgaagacgagagtgaccgcgctggccgtgaaatcgactgctgcgggtccagtgtccgccatcttcagggttgcacagaatcctccaagatactttgcagccttttttccccctggtccctctcccgttttgattttgtgagagcgtaggtcatcctcgtaaacatatcagtagacctgg

SEQ ID NO: 30128 - DNA, 1337 bp, Homo sapiens
  source 1..1337: mol_type = unassigned DNA
agttactgaacccttatcaagcagctgcctgggactcaatttgccccatccattggagattaaccgacatcatcgaggggggcagcctgcgcatcccgctccaggaactgcaccagatgatcctgactccgatcaaggcctacagctccccgagcaccacccccgaggctcgccgccgggagccccaggccccgcgtcagccctcactgatgggccccgagagccagagccccgactgcaaagatggggccgcagccactggcgccacggccaccccctcggccggggccagcggggggctccagccgcaccagctgagcagctgcgatggggagctggccgtcgcccccctgccagagggggacctccccgggcagttcacacgcgtcatggggaaagtgtgcacacagctcttggtctccagacctgatgaggaaaatataagttcctatttacagctcatagacaagtgtctaattcatgaggcatttacagagacacagaaaaaaagattgttgtcatggaaacagcaggtgcagaagctctttcggtctttccctcggaaaacccttctagacatatcaggatatcgacagcaaagaaatcgaggctttgggcaatccaactccctcccgacggctggctctgtgggcggtggcatgggcagacggaacccgcgccagtaccagatcccctctcggaacgtcccttccgcccgcctgggcctcttgggcaccagtggattcgtcagctccaaccagcgcaacaccacagctacccccaccatcatgaaacaaggaagacagaacctgtggtttgccaaccccgggggcagcaatagcatgccaagccgcacccacagctcagtccagaggacccgctcgctgcccgtgcacacttccccacagaacatgctgatgttccagcagccaggttcccaagttcacagtggactgtgtttaacagaccttagaggttggttgagcctgagtggagccccttccatgccagcgctgacagtccccaagtcctcccagggagaattccagcttcccgtgaccgaacctgacatcaacaacaggctggagtcgttgtgcctcagtatgaccgaacacgccctgggagacggggttgaccggacctccaccatctagaagctgaagacgagagtgaccgcgctggccgtgaaatcgactgctgcgggtccagtgtccgccatcttcagggttgcacagaatcctccaagatactttgcagccttttttccccctggtccctctcccgttttgattttgtgagagcgtaggtcatcctcgtaaacatatcagtagacctgg

SEQ ID NO: 30129 - DNA, 2590 bp, Homo sapiens
  source 1..2590: mol_type = unassigned DNA
ctcggaccgcggaggtgagcgggagctgaggctgaggagaggggagcttggggggcgcctgctgccaagggcagcggaggaggaaatggcaggtcctaatcaactctgcattcgccgctggactaccaagcatgtagctgtgtggctgaaggatgaaggcttttttgaatatgtggacattttatgcaataagcaccgacttgatggaatcacattgctaacattgactgaatatgatctccggtctcctcctctggaaatcaaagtcttaggggacattaaaaggttaatgctctcagtccgaaaattgcagaaaatacatattgatgttttagaagagatgggctacaacagtgacagtcccatgggttccatgacccctttcatcagtgctcttcagagtacagactggctctgtaatggggagctttcccatgactgtgacggacccataactgacttgaattctgatcagtaccagtacatgaatggtaaaaacaaacattctgttcgaagattggacccagaatactggaagactatactgagttgtatatatgtttttatagtatttggatttacatctttcattatggttatagtccatgagcgagtgcctgacatgcagacctatccaccactcccagatatattcttagacagcgttcctagaatcccatgggcctttgccatgacggaagtatgtggcatgattctgtgctatatttggctcctggttcttcttcttcacaagcacaggtcaatacttctgcgaaggctctgtagtctgatgggaactgtattcttgcttcgctgctttaccatgtttgtgacctccctctccgtgccaggacaacacctgcagtgtactggaaagatatatggcagtgtatgggagaaattacatcgagcctttgccatttggagtggctttggtatgaccctgactggcgttcacacatgtggagattacatgtttagtggccacacagtcgtcctaactatgctgaatttctttgtcaccgaatgtaagtatctttttagtgcttctatgcgtattaggtaactagctgcagtgaaggctgtgggaagggtgtcagatcctgtgaagaatggcaaaacagcctgacctgagaaacgtgactgagaagcattggaaggaatgtagctttaaaatgatctttctgtccttttcctagatacaccaagaagctggaatttcttgcacactttatcctgggttctcaacctctttggaatcttcttcatcttggctgcccatgaacattattctattgatgtgtttattgctttttatataacaacaagactctttttgtactaccatactctggccaataccagagcatatcagcagagtaggagagcaaggatttggtttcccatgttctctttttttgaatgcaatgttaatggcacagtacctaatgaatattgttggccattttcaaaaccagcaataatgaaaagactaattggatgaatactatctttctaatgaatttgtgattaaatatataatagttgttgaaaatgagtaactttgcgttctccccctaggttgttcttagatgcctggcttatgtgttgacaaagtaaagttttctgttctgagcaaagttatgattataaaaagcaagaaagaacaatcaagagtccttatgtagctatttgaacagaaagcttaagtagatgttttctgccccttctctttaggaagacttaatgttgtgattgaagtcaggctgtacccttacctgttgagtatttgcttattgaactttaaacaagtcaacttgagcagtttgctggttgaggaattttcattgatttccagtagggctctagtcaagaaataatatgttttgaagctccttattacctttagaagaagaaaccctaacaagtgacagtacttgttctttggactaatctttgtttcattttaaaaaatgcaaccctgggacatgatctgttttactgacaaagagtttttgccttctgaaccatctttaaatatactgagcataccaggatgcctgaaataagaagagaatgaaagaggccatagatgacgtgacagagtactggctaggatgccattggtctcctcattaatgcaaatgtagggctggcatatttcaccaaagatgcaacaaaagatgcagtgccagtgtgaccctcagtgagtattcatgagggaaaaatggctgcatccataaaaataaatgggcttaatgttagtggtataggtacccagaataacttctttgtgctatagttgttagatgacagttcaattttatgcttttttaatggtgttattaaatgagccaaataggagtgttttaccagatgttagataaagttcttaatgccgttaagtagggaggtatgcatgcaaagaattgttttctcctgaaaagaaacttacagcacgcaaaatataactttttggtttttgaaatttatcattcttggctgttggaagtaaacagtctcagacatacttggatatgaaaaagtttcgttgttttttacttttaaatataatggtgtatatacattc

SEQ ID NO: 30130 - DNA, 1654 bp, Homo sapiens
  source 1..1654: mol_type = unassigned DNA
ggtagggccccgcctcccgaagcagttccggttcggctccgagcagctgccggcgcggcggtgacggcggccgggacgatgcctgcgcgcagtcgccaccgcccccgcctccactccggctccccgccccgggctccgcccccgccgcttgaggcgcttcactccggcgaggcggggagggccccggactccgacggcggctcggacgccgactcggaggtgggtccggggagcccgactcggaccgcggaggcagcggaggaggaaatggcaggtcctaatcaactctgcattcgccgctggactaccaagcatgtagctgtgtggctgaaggatgaaggcttttttgaatatgtggacattttatgcaataagcaccgacttgatggaatcacattgctaacattgactgaatatgatctccggtctcctcctctggaaatcaaagtcttaggggacattaaaaggttaatgctctcagtccgaaaattgcagaaaatacatattgatgttttagaagagatgggctacaacagtgacagtcccatgggttccatgacccctttcatcagtgctcttcagagtacagactggctctgtaatggggagctttcccatgactgtgacggacccataactgacttgaattctgatcagtaccagtacatgaatggtaaaaacaaacattctgttcgaagattggacccagaatactggaagactatactgagttgtatatatgtttttatagtatttggatttacatctttcattatggttatagtccatgagcgagtgcctgacatgcagacctatccaccactcccagatatattcttagacagcgttcctagaatcccatgggcctttgccatgacggaagtatgtggcatgattctgtgctatatttggctcctggttcttcttcttcacaagcacaggtcaatacttctgcgaaggctctgtagtctgatgggaactgtattcttgcttcgctgctttaccatgtttgtgacctccctctccgtgccaggacaacacctgcagtgtactggaaagatatatggcagtgtatgggagaaattacatcgagcctttgccatttggagtggctttggtatgaccctgactggcgttcacacatgtggagattacatgtttagtggccacacagtcgtcctaactatgctgaatttctttgtcaccgaatatacaccaagaagctggaatttcttgcacactttatcctgggttctcaacctctttggaatcttcttcatcttggctgcccatgaacattattctattgatgtgtttattgctttttatataacaacaagactctttttgtactaccatactctggccaataccagagcatatcagcagagtaggagagcaaggatttggtttcccatgttctctttttttgaatgcaatgttaatggcacagtacctaatgaatattgttggccattttcaaaaccagcaataatgaaaagactaattggatgaatactatctttctaatgaatttgtgattaaatatataatagttgttgaaaatgagtaactttgcgttctccccctaggttgttcttagatgcctggcttatgtgttgacaaagtaaagttttctgttctgagcaaagtt

SEQ ID NO: 30131 - DNA, 919 bp, Homo sapiens
  source 1..919: mol_type = unassigned DNA
gagagccgactgaggccttgtggactgcagtgggccctccggtccctctaaacccccaggcctcctctctgcttggtatctgtttgggattgaagaccgttggttccataaacctccatgaagatgggagtctacctgaagaggcagcggaggaggaaatggcaggtcctaatcaactctgcattcgccgctggactaccaagcatgtagctgtgtggctgaaggatgaaggcttttttgaatatgtggacattttatgcaataagcaccgacttgatggaatcacattgctaacattgactgaatatgatctccggtctcctcctctggaaatcaaagtcttaggggacattaaaaggttaatgctctcagtccgaaaattgcagaaaatacatattgatgttttagaagagatgggctacaacagtgacagtcccatgggttccatgacccctttcatcagtgctcttcagagtacagactggctctgtaatggggagctttcccatgactgtgacggacccataactgacttgaattctgatcagtaccagtacatgaatggtaaaaacaaacattctgttcgaagattggacccagaatactggaagactatactgagttgtatatatgtttttatagtatttggatttacatctttcattatggttatagtccatgagcgagtgcctgacatgcagacctatccaccactcccagatatattcttagacagcgttcctagaatcccatgggcctttgccatgacggaagtatgtggcatgattctgtgctatatttggctcctggttcttcttcttcacaagcacaggtcaatacttctgcgaaggctctgtagtctgatgggaactgtattcttgcttcgctgctttaccatgtttgtgacctccctctccgt

SEQ ID NO: 30132 - DNA, 6782 bp, Homo sapiens
  source 1..6782: mol_type = unassigned DNA
cggcgaggcggggagggccccggactccgacggcggctcggacgccgactcggaggtgggtccggggagcccgactcggaccgcggaggcagcggaggaggaaatggcaggtcctaatcaactctgcattcgccgctggactaccaagcatgtagctgtgtggctgaaggatgaaggcttttttgaatatgtggacattttatgcaataagcaccgacttgatggaatcacattgctaacattgactgaatatgatctccggtctcctcctctggaaatcaaagtcttaggggacattaaaaggttaatgctctcagtccgaaaattgcagaaaatacatattgatgttttagaagagatgggctacaacagtgacagtcccatgggttccatgacccctttcatcagtgctcttcagagtacagactggctctgtaatggggagctttcccatgactgtgacggacccataactgacttgaattctgatcagtaccagtacatgaatggtaaaaacaaacattctgttcgaagattggacccagaatactggaagactatactgagttgtatatatgtttttatagtatttggatttacatctttcattatggttatagtccatgagcgagtgcctgacatgcagacctatccaccactcccagatatattcttagacagcgttcctagaatcccatgggcctttgccatgacggaagtatgtggcatgattctgtgctatatttggctcctggttcttcttcttcacaagcacaggtcaatacttctgcgaaggctctgtagtctgatgggaactgtattcttgcttcgctgctttaccatgtttgtgacctccctctccgtgccaggacaacacctgcagtgtactggaaagatatatggcagtgtatgggagaaattacatcgagcctttgccatttggagtggctttggtatgaccctgactggcgttcacacatgtggagattacatgtttagtggccacacagtcgtcctaactatgctgaatttctttgtcaccgaatatacaccaagaagctggaatttcttgcacactttatcctgggttctcaacctctttggaatcttcttcatcttggctgcccatgaacattattctattgatgtgtttattgctttttatataacaacaagactctttttgtactaccatactctggccaataccagagcatatcagcagagtaggagagcaaggatttggtttcccatgttctctttttttgaatgcaatgttaatggcacagtacctaatgaatattgttggccattttcaaaaccagcaataatgaaaagactaattggatgaatactatctttctaatgaatttgtgattaaatatataatagttgttgaaaatgagtaactttgcgttctccccctaggttgttcttagatgcctggcttatgtgttgacaaagtaaagttttctgttctgagcaaagttatgattataaaaagcaagaaagaacaatcaagagtccttatgtagctatttgaacagaaagcttaagtagatgttttctgccccttctctttaggaagacttaatgttgtgattgaagtcaggctgtacccttacctgttgagtatttgcttattgaactttaaacaagtcaacttgagcagtttgctggttgaggaattttcattgatttccagtagggctctagtcaagaaataatatgttttgaagctccttattacctttagaagaagaaaccctaacaagtgacagtacttgttctttggactaatctttgtttcattttaaaaaatgcaaccctgggacatgatctgttttactgacaaagagtttttgccttctgaaccatctttaaatatactgagcataccaggatgcctgaaataagaagagaatgaaagaggccatagatgacgtgacagagtactggctaggatgccattggtctcctcattaatgcaaatgtagggctggcatatttcaccaaagatgcaacaaaagatgcagtgccagtgtgaccctcagtgagtattcatgagggaaaaatggctgcatccataaaaataaatgggcttaatgttagtggtataggtacccagaataacttctttgtgctatagttgttagatgacagttcaattttatgcttttttaatggtgttattaaatgagccaaataggagtgttttaccagatgttagataaagttcttaatgccgttaagtagggaggtatgcatgcaaagaattgttttctcctgaaaagaaacttacagcacgcaaaatataactttttggtttttgaaatttatcattcttggctgttggaagtaaacagtctcagacatacttggatatgaaaaagtttcgttgttttttacttttaaatataatggtgtatatacattctttctatttagtcttaatttggcagtcaggaagtgatataacttagctgctatttacaacactagaaatttagtactttaagtaatttcacatctatgataacatttgttactttatttttaatgatttttttacagtagttatgacagtaggatggttatggaattggaatttaaactcccaactaatgagcttaagctgcttggaatattaattatgtagtttttacattccattttaaaacaaaaacttagaaaaggtgctggcattctgaggcctgcaattaggccacatagcagaagcttgctccttccttatctgggtgaaatattttatttttgcactttgagtcatattcccacccctgtataagctacataggagcctgaatgaattgggtaggaaaggaaattatgcaaacaagtctcagctagtgctgaatgaccccaatttgggtctgctgtgaacatcatttttgtatttctcacttgagaaatgctgcaaggcaattcaacttttatgcttttaaatctcacaactcagaatctgatatcttaaatcactgattctgttacatgctaggaacaaaatgccaacatctcatgtaaagaagttgcataatcatgaaaaataaaggatgtttcctatgccagttagagtggtttgacccttcaggtaaaaagatatgttactgttatttttctacgtgacagaacagactgaatttagctagggaggcagtgatgttggcttttgggaaagggttcaaaaaactgtatggcaacattaatgctaaaatgttaagccgagtgcagtggtgcaaggctatagtcccaggttctgaggaggctgaggcaggaggattgcttgaggccaggagttagaaactagagtgtgttataacgcctatgaataaccactgcattccagcccgggcaaggtagcaagacccattctcttaaaaacatggctgggtgcaatggctcacgcctgtaatcccagcactttgggaggccaaggcaggcggatggcttgaggtcaggagttcgagattagcctggccaatatggtgaaacctcatctctactaaaactacaaaaattagctgggcatggtggcacgcacttgtaatcccagctacttgggagactgaggaacaagaaacacttgaacccaggaggtggagtttgcattgagctgagatcactccactgcactccagcctaggtgacagagtgagactccatctcaaaacgaaacaaaacaaaacaaaacaaattagagtgggtgcagtgtctaatgcctgtaatcgcagcactttgggaggctaaggcaggaggatcacttgagctcaggtaaaagagaccagcctgggcaacaaagtgagacctcatccccacaaaaagttgtttagaaaattagctgggcgtggtgatgcatgcctgtggtcccagctacatgggaggctgaggcagaaggatcacttgagcccaaggaggttgaggctacagtgagctgtaatcatgccactgcactccagccttggggacagagtgagaccctgcctcaatcaatcaatcaatcaataacaaaaacttaaatagctattaacctcagtcttctttccttcatataaattctattctaagaccaaatagaaaaataaatgtaactaactttgcagagctattgacattgagagacctaacaacagactgcaatggggattgtaaaataacttttcagccttgcacttgctcatatatgttttgagaaaaatgtaagttaggtataacttattgttttaactattataaggcagtgtttacataaattaatcatctctttcttggaaaacattgagacaaatttattttcagttttacttaaacatgaaacctgtattttagttgctttttgttttgtccagaaatttccagattttgtcttcattttttttcctggttaaaatctaaaccatagtgaagatagtatttatgtttacattttatctgtgaatgtggctaagcagagaagctacatggctttggtctacatattttttgaccttgtatttggttctgtagttgcagacttgtgaaggcttacatcatcatggagactttagtaaggaaggaaccaaaaggtttttggtttggggatgcaaactggaggttatgttacaagtcttcaatgcattttctgtgttcctggcagcagtgttgcctttttttttcttttccttttttttttttaaagaccaggtagggtagtgttattgaagggtaattgaagagtggtagagagtaagaggttttgaaggaggcaggtttgctgttatcacaaaataatttgggggaaacctttcgtggctgtgctgcaagaattctttatgtggctatcctctccatagttttctgaccagaattgcaagggcaaaaatagaacttctagctctatttatttgtatcctttgaaatcagaacttatccttagaaccagtcagttaaataatgcggactatgcctataatcccagcactttaggaggctgaggcaggcagatcacgaggtcaggagttcgaggccagcctggccaatgtggtgaaactccgtctctactaaaaatacaaaaattagccgggcgtggtggtgcacgcccatgcctgtagtcccagctactcgggaggctgaggcagaagaatcgcttgaacccaggaggcggaggttgcagtgagccgagatactgccactacacttcagtctgggtgacagagcgagactccatctcaaaaaaacaaaacaaaataaaataataatgtgggctattcagaagaaaaagtcagtgacagagagaccagaacccattggatcaagagacctgcagggattataactctttactctgtgagcagcggtgtttcgtgccctgtctctgcctgtgtgtttttactaagaattccagaaatcctgtaatttgtaaatgggaaacagaggaaccagattgttttatagctgataagaaacagtctgttttagaaacatctgtttggaaagtattactcatgtattcacaaagtcatatttataacactagtcttctttgactgtattcaacaaaaggcagtttcaccattaatttcatagtaagcttttttaaaggattctagatctaaattgcctaagaatgttaaccacattcttgttttaaactctctaatttaataaatgtaattattttatagtcttttatagacttacattttcttcatactaaaggtaatgataatatagtcatttgccagtactttaaggtattcaggcatttgagacaagaaagctgtcttgtagaatagtccaattgctttcttaaacagtactggtttcatttagacagtttctaagccagcaaaggtgtcaattttaatgccaacttgacagtttaacagttagtgtttgtaagcagtttagcctgaattatcccatactgctgtagaggagaattgttagtaacatcaaaggtcagaatgcttcaggtgactaataagaatggaaagagactgagtaggttttttgtttcttttccctgtctttgagtaactttgaatgactaaaattagtatgaaactaggttttggacccccttctcacctcacccggatgtaatgccaccaatttcaaataactaaaatgtgaccaattactttgcttcaagttctatacaaatatctctgaaatctgtaagccatatttcagctattctggtttttataatacattctaccctaaattaaccaaaggactttttattcagtgtattccatgtttcagcataaggaaagtttgtgcctgatatggcaggagaaagaacactatggtaatttcattgttacttcaggtctctttcaatctgaagaactgggttgtctggagaattgaacatagccaagcaatattatcaattagtaatgtcatcttaaaaatgttcacttttactaagttttattcagaggatctatgtattattagaaaaatgaagtatttctgacatggaacaaagaaagtggaaactggtacttaatgggggaagcaaaattagctgggactaaaacggacatgttttgttttgtgaattctacctaaatgtctctctatccacagagaaactagtattacttgaagatgtgaaagttcctgtggtagccataccttgaagcacagtgtttgtacataagtaaatatcttgattctaaattaaatccagatttaactaatatatattattttatatctttgttgtattaaaatgtttaaaaacactaaaaataaaacatttgaaagttgga

SEQ ID NO: 30133 - DNA, 6852 bp, Homo sapiens
  source 1..6852: mol_type = unassigned DNA
gacagaagcagagaatacatagacttccgttaaaaccagaatgaggaaaatacttttctctagcatcgtaggaggaagaaaacaaacacatcagatattttcagcactaaaagagatggttttccccacatatatgtaaaagaaatttgcaagactactggattttgatctcatggttgcagtgggtgaataggtggccttttgtgatctcctacatcaccctggaagtgagacttcttcggtttcttctagagtcagtttggtatcagaatggcaaagcaacttaaccttccagaaaatacagatgattggacaaaagaggatgtaaatcagtggttagaaagtcataagattgaccaaaaacacagggaaattttgactgaacaagacgtgaatggagcagtcttgaagtggttaaaaaaagaacatcttgttgatatgggcatcacacatggaccagctattcaaatagaagaactattcaaagaattgcggaaaacagccattgaagattcgattcagacatctaagatgggaaagcccagtaaaaatgctcctaaagaccaaactgtgtctcaaaaggaacgtagagaaacttcaaagcaaaaacaaaagggtaaagagaacccagatatggctaatccgtctgcaatgagtacaactgctaaaggttctaagtcactaaaagttgagctcatagaagataaaatagattatacaaaggaaaggcaaccatccatagacctgacatgtgtatcatatccatttgatgaattcagtaatccatatcgttacaagttggattttagtctacagcctgaaacaggaccaggcaatctcattgatccgatacatgaattcaaagccttcacaaatacagcaacagccacagaagaggatgtcaagatgaaatttagcaatgaggttttccgatttgcttcagcttgtatgaattcacgtaccaatggcactattcattttggagtcaaagacaaaccccatgggaaaattgttggcatcaaagtcaccaatgataccaaggaagccctcattaaccatttcaatctgatgataaacaagtattttgaagaccatcaagtccaacaagcaaagaagtgcattcgagagccaagatttgtggaagttttactgccaaatagtactctatctgacagatttgttattgaagtggacattattccacagttctctgaatgccaatatgattatttccagattaaaatgcaaaattacaacaacaaaatatgggaacaaagtaaaaaattctcactatttgtgcgagatgggaccagctctaaggacattacgaaaaataaagttgatttcagagcatttaaagcagattttaaaacactggcagagtccagaaaagcagcagaagaaaaattcagagcaaaaacaaataaaaaagaaagagagggaccaaagttggttaaattattgacaggaaatcaagatttgttagataattcatactatgaacagtacattcttgtaacaaataaatgccacccagatcaaacaaaacacttagatttcctgaaggaaattaaatggtttgctgtattggagtttgatcctgagtctaacatcaatggagtggtcaaagcttacaaagaaagccgagtagcaaaccttcactttccaagtgtatatgtagaacagaaaaccacaccaaatgagacgatttctactctaaatctttaccatcaacccagctggattttctgcaatggcaggttagaccttgacagtgaaaaatataaaccctttgatccaagttcctggcaaagagaaagagcttctgatgtcaggaaactgatttcatttcttacacatgaagacataatgccaagagggaagtttttggtggtatttctattactgtcctctgtggatgacccaagagatcccctcattgagactttctgtgctttctaccaggatctcaaaggaatggaaaatatactgtgtatttgtgtgcacccacacatatttcagggatggaaagatctacttgaagcaagattaataaaacaccaagatgaaatttcaagccaatgtatttctgctttaagccttgaagagatcaatggcactattcttaaactaaaatctgtgactcaatcttcaaaaaggcttttgccatctattggtttatcgactgtccttctgaaaaaggaagaagatatcatgactgctctggaaattatctgtgaaaatgaatgtgagggtacactgttagagaaggacaaaaataaattccttgaattcaaggcatcaaaagaggaagacttctatcgaggtggcaaagtgtcatggtggaacttctacttctcttctgaaagttattcttcaccttttgtcaaaagggataaatatgaaagacttgaagcaatgattcaaaactgtgcagattcttctaaaccaacaagtaccaaaattattcatctgtatcatcatccaggctgtgggggaactaccttggctatgcacattctctgggaactaaggaagaaattcagatgtgctgtgctgaaaaacaagacagtggatttttctgaaattggagaacaggtaaccagtttaatcacctatggggcaatgaaccgtcaggaatacgtacctgtactactccttgttgatgattttgaagaacaagataatgtctatcttctgcagtactctattcaaacagctatagctaaaaagtacattcgatatgaaaaacctctggtgattatcctaaattgtatgagatcacaaaatcctgaaaaaagtgcaaggatcccagacagtattgccgtaatacagcaactctctcccaaagaacagagagcttttgagcttaaattgaaagaaatcaaagaacagcataaaaactttgaggatttttattcctttatgatcatgaaaaccaattttaataaagaatacatagaaaatgtggtccggaatatcctgaaagggcagaatattttcaccaaggaagcaaagctcttttcttttctggctcttcttaattcatatgtgcctgataccaccatttcactatcacagtgtgaaaaattcttaggaattggaaacaagaaggctttctgggggacagaaaaatttgaagacaagatgggcacctactctacaattctgataaaaacagaggtcatcgaatgtgggaactactgtggagtacgcatcattcactctttgattgcagagttctcactggaagaattgaagaaaagctatcacctgaataaaagtcaaattatgttggatatgctaactgagaatttgttcttcgatactggtatgggaaaaagtaaatttttgcaagatatgcacacactcctactcacaagacaccgcgatgaacatgaaggtgaaacaggaaattggttttccccatttattgaagcattacataaagatgaaggaaatgaagcagttgaagctgtattgcttgaaagtatccatcggttcaacccaaatgcattcatttgccaagcgttggcaagacatttctacattaaaaagaaggactttggcaatgctctaaactgggcaaaacaagcaaaaatcatagaacctgacaattcttatatctcagatacactgggtcaagtctacaaaagtaaaataagatggtggatagaggaaaacggaggaaacgggaacatttcagttgatgatctaattgctcttttggatttagcagaacatgcctcaagtgcattcaaagaatctcaacagcaaagtgaagatagagagtatgaagtgaaggaaagattgtatccgaagtcaaaaaggcggtatgatacttacaatatagctggttatcaaggagagatagaagttgggctttacacaatccaaattctccagctcattcctttttttgataataaaaatgagctatctaaaagatatatggtcaattttgtatcaggaagtagtgatattccaggggatccaaacaatgaatataaattagccctcaaaaactatattccttatttaactaaattgaaattttctttgaaaaagtcctttgatttttttgatgaatactttgtcctgctaaaacccaggaacaatattaagcaaaatgaagaggccaaaactcggagaaaggtggctggatattttaagaaatatgtagatatattttgtctcttagaagaatcacaaaacaacacaggtcttggatcaaagttcagtgagccacttcaagtagagagatgcaggagaaacctagtagctttaaaagcagacaagttttctgggctcttggaatatcttatcaaaagtcaagaggatgctataagcactatgaaatgtatagtgaacgaatatacttttctcttagaacaatgcactgtcaaaatccagtcaaaagaaaagctaaatttcatcttggccaacattattctctcctgtatccaacctacctccagattagtaaagccagttgaaaaactaaaagatcagcttcgagaagtcttgcaaccaataggactgacttatcagttttcagaaccgtattttctagcttccctcttattctggccagaaaatcaacaactagatcaacattctgaacaaatgaaagagtatgctcaagcactaaaaaattctttcaaggggcaatataaacatatgcatcgtacaaagcaaccaattgcatatttctttcttggaaaaggtaaaagactggaaagacttgttcacaaaggaaaaattgaccagtgctttaagaagacaccagatattaattccttgtggcagagtggagatgtgtggaaggaggaaaaagtccaagaacttttgcttcgtttacaaggtcgagctgaaaacaattgtttatatatagaatatggaatcaatgaaaaaatcacaatacccatcactcccgcttttttaggtcaacttagaagtggcagaagcatagagaaggtgtctttttacctgggattttccattggaggcccacttgcttatgacattgaaattgtttaagagcctgatattcttcctccaagaatttgatctcagtacccatttaatttttttggactcaagatctatgctttaaaccggcaaggttatagatacagcctctagctcttcagatctgtacatgcagtatttaatttcctcttaaacatgttatgagttctacaaagacaatagtgaaaaaggaaggagtgagatatatgaaaagtagcaaatatgttccttggtttggttaacatcattgatgacaaaataataaggagctatgactggagtcaggagaagttagtgtaataagctggctacacagaaccccactacttaccaggcatggattgaagaagattgtctactcaaatggcatttagacattagaatgtctgggaaaatatttctcaaagacagcaaaaacctctcaaactgaggagcaacatttattcttactaagcagatcatcaatgtatcatgtgcttggcactcaaggatcttccaaaacagaggaccaaccagtcttctgaaggtcatgcccacagaagtcatcagaccttaccaaagtaggttggagaattagattgccttttcatgcagtgagattcagttaagcaaaaatgaaatttgtctctatagctaattagcttatcaactcccctccaaacaaacaattaaaaaaaaaacatacagacactcaaattccacaagctaatgaacaaaagggactcttgtgagaagactaatgagtccctcatccagaagatgccaatgtactggcagattaacatacaacctatgttttgaacaaaaacaaccagcgatacgtaatcaaaatgtaattttcccctaataaaattatggatatgggcagtcatcaatggctgccaaaaccattaagtggaaagctgattaaaaaacaaaaatttctaatggatttatcaaactgtcccaaatcctgataaatattaacatcacagaggaagaccagacattatgggcctggaagtactataggagtgcacacatcacccgtgacatggtcttgccaaataattaaacctgaatttgatcaggtctctggatcttatttgcaattcaaaagaaattttaaaaaaatcctactaacaccaccacaaatatgcaatcagcaatatccagaaaggggaaattcacaggacaaaaacctggttttcttttttggtttcttcaaccaaaaaagaaagaaattgcaaaggaccaaaaaaatgttggggaatctatacattataagggacttaacaactaaagggcaacatatagactttagatcctaatttgagcaaaatctaaaatcaattattaggcaatcagaaaaatttgaacacagactagatatttgaggatattaaggtactatattattgaagattccatggttatgttttttaaagagttcatgccttttagagatacatactaaagtatttgtaaataaatgacatgatctagaatcagtaattttgtgtttggggtgtgggggtggtgaaagggaagtagaaccgaaacaagattagtcctgagttaacaatggctgcaagctggatacatggaattcagcacacttttctccctcttactgattatgcttttgaaattttctcttgtaaaacatttagaaaacaaaaacaaaaaaaatgtgatttgtttctgtcttcaaaatctcattagaattttttcactggaggaagattttcccttgcttctgcataaaattttaactccataacttataagctcactctttattgttactttctaattgacaaataaaaattgtatattatt

SEQ ID NO: 30134 - DNA, 3957 bp, Homo sapiens
  source 1..3957: mol_type = unassigned DNA
agcatcgtaggaggaagaaaacaaacacatcagatattttcagcactaaaagagatggttttccccacatatatgtaaaagaaatttgcaagactactgggtatcagaatggcaaagcaacttaaccttccagaaaatacagatgattggacaaaagaggatgtaaatcagtggttagaaagtcataagattgaccaaaaacacagggaaattttgactgaacaagacgtgaatggagcagtcttgaagtggttaaaaaaagaacatcttgttgatatgggcatcacacatggaccagctattcaaatagaagaactattcaaagaattgcggaaaacagccattgaagattcgattcagacatctaagatgggaaagcccagtaaaaatgctcctaaagaccaaactgtgtctcaaaaggaacgtagagaaacttcaaagcaaaaacaaaagggtaaagagaacccagatatggctaatccgtctgcaatgagtacaactgctaaaggttctaagtcactaaaagttgagctcatagaagataaaatagattatacaaaggaaaggcaaccatccatagacctgacatgtgtatcatatccatttgatgaattcagtaatccatatcgttacaagttggattttagtctacagcctgaaacaggaccaggcaatctcattgatccgatacatgaattcaaagccttcacaaatacagcaacagccacagaagaggatgtcaagatgaaatttagcaatgaggttttccgatttgcttcagcttgtatgaattcacgtaccaatggcactattcattttggagtcaaagacaaaccccatgggaaaattgttggcatcaaagtcaccaatgataccaaggaagccctcattaaccatttcaatctgatgataaacaagtattttgaagaccatcaagtccaacaagcaaagaagtgcattcgagagccaagatttgtggaagttttactgccaaatagtactctatctgacagatttgttattgaagtggacattattccacagttctctgaatgccaatatgattatttccagattaaaatgcaaaattacaacaacaaaatatgggaacaaagtaaaaaattctcactatttgtgcgagatgggaccagctctaaggacattacgaaaaataaagttgatttcagagcatttaaagcagattttaaaacactggcagagtccagaaaagcagcagaagaaaaattcagagcaaaaacaaataaaaaagaaagagagggaccaaagttggttaaattattgacaggaaatcaagatttgttagataattcatactatgaacagtacattcttgtaacaaataaatgccacccagatcaaacaaaacacttagatttcctgaaggaaattaaatggtttgctgtattggagtttgatcctgagtctaacatcaatggagtggtcaaagcttacaaagaaagccgagtagcaaaccttcactttccaagtgtatatgtagaacagaaaaccacaccaaatgagacgatttctactctaaatctttaccatcaacccagctggattttctgcaatggcaggttagaccttgacagtgaaaaatataaaccctttgatccaagttcctggcaaagagaaagagcttctgatgtcaggaaactgatttcatttcttacacatgaagacataatgccaagagggaagtttttggtggtatttctattactgtcctctgtggatgacccaagagatcccctcattgagactttctgtgctttctaccaggatctcaaaggaatggaaaatatactgtgtatttgtgtgcacccacacatatttcagggatggaaagatctacttgaagcaagattaataaaacaccaagatgaaatttcaagccaatgtatttctgctttaagccttgaagagatcaatggcactattcttaaactaaaatctgtgactcaatcttcaaaaaggcttttgccatctattggtttatcgactgtccttctgaaaaaggaagaagatatcatgactgctctggaaattatctgtgaaaatgaatgtgagggtacactgttagagaaggacaaaaataaattccttgaattcaaggcatcaaaagaggaagacttctatcgaggtggcaaagtgtcatggtggaacttctacttctcttctgaaagttattcttcaccttttgtcaaaagggataaatatgaaagacttgaagcaatgattcaaaactgtgcagattcttctaaaccaacaagtaccaaaattattcatctgtatcatcatccaggctgtgggggaactaccttggctatgcacattctctgggaactaaggaagaaattcagatgtgctgtgctgaaaaacaagacagtggatttttctgaaattggagaacaggtaaccagtttaatcacctatggggcaatgaaccgtcaggaatacgtacctgtactactccttgttgatgattttgaagaacaagataatgtctatcttctgcagtactctattcaaacagctatagctaaaaagtacattcgatatgaaaaacctctggtgattatcctaaattgtatgagatcacaaaatcctgaaaaaagtgcaaggatcccagacagtattgccgtaatacagcaactctctcccaaagaacagagagcttttgagcttaaattgaaagaaatcaaagaacagcataaaaactttgaggatttttattcctttatgatcatgaaaaccaattttaataaagaatacatagaaaatgtggtccggaatatcctgaaagggcagaatattttcaccaaggaagcaaagctcttttcttttctggctcttcttaattcatatgtgcctgataccaccatttcactatcacagtgtgaaaaattcttaggaattggaaacaagaaggctttctgggggacagaaaaatttgaagacaagatgggcacctactctacaattctgataaaaacagaggtcatcgaatgtgggaactactgtggagtacgcatcattcactctttgattgcagagttctcactggaagaattgaagaaaagctatcacctgaataaaagtcaaattatgttggatatgctaactgagaatttgttcttcgatactggtatgggaaaaagtaaatttttgcaagatatgcacacactcctactcacaagacaccgcgatgaacatgaaggtgaaacaggaaattggttttccccatttattgaagcattacataaagatgaaggaaatgaagcagttgaagctgtattgcttgaaagtatccatcggttcaacccaaatgcattcatttgccaagcgttggcaagacatttctacattaaaaagaaggactttggcaatgctctaaactgggcaaaacaagcaaaaatcatagaacctgacaattcttatatctcagatacactgggtcaagtctacaaaagtaaaataagatggtggatagaggaaaacggaggaaacgggaacatttcagttgatgatctaattgctcttttggatttagcagaacatgcctcaagtgcattcaaagaatctcaacagcaaagtgaagatagagagtatgaagtgaaggaaagattgtatccgaagtcaaaaaggcggtatgatacttacaatatagctggttatcaaggagagatagaagttgggctttacacaatccaaattctccagctcattcctttttttgataataaaaatgagctatctaaaagatatatggtcaattttgtatcaggaagtagtgatattccaggggatccaaacaatgaatataaattagccctcaaaaactatattccttatttaactaaattgaaattttctttgaaaaagtcctttgatttttttgatgaatactttgtcctgctaaaacccaggaacaat

SEQ ID NO: 30135 - DNA, 7134 bp, Homo sapiens
  source 1..7134: mol_type = unassigned DNA
gaaagtcagagtactgggagaacagaagacttcacaatttaatgcctcagtttttaaaaaaggatccttacacttcatgtctcctagccatcagaagaggaatgagacagcaaaagttcaaatggcctgtttcaagtttctgatataaaacgatgacattttcaggaaaatcctgcatttccagagagagactggctggttaaatttctgaaagaggacaccagctaaaagaaggtattgcatctcacccgagcagactgtgtctgtggaaagtgtaagccccttgccagaagagcagcttcccagcaaaggcagagggtgaaaacagcaaaggtcttaagacactggggacctagagtcaaaagggacctcctccagggaaaacgctgtgtgagaaatggcctcattcggtgactgtgagtgacacagcagaaagttgggtcattccggctgcttttttgagaagtccctgaagagatcaataacagcaagagggaacctggcaaggaagctattcctataatccaggaaagagatgaggaaggcttggaccaggtggtagtggtgtcaggtagtcaaatgctgggtatattttgaagatacaccccataggatttgctccacattgaatgtggaatgctggaagagagataaagtgtacctgtcacatactttttgagttttatttattttcttagaagtaagtacacaaagagatgctacctaggagaagggtattcttttcactattctttcaaattttctgtatgttcaaacattttcatagtagaaagttggggggaaaatctgtttcataaacatttcctcagcagcagtccagtctattgcattttaattggttgtgatatcattgttttatgcaatacgttctcaacaagtatatcctccggcaaactgaacaaggaccaagtctgttctgcctacagctctgcttcctcatagctgctttccagaacgtgactcttgcaaattatcaagaaaggggaactaatctaagggatccagatcaaacagcctcatgaagacttattttatgtttctaatataaagatagaagttttcagaaaagccctgctacacagaggatcagagcaggggtgggcctgctgggctgcagctgggattctgagcatcctttcccggaggcacggaaagtgagtgagtgagcccagtgaggaagaagttgaagctttgatatgagtaaacaagtatctctacctgaaatgattaaagactggaccaaagagcatgtgaaaaaatgggtaaatgaagaccttaagattaatgagcaatacgggcaaattctgctcagtgaagaagtaacaggattagtcctgcaggaattaactgagaaggaccttgtagaaatggggctaccatggggtccagcacttttgataaaacgttcatacaacaaattgaatagtaagtcccctgaaagtgacaatcatgatccgggacaattagataattcaaaaccgtccaaaacagaacaccagaaaaatccaaaacacaccaaaaaggaagaagaaaattcaatgtcatctaatattgattatgatcccagagagatcagagatatcaaacaagaagaatcaattcttatgaaagaaaatgtgttagatgaagtagcaaatgctaaacacaagaaaaagggtaagctaaaacctgaacaattgacttgtatgccatatccttttgatcagttccatgacagccatcgctacatagaacattatactctacaacctgaaacaggagcactcaatctcattgatccaatacatgagttcaaagctctcacaaacacagaaacagccacggaagtggacattaagatgaaattcagcaatgaagtcttccgatttgcatcagcttgtatgaattcacgcaccaatggcaccatccattttggagtcaaggacaaaccccatggagaaattgttggtgtgaaaatcaccagtaaggctgccttcattgaccacttcaatgtaatgatcaaaaagtattttgaagaaagtgagatcaatgaagccaagaagtgtattcgggagccaaggtttgtggaagtccttctgcagaacaatacaccatctgacagatttgtcattgaagttgatactattccaaaacactctatatgtaatgataagtatttctacattcagatgcaaatttgtaaagataaaatatggaaacaaaaccaaaatctttcactgtttgtaagagaaggggctagctctagggatatcctggccaattccaagcaacgggatgtagatttcaaggcatttttacaaaatttaaagtcactggtagcatctagaaaagaggctgaagaagagtatggaatgaaggcaatgaagaaggagagtgaaggactaaagctggttaaacttctcataggaaaccgagactcactggataattcatactatgactggtacattcttgtaacaaataaatgccatccaaaccaaataaagcacttagattttttaaaagaaattaaatggtttgctgtgttggagtttgatcctgaatctatgatcaatggagtggtcaaagcttacaaagaaagtcgggtggcaaaccttcactttccaaatcaatatgaagacaagacaactaacatgtgggagaagatttctactcttaatctttaccaacagcccagctggattttctgcaacggcagatcagacctgaaaagcgagacatataaacctctagaaccacatttatggcagagagaaagagcttcagaagtcaggaaactaattttatttctcacagatgaaaatataatgacaagaggaaaatttttggtagtgtttctattactctcttcagtggaaagcccaggagatccactcattgaaactttctgggctttctatcaagctctcaaaggaatggaaaatatgttgtgtatctctgtaaactcacatatttatcaacgatggaaagatctactacaaacaagaatgaagatggaagatgaactaacaaaccacagtatttccactttaaatatagaactggtaaacagcactatccttaaactaaaatcggtgactcggtcatcaagaaggtttttgcccgcccgtggatcttcttcagttatcctagagaaaaagaaagaggatgtcttgactgcactggaaatcctctgtgaaaatgagtgtacagagacagacatcgagaaagacaaatctaaattcctggagtttaagaaatcaaaagaagaacacttttatcgaggtggcaaagtatcctggtggaacttctatttttcttctgaaaactattcttcagattttgttaaaagggacagttatgaaaagcttaaagatttaatacactgctgggcagagtctcctaaaccaatatttgcaaaaatcatcaatctttatcatcatccaggctgtggaggtaccacactggctatgcatgttctctgggacttaaagaaaaacttcagatgtgctgtgttaaaaaacaagacaactgattttgcagaaattgcagagcaagtgatcaatctggtcacctatagggcaaagagccatcaggattacattcctgtgcttctccttgtggatgattttgaagaacaagaaaatgtctactttctacaaaatgccatccattccgttttagcagaaaaggatttgcgatatgaaaaaacattggtaattatcttaaactgcatgagatcccggaatccagatgaaagtgcaaaattggcagacagtattgcactaaattaccaactttcttccaaggaacaaagagcttttggtgccaaactgaaggaaattgaaaagcagcacaagaactgtgaaaacttttattccttcatgatcatgaaaagcaattttgatgaaacatatatagaaaatgtagtcaggaatatcctaaaaggacaggatgttgacagcaaggaagcacaactcatttccttcctggctttactcagctcttatgttactgactctacaatttcagtttcacagtgtgaaatatttttgggaatcatatacactagtacaccctgggaacctgaaagcttagaagacaagatgggaacttattctacacttctaataaaaacagaagttgcagaatatgggagatacacaggtgtgcgtatcattcaccctctgattgccctgtactgtctaaaagaactggaaagaagctatcacttggataaatgtcaaattgcattgaatatattagaagagaatttattctatgattctggaataggaagagacaaatttcaacatgatgttcaaactcttctgcttacaagacagcgcaaggtgtatggagatgaaacagacactctgttttccccattaatggaagctttacagaataaagacattgaaaaggtcttgagtgcaggaagtagacgattcccacaaaatgcattcatttgtcaagccttagcaagacatttctacattaaagagaaggactttaacacagctctggactgggcacgtcaggccaaaatgaaagcacctaaaaattcctatatttcagatacactaggtcaagtctacaaaagtgaaatcaaatggtggttggatgggaacaaaaactgtaggagcattactgttaatgacctaacacatctcctagaagctgcggaaaaagcctcaagagctttcaaagaatcccaaaggcaaactgatagtaaaaactatgaaaccgagaactggtcaccacagaagtcccagagacgatatgacatgtataacacagcttgtttcttgggtgaaatagaagttggtctttacactatccagattcttcagctcactccctttttccacaaagaaaatgaattatccaaaaaacatatggtgcaatttttatcaggaaagtggaccattcctcctgatcccagaaatgaatgttatttggctcttagcaagttcacatcccacctaaaaaatttacaatcagatctgaaaaggtgctttgacttttttattgattatatggttcttctgaaaatgaggtatacccaaaaagaaattgcagaaatcatgttaagcaagaaagtcagtcgttgtttcaggaaatacacagaacttttctgtcatttggatccatgtctattacaaagtaaagagagtcaattactccaggaggagaattgcaggaaaaagctagaagctctgagagcagataggtttgctggactcttggaatatcttaatccaaactacaaagatgctaccaccatggaaagtatagtgaatgaatatgccttcctactgcagcaaaactcaaaaaagcccatgacaaatgagaaacaaaattccattttggccaacattattctgagttgtctaaagcccaactccaagttaattcaaccacttaccacgctaaaaaaacaactccgagaggtcttgcaatttgtaggactaagtcatcaatatccaggtccttatttcttggcctgcctcctgttctggccagaaaatcaagagctagatcaagattccaaactaatagaaaagtatgtttcatccttaaatagatccttcaggggacagtacaagcgcatgtgcaggtccaagcaggcaagcacacttttctatctgggcaaaaggaagggtctaaacagtattgttcacaaggccaaaatagagcagtactttgataaagcacaaaatacaaattccctctggcacagtggggatgtgtggaaaaaaaatgaagtcaaagacctcctgcgtcgtctaactggtcaggctgaaggcaagctaatctctgtagaatatggaacagaggaaaaaataaaaataccagtaatatctgtttattcaggtccactcagaagtggtaggaacatagaaagagtgtctttctacctaggattttccattgaaggccctctggcatatgatatagaagtaatttaagacaatacatcacctgtagttcaaatacgtttatttatatctttatgattttattctctctctctattctcatggcactttcataacattatggctaacctctaattacagattttgcttttgcctccctgaatgaattacaagcctttttaagatatgaaatatgcctacccgcagagcttggcacaaagtggagtcaatcttttaatgttttaaatatgcattttcagactcaaataattaagaagtttcattgatatccactggtcacatcataactgtctatagggcaataaaatctgtgttaaactcaattgcttttataagttttctaaattatttcttcactgtgacagcaaagatttaaataagatgaatgtaaaagagaaagcttattggactcaaacccacagatccacaccagagttctatttacctcatcttggtatcaataaaaacttatgtggaaggtaaatatattgttccccatccaccacataacactctccccaacacacacacacacacacacacacacacacacacacacacacactccttgtaccccttgcccttctcccagctcattgctccaggagagagaagagttcaaaaaataaagtaatcataaacttgaactctctccattctcttgttcccatttacaggtgaatctcttcctttaagccatttttgtctcctgtgaatacagccttatctccacctgtttcttagatcccatctcccctggcttattttttccattcattaccctctttgttccctttacttctcaacctgtgctatatacatgctgttctctctgttgagattgccttatttccatctaacattctctctcctgctattctgatttgtcattcacaactgatttcaagagtcaccttcaccaggaagtcttccttgaccaccatcattcctgcctgattagagggcttcctcatggtaatatgtgttctcaagttttcagtgtcaaggaatgccatcccagaagctcattctcagatgcacaacagccagaacagtctcaagcagcattctagagcttggaatttaagaactacgcattgcctataaagtgaaacataggctaatatagattaaattgaatattgaataaaaaatatatttatttatccac

SEQ ID NO: 30136 - DNA, 1221 bp, Homo sapiens
  source 1..1221: mol_type = unassigned DNA
atgagtaaacaagtatctctacctgaaatgattaaagactggaccaaagagcatgtgaaaaaatgggtaaatgaagaccttaagattaatgagcaatacgggcaaattctgctcagtgaagaagtaacaggattagtcctgcaggaattaactgagaaggaccttgtagaaatggggctaccatggggtccagcacttttgataaaacgttcatacaacaaattgaatagtaagtcccctgaaagtgacaatcatgatccgggacaattagataattcaaaaccgtccaaaacagaacaccagaaaaatccaaaacacaccaaaaaggaagaagaaaattcaatgtcatctaatattgattatgatcccagagagatcagagatatcaaacaagaagaatcaattcttatgaaagaaaatgtgttagatgaagtagcaaatgctaaacacaagaaaaagctagaagctctgagagcagataggtttgctggactcttggaatatcttaatccaaactacaaagatgctaccaccatggaaagtatagtgaatgaatatgccttcctactgcagcaaaactcaaaaaagcccatgacaaatgagaaacaaaattccattttggccaacattattctgagttgtctaaagcccaactccaagttaattcaaccacttaccacgctaaaaaaacaactccgagaggtcttgcaatttgtaggactaagtcatcaatatccaggtccttatttcttggcctgcctcctgttctggccagaaaatcaagagctagatcaagattccaaactaatagaaaagtatgtttcatccttaaatagatccttcaggggacagtacaagcgcatgtgcaggtccaagcaggcaagcacacttttctatctgggcaaaaggaagggtctaaacagtattgttcacaaggccaaaatagagcagtactttgataaagcacaaaatacaaattccctctggcacagtggggatgtgtggaaaaaaaatgaagtcaaagacctcctgcgtcgtctaactggtcaggctgaaggcaagctaatctctgtagaatatggaacagaggaaaaaataaaaataccagtaatatctgtttattcaggtccactcagaagtggtaggaacatagaaagagtgtctttctacctaggattttccattgaaggccctctggcatatgatatagaagtaatttaa

SEQ ID NO: 30137 - DNA, 5831 bp, Homo sapiens
  source 1..5831: mol_type = unassigned DNA
tgggagaacagaagacttcacaatttaatgcctcagtttttaaaaaaggatccttacacttcatgtctcctagccatcagaagaggaatgagacagcaaaagttcaaatggcctgtttcaagtttctgatataaaacgatgacattttcaggaaaatcctgcatttccagagagagactggctggttaaatttctgaaagaggacaccagctaaaagaagggtcattccggctgcttttttgagaagtccctgaagagatcaataacagcaagagggaacctggcaaggaagctattcctataatccaggaaagagatgaggaaggcttggaccaggtggtagtggtgtcagctctgcttcctcatagctgctttccagaacgtgactcttgcaaattatcaagaaaggggaactaatctaagggatccagatcaaacagcctcatgaagacttattttatgtttctaatataaagatagaagttttcagaaaagccctgctacacagaggatcagagcaggggtgggcctgctgggctgcagctgggattctgagcatcctttcccggaggcacggaaagtgagtgagtgagcccagtgaggaagaagttgaagctttgatatgagtaaacaagtatctctacctgaaatgattaaagactggaccaaagagcatgtgaaaaaatgggtaaatgaagaccttaagattaatgagcaatacgggcaaattctgctcagtgaagaagtaacaggattagtcctgcaggaattaactgagaaggaccttgtagaaatggggctaccatggggtccagcacttttgataaaacgttcatacaacaaattgaatagtaagtcccctgaaagtgacaatcatgatccgggacaattagataattcaaaaccgtccaaaacagaacaccagaaaaatccaaaacacaccaaaaaggaagaagaaaattcaatgtcatctaatattgattatgatcccagagagatcagagatatcaaacaagaagaatcaattcttatgaaagaaaatgtgttagatgaagtagcaaatgctaaacacaagaaaaagggtaagctaaaacctgaacaattgacttgtatgccatatccttttgatcagttccatgacagccatcgctacatagaacattatactctacaacctgaaacaggagcactcaatctcattgatccaatacatgagttcaaagctctcacaaacacagaaacagccacggaagtggacattaagatgaaattcagcaatgaagtcttccgatttgcatcagcttgtatgaattcacgcaccaatggcaccatccattttggagtcaaggacaaaccccatggagaaattgttggtgtgaaaatcaccagtaaggctgccttcattgaccacttcaatgtaatgatcaaaaagtattttgaagaaagtgagatcaatgaagccaagaagtgtattcgggagccaaggtttgtggaagtccttctgcagaacaatacaccatctgacagatttgtcattgaagttgatactattccaaaacactctatatgtaatgataagtatttctacattcagatgcaaatttgtaaagataaaatatggaaacaaaaccaaaatctttcactgtttgtaagagaaggggctagctctagggatatcctggccaattccaagcaacgggatgtagatttcaaggcatttttacaaaatttaaagtcactggtagcatctagaaaagaggctgaagaagagtatggaatgaaggcaatgaagaaggagagtgaaggactaaagctggttaaacttctcataggaaaccgagactcactggataattcatactatgactggtacattcttgtaacaaataaatgccatccaaaccaaataaagcacttagattttttaaaagaaattaaatggtttgctgtgttggagtttgatcctgaatctatgatcaatggagtggtcaaagcttacaaagaaagtcgggtggcaaaccttcactttccaaatcaatatgaagacaagacaactaacatgtgggagaagatttctactcttaatctttaccaacagcccagctggattttctgcaacggcagatcagacctgaaaagcgagacatataaacctctagaaccacatttatggcagagagaaagagcttcagaagtcaggaaactaattttatttctcacagatgaaaatataatgacaagaggaaaatttttggtagtgtttctattactctcttcagtggaaagcccaggagatccactcattgaaactttctgggctttctatcaagctctcaaaggaatggaaaatatgttgtgtatctctgtaaactcacatatttatcaacgatggaaagatctactacaaacaagaatgaagatggaagatgaactaacaaaccacagtatttccactttaaatatagaactggtaaacagcactatccttaaactaaaatcggtgactcggtcatcaagaaggtttttgcccgcccgtggatcttcttcagttatcctagagaaaaagaaagaggatgtcttgactgcactggaaatcctctgtgaaaatgagtgtacagagacagacatcgagaaagacaaatctaaattcctggagtttaagaaatcaaaagaagaacacttttatcgaggtggcaaagtatcctggtggaacttctatttttcttctgaaaactattcttcagattttgttaaaagggacagttatgaaaagcttaaagatttaatacactgctgggcagagtctcctaaaccaatatttgcaaaaatcatcaatctttatcatcatccaggctgtggaggtaccacactggctatgcatgttctctgggacttaaagaaaaacttcagatgtgctgtgttaaaaaacaagacaactgattttgcagaaattgcagagcaagtgatcaatctggtcacctatagggcaaagagccatcaggattacattcctgtgcttctccttgtggatgattttgaagaacaagaaaatgtctactttctacaaaatgccatccattccgttttagcagaaaaggatttgcgatatgaaaaaacattggtaattatcttaaactgcatgagatcccggaatccagatgaaagtgcaaaattggcagacagtattgcactaaattaccaactttcttccaaggaacaaagagcttttggtgccaaactgaaggaaattgaaaagcagcacaagaactgtgaaaacttttattccttcatgatcatgaaaagcaattttgatgaaacatatatagaaaatgtagtcaggaatatcctaaaaggacaggatgttgacagcaaggaagcacaactcatttccttcctggctttactcagctcttatgttactgactctacaatttcagtttcacagtgtgaaatatttttgggaatcatatacactagtacaccctgggaacctgaaagcttagaagacaagatgggaacttattctacacttctaataaaaacagaagttgcagaatatgggagatacacaggtgtgcgtatcattcaccctctgattgccctgtactgtctaaaagaactggaaagaagctatcacttggataaatgtcaaattgcattgaatatattagaagagaatttattctatgattctggaataggaagagacaaatttcaacatgatgttcaaactcttctgcttacaagacagcgcaaggtgtatggagatgaaacagacactctgttttccccattaatggaagctttacagaataaagacattgaaaaggtcttgagtgcaggaagtagacgattcccacaaaatgcattcatttgtcaagccttagcaagacatttctacattaaagagaaggactttaacacagctctggactgggcacgtcaggccaaaatgaaagcacctaaaaattcctatatttcagatacactaggtcaagtctacaaaagtgaaatcaaatggtggttggatgggaacaaaaactgtaggagcattactgttaatgacctaacacatctcctagaagctgcggaaaaagcctcaagagctttcaaagaatcccaaaggcaaactgatagtaaaaactatgaaaccgagaactggtcaccacagaagtcccagagacgatatgacatgtataacacagcttgtttcttgggtgaaatagaagttggtctttacactatccagattcttcagctcactccctttttccacaaagaaaatgaattatccaaaaaacatatggtgcaatttttatcaggaaagtggaccattcctcctgatcccagaaatgaatgttatttggctcttagcaagttcacatcccacctaaaaaatttacaatcagatctgaaaaggtgctttgacttttttattgattatatggttcttctgaaaatgaggtatacccaaaaagaaattgcagaaatcatgttaagcaagaaagtcagtcgttgtttcaggaaatacacagaacttttctgtcatttggatccatgtctattacaaagtaaagagagtcaattactccaggaggagaattgcaggaaaaagctagaagctctgagagcagataggtttgctggactcttggaatatcttaatccaaactacaaagatgctaccaccatggaaagtatagtgaatgaatatgccttcctactgcagcaaaactcaaaaaagcccatgacaaatgagaaacaaaattccattttggccaacattattctgagttgtctaaagcccaactccaagttaattcaaccacttaccacgctaaaaaaacaactccgagaggtcttgcaatttgtaggactaagtcatcaatatccaggtccttatttcttggcctgcctcctgttctggccagaaaatcaagagctagatcaagattccaaactaatagaaaagtatgtttcatccttaaatagatccttcaggggacagtacaagcgcatgtgcaggtccaagcaggcaagcacacttttctatctgggcaaaaggaagggtctaaacagtattgttcacaaggccaaaatagagcagtactttgataaagcacaaaatacaaattccctctggcacagtggggatgtgtggaaaaaaaatgaagtcaaagacctcctgcgtcgtctaactggtcaggctgaaggcaagctaatctctgtagaatatggaacagaggaaaaaataaaaataccagtaatatctgtttattcaggtccactcagaagtggtaggaacatagaaagagtgtctttctacctaggattttccattgaaggccctctggcatatgatatagaagtaatttaagacaatacatcacctgtagttcaaatacgtttatttatatctttatgattttattctctctctctattctcatggcactttcataacattatggctaacctctaattacagattttgcttttgcctccctgaatgaattacaagcctttttaagatatgaaatatgcctacccgcagagcttggcacaaagtggagtcaatcttttaatgttttaaatatgcattttcagactcaaataattaagaagtttcattgatatccactggtcacatcataactgtctatagggcaataaaatctgtgttaaactcaattgcttttataagttttctaaattatttcttcactgtgacagcaaagatttaaataagatgaatgtaaaagagaaagcttattggactcaaacccacagatccacaccagagttctatttacctcatcttggtatcaata

SEQ ID NO: 30138 - DNA, 381 bp, Homo sapiens
  source 1..381: mol_type = unassigned DNA
agaagacttcacaatttaatgcctcagtttttaaaaaaggatccttacacttcatgtctcctagccatcagaagaggaatgagacagcaaaagttcaaatggcctgtttcaagtttctgatataaaacgatgacattttcaggaaaatcctggaagaagttgaagctttgatatgagtaaacaagtatctctacctgaaatgattaaagactggaccaaagagcatgtgaaaaaatgggtaaatgaagaccttaagattaatgagcaatacgggcaaattctgctcagtgaagaagtaacaggattagtcctgcaggaattaactgagaaggaccttgtagaaatggggctaccatggggtccagcacttttgataaaacg

SEQ ID NO: 30139 - DNA, 5757 bp, Homo sapiens
  source 1..5757: mol_type = unassigned DNA
agaagacttcacaatttaatgcctcagtttttaaaaaaggatccttacacttcatgtctcctagccatcagaagaggaatgagacagcaaaagttcaaatggcctgtttcaagtttctgatataaaacgatgacattttcaggaaaatcctgcatttccagagagagactggctggttaaatttctgaaagaggacaccagctaaaagaaggtattgcatctcacccgagcagactgtgtctgtggaaagtgtaagccccttgccagaagagcagcttcccagcaaaggcagagggtgaaaacagcaaaggtcttaagacactggggacctagagtcaaaagggacctcctccagggaaaacgctgtgtgagaaatggcctcattcggtgactgtgagtgacacagcagaaagttgggtcattccggctgcttttttgagaagtccctgaagagatcaataacagcaagagggaacctggcaaggaagctattcctataatccaggaaagagatgaggaaggcttggaccaggtggtagtggtgtcagctctgcttcctcatagctgctttccagaacgtgactcttgcaaattatcaagaaaggggaactaatctaagggatccagatcaaacagcctcatgaagacttattttatgtttctaatataaagatagaagttttcagaaaagccctgctacacagaggatcagagcaggggtgggcctgctgggctgcagctgggattctgagcatcctttcccggaggcacggaaagtgagtgagtgagcccagtgaggaagaagttgaagctttgatatgagtaaacaagtatctctacctgaaatgattaaagactggaccaaagagcatgtgaaaaaatgggtaaatgaagaccttaagattaatgagcaatacgggcaaattctgctcagtgaagaagtaacaggattagtcctgcaggaattaactgagaaggaccttgtagaaatggggctaccatggggtccagcacttttgataaaacgttcatacaacaaattgaatagtaagtcccctgaaagtgacaatcatgatccgggacaattagataattcaaaaccgtccaaaacagaacaccagaaaaatccaaaacacaccaaaaaggaagaagaaaattcaatgtcatctaatattgattatgatcccagagagatcagagatatcaaacaagaagaatcaattcttatgaaagaaaatgtgttagatgaagtagcaaatgctaaacacaagaaaaagggtaagctaaaacctgaacaattgacttgtatgccatatccttttgatcagttccatgacagccatcgctacatagaacattatactctacaacctgaaacaggagcactcaatctcattgatccaatacatgagttcaaagctctcacaaacacagaaacagccacggaagtggacattaagatgaaattcagcaatgaagtcttccgatttgcatcagcttgtatgaattcacgcaccaatggcaccatccattttggagtcaaggacaaaccccatggagaaattgttggtgtgaaaatcaccagtaaggctgccttcattgaccacttcaatgtaatgatcaaaaagtattttgaagaaagtgagatcaatgaagccaagaagtgtattcgggagccaaggtttgtggaagtccttctgcagaacaatacaccatctgacagatttgtcattgaagttgatactattccaaaacactctatatgtaatgataagtatttctacattcagatgcaaatttgtaaagataaaatatggaaacaaaaccaaaatctttcactgtttgtaagagaaggggctagctctagggatatcctggccaattccaagcaacgggatgtagatttcaaggcatttttacaaaatttaaagtcactggtagcatctagaaaagaggctgaagaagagtatggaatgaaggcaatgaagaaggagagtgaaggactaaagctggttaaacttctcataggaaaccgagactcactggataattcatactatgactggtacattcttgtaacaaataaatgccatccaaaccaaataaagcacttagattttttaaaagaaattaaatggtttgctgtgttggagtttgatcctgaatctatgatcaatggagtggtcaaagcttacaaagaaagtcgggtggcaaaccttcactttccaaatcaatatgaagacaagacaactaacatgtgggagaagatttctactcttaatctttaccaacagcccagctggattttctgcaacggcagatcagacctgaaaagcgagacatataaacctctagaaccacatttatggcagagagaaagagcttcagaagtcaggaaactaattttatttctcacagatgaaaatataatgacaagaggaaaatttttggtagtgtttctattactctcttcagtggaaagcccaggagatccactcattgaaactttctgggctttctatcaagctctcaaaggaatggaaaatatgttgtgtatctctgtaaactcacatatttatcaacgatggaaagatctactacaaacaagaatgaagatggaagatgaactaacaaaccacagtatttccactttaaatatagaactggtaaacagcactatccttaaactaaaatcggtgactcggtcatcaagaaggtttttgcccgcccgtggatcttcttcagttatcctagagaaaaagaaagaggatgtcttgactgcactggaaatcctctgtgaaaatgagtgtacagagacagacatcgagaaagacaaatctaaattcctggagtttaagaaatcaaaagaagaacacttttatcgaggtggcaaagtatcctggtggaacttctatttttcttctgaaaactattcttcagattttgttaaaagggacagttatgaaaagcttaaagatttaatacactgctgggcagagtctcctaaaccaatatttgcaaaaatcatcaatctttatcatcatccaggctgtggaggtaccacactggctatgcatgttctctgggacttaaagaaaaacttcagatgtgctgtgttaaaaaacaagacaactgattttgcagaaattgcagagcaagtgatcaatctggtcacctatagggcaaagagccatcaggattacattcctgtgcttctccttgtggatgattttgaagaacaagaaaatgtctactttctacaaaatgccatccattccgttttagcagaaaaggatttgcgatatgaaaaaacattggtaattatcttaaactgcatgagatcccggaatccagatgaaagtgcaaaattggcagacagtattgcactaaattaccaactttcttccaaggaacaaagagcttttggtgccaaactgaaggaaattgaaaagcagcacaagaactgtgaaaacttttattccttcatgatcatgaaaagcaattttgatgaaacatatatagaaaatgtagtcaggaatatcctaaaaggacaggatgttgacagcaaggaagcacaactcatttccttcctggctttactcagctcttatgttactgactctacaatttcagtttcacagtgtgaaatatttttgggaatcatatacactagtacaccctgggaacctgaaagcttagaagacaagatgggaacttattctacacttctaataaaaacagaagttgcagaatatgggagatacacaggtgtgcgtatcattcaccctctgattgccctgtactgtctaaaagaactggaaagaagctatcacttggataaatgtcaaattgcattgaatatattagaagagaatttattctatgattctggaataggaagagacaaatttcaacatgatgttcaaactcttctgcttacaagacagcgcaaggtgtatggagatgaaacagacactctgttttccccattaatggaagctttacagaataaagacattgaaaaggtcttgagtgcaggaagtagacgattcccacaaaatgcattcatttgtcaagccttagcaagacatttctacattaaagagaaggactttaacacagctctggactgggcacgtcaggccaaaatgaaagcacctaaaaattcctatatttcagatacactaggtcaagtctacaaaagtgaaatcaaatggtggttggatgggaacaaaaactgtaggagcattactgttaatgacctaacacatctcctagaagctgcggaaaaagcctcaagagctttcaaagaatcccaaaggcaaactgatagtaaaaactatgaaaccgagaactggtcaccacagaagtcccagagacgatatgacatgtataacacagcttgtttcttgggtgaaatagaagttggtctttacactatccagattcttcagctcactccctttttccacaaagaaaatgaattatccaaaaaacatatggtgcaatttttatcaggaaagtggaccattcctcctgatcccagaaatgaatgttatttggctcttagcaagttcacatcccacctaaaaaatttacaatcagatctgaaaaggtgctttgacttttttattgattatatggttcttctgaaaatgaggtatacccaaaaagaaattgcagaaatcatgttaagcaagaaagtcagtcgttgtttcaggaaatacacagaacttttctgtcatttggatccatgtctattacaaagtaaagagagtcaattactccaggaggagaattgcaggaaaaagctagaagctctgagagcagataggtttgctggactcttggaatatcttaatccaaactacaaagatgctaccaccatggaaagtatagtgaatgaatatgccttcctactgcagcaaaactcaaaaaagcccatgacaaatgagaaacaaaattccattttggccaacattattctgagttgtctaaagcccaactccaagttaattcaaccacttaccacgctaaaaaaacaactccgagaggtcttgcaatttgtaggactaagtcatcaatatccaggtccttatttcttggcctgcctcctgttctggccagaaaatcaagagctagatcaagattccaaactaatagaaaagtatgtttcatccttaaatagatccttcaggggacagtacaagcgcatgtgcaggtccaagcaggcaagcacacttttctatctgggcaaaaggaagggtctaaacagtattgttcacaaggccaaaatagagcagtactttgataaagcacaaaatacaaattccctctggcacagtggggatgtgtggaaaaaaaatgaagtcaaagacctcctgcgtcgtctaactggtcaggctgaaggcaagctaatctctgtagaatatggaacagaggaaaaaataaaaataccagtaatatctgtttattcaggtccactcagaagtggtaggaacatagaaagagtgtctttctacctaggattttccattgaaggccctctggcatatgatatagaagtaatttaagacaatacatcacctgtagttcaaatacgtttatttatatctttatgattttattctctctctctattctcatggcactttcataacattatggctaacctctaattacagattttgcttttgcctccctgaatgaattacaagcctttttaagatatgaaatatgcctacccgcagagcttgg

SEQ ID NO: 30140 - DNA, 631 bp, Homo sapiens
  source 1..631: mol_type = unassigned DNA
agaagacttcacaatttaatgcctcagtttttaaaaaaggatccttacacttcatgtctcctagccatcagaagaggaatgagacagcaaaagttcaaatggcctgtttcaagtttctgatataaaacgatgacattttcaggaaaatcctgctctgcttcctcatagctgctttccagaacgtgactcttgcaaattatcaagaaaggggaactaatctaagggatccagatcaaacagcctcatgaagacttattttatgtttctaatataaagatagaagttttcagaaaagccctgctacacagaggatcagagcaggggtgggcctgctgggctgcagctgggattctgagcatcctttcccggaggcacggaaagtgagtgagtgagcccagtgaggaagaagttgaagctttgatatgagtaaacaagtatctctacctgaaatgattaaagactggaccaaagagcatgtgaaaaaatgggtaaatgaagaccttaagattaatgagcaatacgggcaaattctgctcagtgaagaagtaacaggattagtcctgcaggaattaactgagaaggaccttgtagaaatggggctaccatggggtccagcacttttgataaaacg

SEQ ID NO: 30141 - DNA, 1198 bp, Homo sapiens
  source 1..1198: mol_type = unassigned DNA
agaagacttcacaatttaatgcctcagtttttaaaaaaggatccttacacttcatgtctcctagccatcagaagaggaatgagacagcaaaagttcaaatggcctgtttcaagtttctgatataaaacgatgacattttcaggaaaatcctgcatttccagagagagactggctggttaaatttctgaaagaggacaccagctaaaagaagggtcattccggctgcttttttgagaagtccctgaagagatcaataacagcaagagggaacctggcaaggaagctattcctataatccaggaaagagatgaggaaggcttggaccaggtggtagtggtgtcaggtagtcaaatgctgggtatattttgaagatacaccccataggatttgctccacattgaatgtggaatgctggaagagagataaagtgtacctgtcacatactttttgagttttatttattttcttagaagtaagtacacaaagagatgctacctaggagaagggtattcttttcactattctttcaaattttctgtatgttcaaacattttcatagtagaaagttggggggaaaatctgtttcataaacatttcctcagcagcagtccagtctattgcattttaattggttgtgatatcattgttttatgcaatacgttctcaacaagtatatcctccggcaaactgaacaaggaccaagtctgttctgcctacagctctgcttcctcatagctgctttccagaacgtgactcttgcaaattatcaagaaaggggaactaatctaagggatccagatcaaacagcctcatgaagacttattttatgtttctaatataaagatagaagttttcagaaaagccctgctacacagaggatcagagcaggggtgggcctgctgggctgcagctgggattctgagcatcctttcccggaggcacggaaagtgagtgagtgagcccagtgaggaagaagttgaagctttgatatgagtaaacaagtatctctacctgaaatgattaaagactggaccaaagagcatgtgaaaaaatgggtaaatgaagaccttaagattaatgagcaatacgggcaaattctgctcagtgaagaagtaacaggattagtcctgcaggaattaactgagaaggaccttgtagaaatggggctaccatggggtccagcacttttgataaaacg

SEQ ID NO: 30142 - DNA, 763 bp, Homo sapiens
  source 1..763: mol_type = unassigned DNA
agaagacttcacaatttaatgcctcagtttttaaaaaaggatccttacacttcatgtctcctagccatcagaagaggaatgagacagcaaaagttcaaatggcctgtttcaagtttctgatataaaacgatgacattttcaggaaaatcctgggtcattccggctgcttttttgagaagtccctgaagagatcaataacagcaagagggaacctggcaaggaagctattcctataatccaggaaagagatgaggaaggcttggaccaggtggtagtggtgtcagctctgcttcctcatagctgctttccagaacgtgactcttgcaaattatcaagaaaggggaactaatctaagggatccagatcaaacagcctcatgaagacttattttatgtttctaatataaagatagaagttttcagaaaagccctgctacacagaggatcagagcaggggtgggcctgctgggctgcagctgggattctgagcatcctttcccggaggcacggaaagtgagtgagtgagcccagtgaggaagaagttgaagctttgatatgagtaaacaagtatctctacctgaaatgattaaagactggaccaaagagcatgtgaaaaaatgggtaaatgaagaccttaagattaatgagcaatacgggcaaattctgctcagtgaagaagtaacaggattagtcctgcaggaattaactgagaaggaccttgtagaaatggggctaccatggggtccagcacttttgataaaacg

SEQ ID NO: 30143 - DNA, 4190 bp, Homo sapiens
  source 1..4190: mol_type = unassigned DNA
atgcccagattagggactgcgagcgaccacccagcgccagcgcgaccaggaccaaggacctccgcggctgagcggcgagtccgggaggggctctgcgcgtccccgccccgcgccgcgtcaccgacgtcccgctaggctgagaccggtgcgccgcgcgctagtggccgctcttccgcgggctagcgggcggtgggggcgccagcagcgcggaaggcgggcacgcgggccatggctccctgggcggaggccgagcactcggcgctgaacccgctgcgcgcggtgtggctcacgctgaccgccgccttcctgctgaccctactgctgcagctcctgccgcccggcctgctcccgggctgcgcgatcttccaggacctgatccgctatgggaaaaccaagtgtggggagccgtcgcgccccgccgcctgccgagcctttgatgtccccaagagatatttttcccacttttatatcatctcagtgctgtggaatggcttcctgctttggtgccttactcaatctctgttcctgggagcaccttttccaagctggcttcatggtttgctcagaattctcggggcggcacagttccagggaggggagctggcactgtctgcattcttagtgctagtatttctgtggctgcacagcttacgaagactcttcgagtgcctctacgtcagtgtcttctccaatgtcatgattcacgtcgtgcagtactgttttggacttgtctattatgtccttgttggcctaactgtgctgagccaagtgccaatggatggcaggaatgcctacataacagggaaaaatctattgatgcaagcacggtggttccatattcttgggatgatgatgttcatctggtcatctgcccatcagtataagtgccatgttattctcggcaatctcaggaaaaataaagcaggagtggtcattcactgtaaccacaggatcccatttggagactggtttgaatatgtttcttcccctaactacttagcagagctgatgatctacgtttccatggccgtcacctttgggttccacaacttaacttggtggctagtggtgacaaatgtcttctttaatcaggccctgtctgcctttctcagccaccaattctacaaaagcaaatttgtctcttacccgaagcataggaaagctttcctaccatttttgttttaagttaacctcagtcatgaagaatgcaaaccaggtgatggtttcaatgcctaaggacagtgaagtctggagcccaaagtacagtttcagcaaagctgtttgaaactctccattccatttctataccccacaagttttcactgaatgagcatggcagtgccactcaagaaaatgaatctccaaagtatcttcaaagaataaatactaatggcagatctgcgatttctgggtccactttctgagatgctttctaaaaccaaccaactgataaaaagtagatgagacttctccaagctgcttcacaagcaaactaaccgaaaaaccgaaaatatacaaacagcttcacacacacacacacacacacacacacacacacacacacacaaaggaagatcatcaatggctgcggtagcctagtaggaatggactatataataatatagcaggtgctcaataactgtttgttgcatttcagtaaaagcagaataacctttcaaaataataacaggctgggtgcaatggctcacacctgttaatcccagcacttcgggaggccaaggtgggcagttcgcttgggcccaagagttcgagaccagcctgggcaacatggtgaaaccctatctccgtgaaaaaatatgaaaattagccaagagtggtggcacatgcctgtagtcccagatacttgggagtgggctgagatgggagaatcgcttgagcccaggaggtcaagggtacagtgagccgaggtcatgccactgcactccagcctggcctgggcaacagagcaagaccctgtctcaaaataataataatatataattttacaccaaaagtttcaggaaaaaacgagtttgttggagttagtttatactttcacatatcaccacaaagatctccagttaaataactatcaatatccatttccattcatctccccctcaaatcatagcctaacagaacactttgaaagctcttttatttaatatttttttacatcctttgaagggagtgcttcaaaaatgaaagcatcagaagataaaatatttttatatttatgcatagcaagccttcgtgaacggaagtgacacactctggattgaataatactgtagcctcattcatatgtagttattcaaattggattaatgtctgtgtgagtttatttgaactagcagaaagtatctgaagatattcaggaataaagtttatacttaaaatagcttatgttaaagaaaatacctgtgattaattcagagggaaataaatgcatggtataaaagaaaaccaaaaacttaaaaaataatactatagcctgagcaacacattaaaactgcacacttgtgcagcgtaagattctctggcttattggctgaggtgttaagtttattccttttatgaagatgtcctattacagtcagctaagcactaaagctttgcatttatatgtactttgctatgggggaaagaaccttatgattaataagacacatatcaaatgcatagtcaatcattcccacccccatccctggagctgtaacccaaaactgttaaactaagattcctttgttttttttgtttttttgagatggagtctcactctgtcgcccagactggagtgcagtggtgggatcctggctcactgcaacctccgccttctgggttccagcgattctcctctgcctcagcctcccaagtagctgggattacaggcacatgccaccatgcccaggtaattgttgtatttttagtagagatagagtttcaccatgttggccaggctggtctcaaactcctgacctcaggtgatccacctgcttcggcctcccaaagtgctgggattacaggtgtaagtcactgctcccggatgcatgtcaagcacattggaaagttcttacaacaattctgatggaggattttctctcccatcaaccaaacaccacttaagattaacctgtggctcagtctacttaaataaatgccatatttattttacttatcatttagaatttgccattctcaggaacaaaactttttgtacattggaaatggaaaacattgcagtttggtcttaatttccacatgaatatcaagtgtaatttttaataaattatttggagaaaaatgtattttattttagcatgcaattttatgcccaggttagactagagatttggctgatgttctggaatctcattgtactcttaagtaaaataacgagcatcccatgacgcaccctgtcaggggttgtgagaaagctgcagtgtccagtttcccacccctgtttcctgctgtctctctcccactcatccctgtttcttactcatcccttttccttctttgcccaaacatcatatttctaggcaaagataagagaggagatagtgatgtcctgaaaggggttcagaacaacgtagcatggcctttggtgaaagcgtcaccgatgggaaataattgagaattgtgcagtgcttgcagcgtcagaatcagcactgttttttgtgttggtgaaaatattccatgtgcgtaaagggagagcatcagggactttgcaaattcttcacaaggacccagaaatagcttaaagattcatggttttcctgttggcttaaatagccttaatctttcattttctactaccattaagtcggggaaatgacattgaactacctcattagcagccttcccttgattaactactgactaaaagtgtgctgaaaatggcctttgtttttgtgaagctcatcctatacactaacatttgcttaaccatggattattttgtctctacaaagctgtgccctgtattcgatttttacttcaatgagtggttattgctagaattcctacaaaaaaaaaaaaaaccgttgcagatatttttgtatgtagcttaatagatatttagtttaaggagactgcaacatttgcataaggtgcctaaaaactcaagaaccattgataagtgagatcactcaaaatgagctgatatattaaagaagaccttaaaacag

SEQ ID NO: 30144 - DNA, 2066 bp, Homo sapiens
  source 1..2066: mol_type = unassigned DNA
ttatagcaaaatcagtgcaaataaaaatccctcagtgacctcactggatgtgagtatattgggcctgggacagggctgggggctaacaccctgtgtgagatgagtgtctttgtgtctgtgcttgatgttggtggctctctgtagtcacatgacagcatgggtgtgatggagatctgacttcattcaacaaacatattttctaaggagttccctgtgccaggcactaagctgggcactgggaatgtaataaaatagtcaaggtcccaccttctaagactgtccgacagggaaacgaacaagagtcaaataaggcagaagatgtgatgtaatacacctacgaaatctcagagggttgtagggtcgtgggagctcaagtgagacacttaacctggcctgagacattccagaaggcctcctgaagaactgacatctgaactgagaactgaaggaagatgagtactagtgaggctaccggacgtgaatgtggagattgtgcagggcaatgcaagaggaggctgtagaagtcaacctggctagatcacagcggggtgtatgtggggcaggagcttctttgtttgaatttgctcctgagaggatgaggcctcctagagcactggctcctggacagcaacctcctttggtgccttgtgaccagggccctgatggttcattagatggagccttcgagtcttagggagttgccgcagggtccccacagcggctcccgacggttgtgaaccagcatccatcctccacggattccggcaacccgcctggccctggacgtgtctcaactggcccgcgtgaggggccgccccggaaatgacgcgctgccccgctggccaagcggaagtggagatggcggagctgtacgtgaagccgggcaacaaggaacgcggctggaacgacccgccgcagttctcatacgggctgcagacccaggccggcggacccaggcgctcgctgcttaccaagagggtcgccgcaccccaggatggatcccccagagtccccgcatcagagacttctcctgggcctcccccaatggggcctccacctccttcaagtaaggctcccaggtccccacctgtggggagtggtcctgcctctggcgtggagcccacaagtttcccagtcgagtctgaggctgtgatggaggatgtgctgagacctttggaacaggcattggaagactgccgtggccacacaaggaagcaggtatgtgatgacatcagccgacgcctggcactgctgcaggaacagtgggctggaggaaagttgtcaatacctgtaaagaagagaatggctctactggtgcaagagctttcaagccaccggtgggacgcagcagatgacatccaccgctccctcatggttgaccatgtgactgaggtcagtcagtggatggtaggagttaaaagattaattgcagaaaagaggagtctgttttcagaggaggcagccaatgaagagaaatctgcagccacagctgagaagaaccataccataccaggcttccagcaggcttcataatcctcggttccccagactcaccggacaccatctcctatgccttggagaccttctgtcacttggctcccttcttaccaccaccaagactgtcccactgggcctgacccacctatgagggaagaagtcccacctgggccagagggagttcatgtgttactcataacatgcatttcaataaaaacatctctgcggtgggccttgggtaggagagatgaacccttccggtgccaagctagtcccctctggtgtcctcgactgccctgctccctgtgtatctgcaaacctctgttctcccttctccattcatcaggaagggatctgctgggtaaagtcagactactgcctaccactttttcccaaagtagactgaaagcacatcctgtgctgggcggagcagctgtgtttggatggtttcatttcagcatgagaacagactcaaatagaacggggagacttttccctcaacaaaaggaaagacagtcctatttgcactgtatcacccttgagatactactgttacagagattagaacc

SEQ ID NO: 30145 - DNA, 6521 bp, Homo sapiens
  source 1..6521: mol_type = unassigned DNA
acagtgctgttggccaagcctccagcagctgacgggacccagctgtagtgaggttgcagtgattgagtaggattggcctgcttcaaagcagaggtttctcatgggaatatgcttattaaactcccactggtgcagaaaccatgaacagaggatgaacaagtgaagttgcaatctcctccatcacagctcagttccccaacaacaggatcacaagctggagatgcctttaaggaagatgaagatccctttcctcctactgttctttctgtgggaagccgagagccacgcagcatcaaggccgaacatcatcctggtgatggctgacgacctcggcattggagatcctgggtgctatgggaacaaaactatcaggactcccaatatcgaccggttggccagtgggggagtgaaactcactcagcacctggcagcatcaccgctgtgcacaccaagcagggcagccttcatgactggccggtaccctgtccgatcaggaatggcatcttggtcccgcactggagttttcctcttcacagcctcttcgggaggacttcccaccgatgagattacctttgctaagcttctgaaggatcaaggttattcaacagcactgatagggaaatggcaccttgggatgagctgtcacagcaagactgacttctgtcaccaccctttacatcacggcttcaattatttctatgggatctctttgaccaatctgagagactgcaagcccggagagggcagtgtcttcaccacgggcttcaagaggctggtcttcctccccctgcagatcgtcggggtcaccctccttacccttgctgcactcaattgtctggggctactccacgtgcctctaggcgtttttttcagccttctcttcctagcagccctaatcctgacccttttcttgggcttccttcattacttccggcccctgaactgcttcatgatgaggaactacgagatcattcagcagcccatgtcctatgacaatctcacccagaggctaacggtggaggcggcccagttcatacagcggaacactgagactccgttcctgcttgtcttgtcctacctccacgtgcacacagccctgttctccagcaaagactttgctggcaaaagtcaacacggagtctacggggatgctgttgaggaaatggactggagtgtggggcagatcttgaaccttctggatgagctgagattggctaatgataccctcatctacttcacatcggaccagggagcacatgtagaagaagtgtcttccaaaggagaaattcatggcggaagtaatgggatctataaaggaggaaaagcaaacaactgggaaggaggtatccgggttccaggcatccttcgttggcccagggtgatacaggctggccagaagattgatgagcccactagcaacatggacatatttcctacagtagccaagctggctggagctcccttgcctgaggacaggatcattgatggacgtgatctgatgcccctgcttgaaggaaaaagccaacgctccgatcatgagtttctcttccattactgcaacgcctacttaaatgctgtgcgctggcaccctcagaacagcacatccatctggaaggcctttttcttcacccccaacttcaaccccgtgggttccaacggatgctttgccacacacgtgtgcttctgtttcgggagttatgtcacccatcacgacccacctttactctttgatatttccaaagatcccagagagagaaacccactaactccagcatccgagccccggttttatgaaatcctcaaagtcatgcaggaagctgcggacagacacacccagaccctgccagaggtgcccgatcagttttcatggaacaactttctttggaagccctggcttcagctgtgctgtccttccaccggcctgtcttgccagtgtgatagagaaaaacaggataagagactgagccgctagcagcgcctggggaccagacagacgcatgtggcaaagctcaccatcttcactacaaacacgcctgagagtggcactggggaaacataactccatctacaccttggatttggactgattctccattttatcacctgaaggcttgggccagagctcaacagctactcaactggaggggtgagggggataaggtctgtagtatacagacaggaagatggtaggtttatgccttctgtggccagagtcttggactcatggaaatagaatgaatagaggggcattcacaaggcacaccagtgcaagcagatgacaaaaaggtgcagaaggcaatcttaaaacagaaaggtgcaggaggtaccttaactcacccctcagcaaatacctatgtcaacagtataagttaccatttactctataatctgcagtgatgcaataaccagcataataaaaaggcaatcacataaaaaagagtttagtcgtctaaacataagtaactttaaggtgaatgaaagatcttctttaggaataatagatgatggtaagttccactttggttattggaaggcaagtcattattactggtattagttaaaacacatatcaaatgcttgctcttcatcatatatatagttatgcatacatacacacacacacatacagtatattctttcctcaaaagggttaagatgtctaaaatagggacctagaagcttaacactatttaagtaaatacagtagaagctcacaaatagatttctttgcacaatgattttttgcaaaattttacagtaataataatcccaaggcaaatctctcctgaactgctttccattccataatttgtagtataattcttggattccactgttttctttggggaatggaagttctgaattaaaagcccactgtggagatgctgtggttcatggaatctcttccagtgtaattcagaatcattggcctagaaagtctctgatatttggaggggaacaaaaatcactcacaagcaatccatgatctatacacataagcataatttcctttagttctagttagtcatcagagaacagtcatgtatgcaagttttgtgactgagaaatttctgtgcttccaatccacaatgagatgcatgattttgttttcatcccatttcccccaagcccctgtaaatcagggaaaatgcgcaactgatcgcctaggagagggcctcgtagtggcacagctggagatagtttcaaagtctaaaccaccagcccatcctgaggaaagcctcctatggaatgtaaagtgcaatcatttcttcagatataagactttccccaacaatgtgattggattcctttatggcaaaatcgagagaagctgccatccacctgcttatgcatttatctcttttgtggacttgtctgaccaccttctatttgcccagagtttgctcaattccaagacagtgcccatgaatgggacacctgtaatgtaacccacacagcggtttgcagagaatgttagccatgacttgggctttctgaaagttggctataatttctctatccctacccacaaccctgggaagttggagcaagaggggcatactattgggctgggaggatttgacagcatttccccagttgccctttaagttcttctatttcaaacgttaattttgcttctctttctaaaaaaaaaaaaaaaaaagaaagagaagaaagaagtgattcctaccccctacctccagagttgttgaaagctgaaaagcatacaagattcttccttttaacttggatttctcgttccagaaattgtgggataatctgtattcttgctttagaaaacattcttagagagggtactagcttactgatgatgtgttaggattgctactgatgctgtcatgtggaaactatttaaaggcactattataaatttatcctataagatgacaatgtttactcaaagtctaacatattcaatgcaagtaagactttctgaaaacacttgatgatgtggaaatgctgcaggattaaataacttgaagagcctttatagattatatgaatgcctatttgtgtctagaaccagttatttaacctgtaaaatgtcaatagcaaatgaaggatgaagtatatctctagatgcaaatacattgagtttaaaagtgcctcaaaataattgagatcacatttcaggacatttggaaatcaggtcgatttgtggtaactgtagtcatcttaaatttcaaaccatttaccatctgaaagttttgatttgaatgtaaaacaggaaattggaattcctttgtccaggagaaacctcacaaaccttctttaaggcatagttttgttgtttgtttgcttgtttgttgcaggctgtaaggcatggctgcttgtttacaaagcatctcattcatattacctgtggagttgcatatccaaaccttagtgagttttgaagctttaagcaaattcttttaaaaaattcttgtatttctagcattactagatattaaaagttaagcaaatagattaatgacgtatacataggcatcatttcacaaggtcagtaatgctgcaggaaaagcaaaattgcaatctacgtatctatggtactaaggaagtcctgtttttcaaaaatggaagcccacttctcagatttttctgaagggcatacaatgaaaagtgaaggggaaacacacacacacaaaaaaacaagtatttggcttgtcacaggaatctgattgcattaagtgaaaggattatttagaatatgttaatgcaaagctaaaataaaattttccttggcaattaaaaatgctgtgcgctaataccctgctttctatcgtgactcaattcaacaatgtggggaatgtttactacatttccaacttgatgtcaagcaatggggaatacaagttccagttctgcaaagattcgtcaactttcttagctcaagagagaggctgagaaatgcagagaagaataagacataaaatagctccgacctccatgatccgagagtgggaaaaggcccgattattacccataaggcacactctctaaggccttttaaggggcctacaaaaatgttttattttataatcagaagaaaaggaaatgaacattggggattgaaaatcatattggtatttgcaccaacatagtcataaaatagtatgttaatatgtttttactttatatatttatatattaaaatatatttaatatgttttgcctttgtggcccatgaaagtcttactgggccctggggaaggtatcctaccctggtgaagcagctgctttgctctacaaatacctggggcagaaatttgatttgaaaagtattattctctcttctctttgtttcaactggattcctttggaaaaccaaactagtatcagaacaaaccccgaaacagtaagaaattggagtgagaagggcatggtattgggactaggatcggctctcattcgatcgagctattctcttaaaatgacaaaaagtgtccataaagaggctgctggagagtgcgtggccatagggagccgacatgcccgggaggaaaggtgttgattacatggatacttctaaaagctaaagccttgttgccttctctttaatgcctagagaatgggatgtgtgatgcaaatgctcaaaacctcttaaatcatagctgtctgacctctacggacctcacatccatctgaggcttcatggacaaagattctccacttggccaaactttagccaagctcctcaaccttctcccaggcccaatctgggcacttccttgtaaaatctagttttggcaagaagtctattaggtcagtttagcaagaacacctaacccccccatatctgttcaacctcagtatctgatcaggctcctcagcctccaccatcccccaggtgatgtctggtcaactggcctgccttcagctagaatcctgttaggtcggtttagatgaatgctccctgatatttcctcttggtaatcttccatccactgcccctgaccctgttccctgtctataaatccccagttttccatggtgtattcagagctgagtccagtctctctcccctactacaagtccccattgctgtggtccccgtacctgtcatgatggtcctaaataaagtcttactgtgctttaataggtagcattgaaaaatttttttctttgacatcattcatgacaacatgaaacctattgggacagcatgactgtgcagggtctttagagctcagctttctgaggccctgagcattcttggttttccgacatcgtgaacctgttctgtgttgcaagatatcactcaagccagtgttgcttaataccatctctttgtgtaatagatctgaataaagtaattgtaatacaccaatattttactttgttgagtattattttaatgggagcctttccaatgaaggaaacatcagctttccttgttagaatgcaagcagcttaaaaactacccatgtctttctggaaaggaaacattgccatgtaactatgtatcagttttctaagaacttcatgggccttccata

SEQ ID NO: 30146 - DNA, 2308 bp, Homo sapiens
  source 1..2308: mol_type = unassigned DNA
tggggcgcttgcaggtccctccccgcgcaagtgctcgccccgcccccggggccgcacccacagccccggctaccccggagaagcctgacttgagaaccctttctgcagagtcccggcagtgcgggactccggtagccgcccctccggtagccgcccctcctgcccccgcgccgccgccctatatgttgcccgccgcggcctctggggcatggagcacgctgcccagccctggcgatggcaacggcgacgggggtggcggaggagcgcctgctggccgcgctcgcctacctgcagtgcgccgtgggctgcgcggtcttcgcgcgcaatcgtcagacgaactcagtgtacggccgccacgcgctgcccagccacaggctccgagtgccggcgcgggccgcctgggtggtgcaggagctgccctcgctggccctgccgctctaccagtacgccagcgagtccgccccgcgtctccgcagcgcgcccaactgcatcctcctggccatgttcctcgtccactacgggcatcggtgcttaatttacccatttctgatgcgaggaggaaagcctatgccactgttggcgtgtacaatggcgattatgttctgtacctgtaacggctatttgcaaagcagatacttgagccattgtgcagtgtatgctgatgactgggtaacagatccccgttttctaataggttttggcttgtggttaacgggcatgttgataaacatccattcagatcatatcctaaggaatctcagaaaaccaggagatactggatacaaaataccaaggggaggcttatttgaatacgtaactgcagccaactattttggagaaatcatggagtggtgtggctatgccctggccagctggtctgtccaaggcgcggcttttgctttcttcacgttttgttttttatctggtagagcaaaagagcatcatgagtggtacctccggaaatttgaagagtatccaaagttcagaaaaattataattccatttttgttttaagtgcgtttttcatgaaattatcttcaacttgaagctttccaatggcgcttctctatggactttgtaaataagttatatctttgtaattttcctgctactttatcattttcaagatgtcctctaggaattttttttctagtaattttgcaatctacctaataagtacctaaatacgctgaaatggaggttgaatatcctactgtgtaacaggtcagaatttcaagctctgggtaataactgctgatattttttctaatttcaaatttacctcttttggctatgtcttgccaagtgtgtatgagactagactttacaactgtctttgatggcattttcagaacaataaatgtcacaatcccttctatagccccctacagtgatctcttcaaggtcaactgcagtgttgcttccctccccctatagggctggaatctgtctaggagccctctctcggaggccacagaggctgggggtagccattgtgcagtcatggcccgggggaaacttgccaaccttcgtgtcaggtgctgtgtgtaagtggagaacttggggatagaggaggaagctcctcgtggcccttccaaggtgaggcaaaggcatctggacttgttccagcccagcccaccgggtgacatcaccgggcagggaggggtgctggtggtggttcatacggagtaagctgctctgcctgtgtgagtggctcctgggccctaaacaggcacctttaggccatgggtcactcaccgtgagccatcaatgtgctctggtctgacatggtttctctctgtcttctagtctagacctagtttttttgttctgttccccacgtatggatatagtagagattgttgtctgtgaaatttctcttttgtagattttgagttttcccttgtagtgtaaagaatgatcactttctgtaacaataacaagaccactttttaagatttatcctgtttgttctttgttgattgaaacataataattgttaaaattctctacagccttctttttcttccatagctaatcttccttctaatagtttttgctttctgttttgctgttgttgctttgcaaagctttcccctcatagcctgtacctgttatcaatataaaataatcttcctgttgaatgcttcatgacttgaattctactttgataaaaacattgccatactgctttttatcttgatgaattcatctggcattgctttgccttatcatctcatctggagtttttaaatgccatttgtttcagttgtctttaacaacataataaatagactttgccatttaa

SEQ ID NO: 30147 - DNA, 2013 bp, Homo sapiens
  source 1..2013: mol_type = unassigned DNA
ctgacttgagaaccctttctgcagagtcccggcagtgcgggactccggtagccgcccctccggtagccgcccctcctgcccccgcgccgccgccctatatgttgcccgccgcggcctctggggcatggagcacgctgcccagccctggcgatggcaacggcgacgggggtggcggaggagcgcctgctggccgcgctcgcctacctgcagtgcgccgtgggctgcgcggtcttcgcgcgcaatcgtcagacgaactcagtgtacggccgccacgcgctgcccagccacaggctccgagtgccggcgcgggccgcctgggtggtgcaggagctgccctcgctggccctgccgctctaccagtacgccagcgagtccgccccgcgtctccgcagcgcgcccaactgcatcctcctggccatgttcctcgtccactacgggcatcggaaatgttggtatgcaagcacttgcagtgtgcctacatcccaaatgccagcccatggtacccattgtctgcccggatctgaatcatgattccaagacgcagagagaaattgctgggattcgttgttcttattcattgcttggcaacactgcagcttccaggagaatacccacctcactgatgacacaacatctgaatgcacacttactggccaacacgtgctttgctgtaaatcagtatgaagtcttcctaggggtcctggcctgaatgagatgagaaccttggaggctgcttttgactcatgtgaatgtcttccccaggagttaagtgggagtgctggggagagagtggcttgaggatgcacagccagcatgacactactattatgtgattactgtcgacgttcataaccataactaatgactaattatgactttaccctggcgcacatggtcagaatggaaacaaataacaagctttacagtttttcctgctctattaaggtgcttaatttacccatttctgatgcgaggaggaaagcctatgccactgttggcgtgtacaatggcgattatgttctgtacctgtaacggctatttgcaaagcagatacttgagccattgtgcagtgtatgctgatgactgggtaacagatccccgttttctaataggttttggcttgtggttaacgggcatgttgataaacatccattcagatcatatcctaaggaatctcagaaaaccaggagatactggatacaaaataccaaggggaggcttatttgaatacgtaactgcagccaactattttggagaaatcatggagtggtgtggctatgccctggccagctggtctgtccaaggcgcggcttttgctttcttcacgttttgttttttatctggtagagcaaaagagcatcatgagtggtacctccggaaatttgaagagtatccaaagttcagaaaaattataattccatttttgttttaagtgcgtttttcatgaaattatcttcaacttgaagctttccaatggcgcttctctatggactttgtaaataagttatatctttgtaattttcctgctactttatcattttcaagatgtcctctaggaattttttttctagtaattttgcaatctacctaataagtacctaaatacgctgaaatggaggttgaatatcctactgtgtaacaggtcagaatttcaagctctgggtaataactgctgatattttttctaatttcaaatttacctcttttggctatgtcttgccaagtgtgtatgagactagactttacaactgtctttgatggcattttcagaacaataaatgtcacaatcccttctatagccccctacagtgatctcttcaaggtcaactgcagtgttgcttccctccccctatagggctggaatctgtctaggagccctctctcggaggccacagaggctgggggtagccattgtgcagtcatggcccgggggaaacttgccaaccttcgtgtcaggtgctgtgtgtaagtggagaacttggggatagaggaggaagctcctcgtggcccttc

SEQ ID NO: 30148 - DNA, 935 bp, Homo sapiens
  source 1..935: mol_type = unassigned DNA
actccggtagccgcccctccggtagccgcccctcctgcccccgcgccgccgccctatatgttgcccgccgcggcctctggggcatggagcacgctgcccagccctggcgatggcaacggcgacgggggtggcggaggagcgcctgctggccgcgctcgcctacctgcagtgcgccgtgggctgcgcggtcttcgcgcgcaatcgtcagacgaactcagtgtacggccgccacgcgctgcccagccacaggctccgagtgccggcgcgggccgcctgggtggtgcaggagctgccctcgctggccctgccgctctaccagtacgccagcgagtccgccccgcgtctccgcagcgcgcccaactgcatcctcctggccatgttcctcgtccactacgggcatcggttttggcttgtggttaacgggcatgttgataaacatccattcagatcatatcctaaggaatctcagaaaaccaggagatactggatacaaaataccaaggggaggcttatttgaatacgtaactgcagccaactattttggagaaatcatggagtggtgtggctatgccctggccagctggtctgtccaaggcgcggcttttgctttcttcacgttttgttttttatctggtagagcaaaagagcatcatgagtggtacctccggaaatttgaagagtatccaaagttcagaaaaattataattccatttttgttttaagtgcgtttttcatgaaattatcttcaacttgaagctttccaatggcgcttctctatggactttgtaaataagttatatctttgtaattttcctgctactttatcattttcaagatgtcctctaggaattttttttctagtaattttgcaatctacctaataagtacctaaatacgctgaaatggaggttgaatatcctactgtgtaacaggtc

SEQ ID NO: 30149 - DNA, 1929 bp, Homo sapiens
  source 1..1929: mol_type = unassigned DNA
agctgagcctggagtttctgaagacaagggctagaaatctgcactttaaagtcttgaaaaccactgtgtgccttcatctaagctgcccctgcttctctcccctccatccctcgcctggccctgtcctccctactctcccctgcaccctcccccgccccaagctccccacaaacggccaaagcagcagtgtgaggcaatcgctctatccttgaccccttcctttgcacagtgagtgatggcgtttttatctcctgatgatgatgcacagccttcagcgggggacatttaagacgcagaacaccaggtccaggctgcagctgcgggactcagaggcgaagcttgaggggctcaggaaggacgaagaaccacccttgagagaagaggcagcagcagcggcggcagcagcagcggcagcgaccccaccactgccacatttgccaggaaacaatgctgctagcgacattcaagctgtgcgctgggagctcctacagacacatgcgcaacatgaaggggctgaggcaacaggctgtgatggccatcagccaggagctgaaccggagggccctggggggccccacccctagcacgtggattaaccaggttcggcggcggagctctctactcggttctcggctagaagagactctctacagtgaccaggagctggcctatctccagcagggggaggaggccatgcagaaggccttgggcatccttagcaaccaagagggctggaagaaggagagtcagcaggacaatggggacaaagtgatgagtaaagtggtcccagatgtgggcaaggtgttccggctggaggtcgtggtggaccagcccatggagaggctctatgaagagctcgtggagcgcatggaagcaatgggggagtggaaccccaatgtcaaggagatcaaggtcctgcagaagatcggaaaagatacattcattactcacgagctggctgccgaggcagcaggaaacctggtggggccccgtgactttgtgagcgtgcgctgtgccaagcgccgaggctccacctgtgtgctggctggcatggccacagacttcgggaacatgcctgagcagaagggtgtcatcagggcggagcacggtcccacttgcatggtgcttcacccgttggctggaagtccctctaagaccaaacttacgtggctactcagcatcgacctcaaggggtggctgcccaagagcatcatcaaccaggtcctgtcccagacccaggtggattttgccaaccacctgcgcaagcgcctggagtcccaccctgcctctgaagccaggtgttgaagaccagcctgctgttcccaactgtgcccagctgcactggtacacacgctcatcaggagaatccctactggaagcctgcaagtctaagatctccatctggtgacagtgggatgggtggggttcgtgtttagagtatgacactaggattcagattggtgaaagtttttagtaccaagaaaacagggatgaggctcttggattaaaaggtaacttcattcactgattagctatgacatgagggttcaggcccctaaaataattgtaaaactttttttctgggcccttatgtacccacctaaaaccatctttaaaatgctagtggctgatatgggtgtgggggatgctaaccacagggcctgagaagtcttgctttatgggctcaagaatgccatgcgctggcagtacatgtgcacaaagcagaatctcagagggtctcctgcagccctctgctcctcccggccgctgcacagcaacaccacagaacaagcagcaccccacagtgggtgccttccagaaatatagtccaagctttctctgtggaaaaagacaaaactcattagtagacatgtttccctattgctttcataggcaccagtcagaataaagaatcataattcacacaaa

SEQ ID NO: 30150 - DNA, 1567 bp, Homo sapiens
  source 1..1567: mol_type = unassigned DNA
gtgatggcgtttttatctcctgatgatgatgcacagccttcagcgggggacatttaagacgcagaacaccaggtccaggctgcagctgcgggactcagaggcgaagcttgaggggctcaggaaggacgaagaaccacccttgagagaagaggcagcagcagcggcggcagcagcagcggcagcgaccccaccactgccacatttgccaggaaacaatgctgctagcgacattcaagctgtgcgctgggagctcctacagacacatgcgcaacatgaagggttctcggctagaagagactctctacagtgaccaggagctggcctatctccagcagggggaggaggccatgcagaaggccttgggcatccttagcaaccaagagggctggaagaaggagagtcagcaggacaatggggacaaagtgatgagtaaagtggtcccagatgtgggcaaggtgttccggctggaggtcgtggtggaccagcccatggagaggctctatgaagagctcgtggagcgcatggaagcaatgggggagtggaaccccaatgtcaaggagatcaaggtcctgcagaagatcggaaaagatacattcattactcacgagctggctgccgaggcagcaggaaacctggtggggccccgtgactttgtgagcgtgcgctgtgccaagcgccgaggctccacctgtgtgctggctggcatggccacagacttcgggaacatgcctgagcagaagggtgtcatcagggcggagcacggtcccacttgcatggtgcttcacccgttggctggaagtccctctaagaccaaacttacgtggctactcagcatcgacctcaaggggtggctgcccaagagcatcatcaaccaggtcctgtcccagacccaggtggattttgccaaccacctgcgcaagcgcctggagtcccaccctgcctctgaagccaggtgttgaagaccagcctgctgttcccaactgtgcccagctgcactggtacacacgctcatcaggagaatccctactggaagcctgcaagtctaagatctccatctggtgacagtgggatgggtggggttcgtgtttagagtatgacactaggattcagattggtgaaagtttttagtaccaagaaaacagggatgaggctcttggattaaaaggtaacttcattcactgattagctatgacatgagggttcaggcccctaaaataattgtaaaactttttttctgggcccttatgtacccacctaaaaccatctttaaaatgctagtggctgatatgggtgtgggggatgctaaccacagggcctgagaagtcttgctttatgggctcaagaatgccatgcgctggcagtacatgtgcacaaagcagaatctcagagggtctcctgcagccctctgctcctcccggccgctgcacagcaacaccacagaacaagcagcaccccacagtgggtgccttccagaaatatagtccaagctttctctgtggaaaaagacaaaactcattagtagacatgtttccctattgctttcataggcaccagtcagaataaagaa

SEQ ID NO: 30151 - DNA, 2003 bp, Homo sapiens
  source 1..2003: mol_type = unassigned DNA
gggagctctggtgcagtctccgcctgtcagtgccggcagtcgtccgcggcgcccgccccggtcccgcactggtgcagccatgtcctcttccccgtgggagcctgcgaccctgcgccgggtgttcgtggtgggggttggcatgaccaagtttgtgaagcctggagctgagaattcaagagactaccctgacttggcagaagaagcaggcaagaaggctttagctgatgcacagatcccttattcagcagtggaccaggcatgtgttggctatgtttttggtgtggcagaatgtgtcttggctcttgggtttgagaagatgagtaagggaagccttggaataaaattttcagatagaaccattcccactgataagcatgttgacctcctgatcaataagtatggattgtctgctcacccagttgctcctcagatgtttgggtatgctggaaaagaacatatggaaaaatatggaacaaaaattgaacactttgcaaaaattggatggaaaaatcataaacattcagttaataacccgtattcccagttccaagatgaatacagtttagatgaagtgatggcatctaaagaagtttttgattttttgactatcttacaatgttgtcccacttcagatggtgctgcagcagcaattttggccagtgaagcatttgtacagaagtatggcctgcaatccaaagctgtggaaattttggcacaagaaatgatgactgatttgccaagctcgtttgaagaaaaaagcattattaaaatggttggctttgatatgagtaaagaagctgcaagaaaatgctatgagaaatctggcctgacaccaaatgatattgacgtaatagaacttcacgattgcttttctaccaacgaactccttacttatgaagcactgggactctgtccagaaggacaaggtgcaacgctggttgatagaggagataatacatatggaggaaagtgggtcataaatcctagtggtggactgatttcaaagggacacccactaggcgctacaggaggacattcctgctcttgaaatttcctgataacccggacaagttcatggaaagcttgatctacattcatcctaatctttgctgatgcctccatgtatgttaccttaagttgccgtgctaactgccgtccttcttcctgtgttacctgtctttgatgatccagatctgctttattaccaattaaaatcattgggaactcatcacgatcctttactctgagaatctgtctttgaaacttatagatttcttcaaaactgcctctatctgtgactgaaaagaccaacaggaagccctcgccagtcctcatatactgttctctcatggctccaagctcttcttgtcctgctgtatccaaaatatctagccgggctgctctgtcatctatcacacactgctttgtgtaagaatcttcattggttggatcataatccgttacaaaataggactcccaacttaggaaacaaaacatttgtaatatgattgaagactcctgcatgcctcctcaataatattcccctctctcctcccccagcaccaagaggtaatcaatatcctgaatttggtatctgtcattctcatgcatttatacaacattagtaatcatatgatagtattcctaagctatgttttggagaggacaccactgcaaatcttcagccctatactagcttttatcggtagccatcaattgcagttttaatagaaatacaaatacatcaagtgtctgttctttaatttgtaaagaaaatttgttttctagcgtgacaccctcaaggtaccgtatctgtatgtaaatgttgtgcccaatgctacacagacattattttaaaactattttctgcctttggtaaatagactaaactgttttctttattcctcaaaagaattagatcatacttcagtgttgattttgttgctaatgggacatggagatgtctggatgataataaatattcctgtggtatggtcactgaa

SEQ ID NO: 30152 - DNA, 2811 bp, Homo sapiens
  source 1..2811: mol_type = unassigned DNA
gcgccccaccccgccccctcctcctgcccctacgcacgcgcactctcacgcgcctgtgttgccgcccgcggccctggcttcgggcttcagggagctctggtgcagtctccgcctgtcagtgccggcagtcgtccgcggcgcccgccccggtcccgcactggtgcagccatgtcctcttccccgtgggagcctgcgaccctgcgccgggtgttcgtggtgggggttggcatgaccaagtttgtgaagcctggagctgagaattcaagagactaccctgacttggcagaagaagcaggcaagaaggctttagctgatgcacagatcccttattcagcagtggaccaggcatgtgttggctatgtttttggtgactctacctgtgggcagagggctatctatcacagtttgggaatgactggaattcctataatcaatgtcaacaataactgtgctactggttctactgctttgtttatggcccgccagctgattcagggtggtgtggcagaatgtgtcttggctcttgggtttgagaagatgagtaagggaagccttggaataaaattttcagatagaaccattcccactgataagcatgttgacctcctgatcaataagtatggattgtctgctcacccagttgctcctcagatgtttgggtatgctggaaaagaacatatggaaaaatatggaacaaaaattgaacactttgcaaaaattggatggaaaaatcataaacattcagttaataacccgtattcccagttccaagatgaatacagtttagatgaagtgatggcatctaaagaagtttttgattttttgactatcttacaatgttgtcccacttcagatggtgctgcagcagcaattttggccagtgaagcatttgtacagaagtatggcctgcaatccaaagctgtggaaattttggcacaagaaatgatgactgatttgccaagctcgtttgaagaaaaaagcattattaaaatggttggctttgatatgagtaaagaagctgcaagaaaatgctatgagaaatctggcctgacaccaaatgatattgacgtaatagaacttcacgattgcttttctaccaacgaactccttacttatgaagcactgggactctgtccagaaggacaaggtgcaacgctggttgatagaggagataatacatatggaggaaagtgggtcataaatcctagtggtggactgatttcaaagggacacccactaggcgctacaggtcttgctcagtgtgcagaactctgctggcagctgagaggggaagccggaaagaggcaagttcctggtgcaaaggtggctctgcagcataatttaggcattggaggagctgtggttgtaacactctacaagatgggttttccggaagccgccagttcttttagaactcatcaaattgaagctgttccaaccagctctgcaagtgatggatttaaggcaaatcttgtttttaaggagattgagaagaaacttgaagaggaaggggaacagtttgtgaagaaaatcggtggtatttttgccttcaaggtgaaagatggccctgggggtaaagaggccacctgggtggtggatgtgaagaatggcaaaggatcagtgcttcctaactcagataagaaggctgactgcacaatcacaatggctgactcagacttcctggctttaatgactggtaaaatgaatcctcagtcggccttctttcaaggcaaattgaaaatcactggcaacatgggtctcgctatgaagttacaaaatcttcagcttcagccaggcaacgctaagctctgaagaactccctttggctacttttgaaaatcaagatgagatatatagatatatatccatacattttattgtcagaatttagactgaaactacacattggcaaatagcgtgggatagatttgtttcttaatgggtgtgaccaatcctgtttttcctatgctctgggtgaatagagcctgatggtatactactgctttgcggaattgcatacaactgtgcattacaaagttaatatggtaattatggtctggggtaaaattgagtttcagaataaaattaggaacagtaaaatccaaagaactatgtaaacaaaaaagcttttgttttgcttacaaagtatatttaaggattattctgctgaagattcagtttaagagttttccttgggagaactaagtaagaaacacaatgccaacagctggccagtaattagtgttgtgcacttcatgtcattaatcaatttctcaatagttcttaaaattagtgagattaaaaatctaaaaattttgcatttcatgctatcagaaacagtattttcttcccaaatcaaaataaaagaaatatgatcagagcttgaacacaggcttatttttaaaataaaaatatttttaacatgggtttccttattgaaaaatcagtgtattagtcataaaacaccatcattaagaataattgaacaataaagtttgctttcagatgcagttttcaaattataatctcatttcaatttataacgttctcagtcctttgttataattttcctttttcatgtaagtttaattatctgcatttatcttttttcctagtttttctaatactaatgttatttcttaaaattcagtgagatataggataaaataatgctttgagaagaatgtttaatagaaaattaaaataactttttctggcctctcttgtttttactgtgtatgttcttgctcagggctctctagataatgcagaataaagagaaacgttgggggatttataaactgaatgtta

SEQ ID NO: 30153 - DNA, 2239 bp, Homo sapiens
  source 1..2239: mol_type = unassigned DNA
gttgccgcccgcggccctggcttcgggcttcagggagctctggtgcagtctccgcctgtcagtgccggcagtcgtccgcggcgcccgccccggtcccgcactggtgcagccatgtcctcttccccgtgggagcctgcgaccctgcgccgggtgttcgtggtgggggttggcatgaccaagtttgtgaagcctggagctgagaattcaagagactaccctgacttggcagaagaagcaggtgactctacctgtgggcagagggctatctatcacagtttgggaatgactggaattcctataatcaatgtcaacaataactgtgctactggttctactgctttgtttatggcccgccagctgattcagggtggtgtggcagaatgtgtcttggctcttgggtttgagaagatgagtaagggaagccttggaataaaattttcagatagaaccattcccactgataagcatgttgacctcctgatcaataagtatggattgtctgctcacccagttgctcctcagatgtttgggtatgctggaaaagaacatatggaaaaatatggaacaaaaattgaacactttgcaaaaattggatggaaaaatcataaacattcagttaataacccgtattcccagttccaagatgaatacagtttagatgaagtgatggcatctaaagaagtttttgattttttgactatcttacaatgttgtcccacttcagatggtgctgcagcagcaattttggccagtgaagcatttgtacagaagtatggcctgcaatccaaagctgtggaaattttggcacaagaaatgatgactgatttgccaagctcgtttgaagaaaaaagcattattaaaatggttggctttgatatgagtaaagaagctgcaagaaaatgctatgagaaatctggcctgacaccaaatgatattgacgtaatagaacttcacgattgcttttctaccaacgaactccttacttatgaagcactgggactctgtccagaaggacaaggtgcaacgctggttgatagaggagataatacatatggaggaaagtgggtcataaatcctagtggtggactgatttcaaagggacacccactaggcgctacaggtcttgctcagtgtgcagaactctgctggcagctgagaggggaagccggaaagaggcaagttcctggtgcaaaggtggctctgcagcataatttaggcattggaggagctgtggttgtaacactctacaagatgggttttccggaagccgccagttcttttagaactcatcaaattgaagctgttccaaccagctctgcaagtgatggatttaaggcaaatcttgtttttaaggagattgagaagaaacttgaagaggaaggggaacagtttgtgaagaaaatcggtggtatttttgccttcaaggtgaaagatggccctgggggtaaagaggccacctgggtggtggatgtgaagaatggcaaaggatcagtgcttcctaactcagataagaaggctgactgcacaatcacaatggctgactcagacttcctggctttaatgactggtaaaatgaatcctcagtcggccttctttcaaggcaaattgaaaatcactggcaacatgggtctcgctatgaagttacaaaatcttcagcttcagccaggcaacgctaagctctgaagaactccctttggctacttttgaaaatcaagatgagatatatagatatatatccatacattttattgtcagaatttagactgaaactacacattggcaaatagcgtgggatagatttgtttcttaatgggtgtgaccaatcctgtttttcctatgctctgggtgaatagagcctgatggtatactactgctttgcggaattgcatacaactgtgcattacaaagttaatatggtaattatggtctggggtaaaattgagtttcagaataaaattaggaacagtaaaatccaaagaactatgtaaacaaaaaagcttttgttttgcttacaaagtatatttaaggattattctgctgaagattcagtttaagagttttccttgggagaactaagtaagaaacacaatgccaacagctggccagtaattagtgttgtgcacttcatgtcattaatcaatttctcaatagttcttaaaattagtgagattaaaaatctaaaaattttgcatttcatgctatcagaaacagtattttcttcccaaatcaaaataaaaga

SEQ ID NO: 30154 - DNA, 1298 bp, Homo sapiens
  source 1..1298: mol_type = unassigned DNA
gaaagaggcaagttcctggtgcaaaggtggctctgcagcataatttaggcattggaggagctgtggttgtaacactctacaagatgggttttccggaagccgccagttcttttagaactcatcaaattgaagctgttccaaccagctctgcaagtgatggatttaaggcaaatcttgtttttaaggagattgagaagaaacttgaagagataagaaggctgactgcacaatcacaatggctgactcagacttcctggctttaatgactggtaaaatgaatcctcagtcggccttctttcaaggcaaattgaaaatcactggcaacatgggtctcgctatgaagttacaaaatcttcagcttcagccaggcaacgctaagctctgaagaactccctttggctacttttgaaaatcaagatgagatatatagatatatatccatacattttattgtcagaatttagactgaaactacacattggcaaatagcgtgggatagatttgtttcttaatgggtgtgaccaatcctgtttttcctatgctctgggtgaatagagcctgatggtatactactgctttgcggaattgcatacaactgtgcattacaaagttaatatggtaattatggtctggggtaaaattgagtttcagaataaaattaggaacagtaaaatccaaagaactatgtaaacaaaaaagcttttgttttgcttacaaagtatatttaaggattattctgctgaagattcagtttaagagttttccttgggagaactaagtaagaaacacaatgccaacagctggccagtaattagtgttgtgcacttcatgtcattaatcaatttctcaatagttcttaaaattagtgagattaaaaatctaaaaattttgcatttcatgctatcagaaacagtattttcttcccaaatcaaaataaaagaaatatgatcagagcttgaacacaggcttatttttaaaataaaaatatttttaacatgggtttccttattgaaaaatcagtgtattagtcataaaacaccatcattaagaataattgaacaataaagtttgctttcagatgcagttttcaaattataatctcatttcaatttataacgttctcagtcctttgttataattttcctttttcatgtaagtttaattatctgcatttatcttttttcctagtttttctaatactaatgttatttcttaaaattcagtgagatataggataaaataatgctttgagaagaatgtttaatagaaaattaaaataactttttctggcctctctt

SEQ ID NO: 30155 - DNA, 938 bp, Homo sapiens
  source 1..938: mol_type = unassigned DNA
ggggaagccggaaagaggcaagttcctggtgcaaaggtggctctgcagcataatttaggcattggaggagctgtggttgtaacactctacaagatgggttttccggaagccgccagaactcatcaaattgaagctgttccaaccagctctgcaagtgatggatttaaggcaaatcttgtttttaaggagattgagaagaaacttgaagaggaaggggaacagtttgtgaagaaaatcggtggtatttttgccttcaaggtgaaagatggccctgggggtaaagaggccacctgggtggtggatgtgaagaatggcaaaggatcagtgcttcctaactcagataagaaggctgactgcacaatcacaatggctgactcagacttcctggctttaatgactggtaaaatgaatcctcagtcggccttctttcaaggcaaattgaaaatcactggcaacatgggtctcgctatgaagttacaaaatcttcagcttcagccaggcaacgctaagctctgaagaactccctttggctacttttgaaaatcaagatgagatatatagatatatatccatacattttattgtcagaatttagactgaaactacacattggcaaatagcgtgggatagatttgtttcttaatgggtgtgaccaatcctgtttttcctatgctctgggtgaatagagcctgatggtatactactgctttgcggaattgcatacaactgtgcattacaaagttaatatggtaattatggtctggggtaaaattgagtttcagaataaaattaggaacagtaaaatccaaagaactatgtaaacaaaaaagcttttgttttgcttacaaagtatatttaaggattattctgctgaagattcagtttaagagttttccttgggagaactaagtaagaaacacaatgccaacagctggcca

SEQ ID NO: 30156 - DNA, 894 bp, Homo sapiens
  source 1..894: mol_type = unassigned DNA
ctctgcagcataatttaggcattggaggagctgtggttgtaacactctacaagatgggttttccggaagccgccagttcttttagaactcatcaaattgaagctgttccaaccagctctgcaagtgatggatttaaggcaaatcttgtttttaaggagattgagaagaaacttgaagaggaaggggaacagtttgtgaagaaaatcggtggtatttttgccttcaaggtgaaagatggccctgggggtaaagaggccacctgggtggtggatgtgaagaatggcaaaggatcagtgcttcctaactcagataagaaggctgactgcacaatcacaatggctgactcagacttcctggctttaatgactggtaaaatgaatcctcagtcggccttctttcaaggcaaattgaaaatcactggcaacatgggtctcgctatgaagttacaaaatcttcagcttcagccaggcaacgctaagctctgaagaactccctttggctacttttgaaaatcaagatgagatatatagatatatatccatacattttattgtcagaatttagactgaaactacacattggcaaatagcgtgggatagatttgtttcttaatgggtgtgaccaatcctgtttttcctatgctctgggtgaatagagcctgatggtatactactgctttgcggaattgcatacaactgtgcattacaaagttaatatggtaattatggtctggggtaaaattgagtttcagaataaaattaggaacagtaaaatccaaagaactatgtaaacaaaaaagcttttgttttgcttacaaagtatatttaaggattattctgctgaagattcagtttaagagttttccttgggagaactaagtaagaaacacaatgc

SEQ ID NO: 30157 - DNA, 3926 bp, Homo sapiens
  source 1..3926: mol_type = unassigned DNA
agcataatttaggcattggaggagctgtggttgtaacactctacaagatgggttttccggaagccgccagttcttttagaactcatcaaattgaagctgttccaaccagctctgcaagtgatggatttaaggcaaatcttgtttttaaggagattgagaagaaacttgaagagataagaaggctgactgcacaatcacaatggctgactcagacttcctggctttaatgactggtaaaatgaatcctcagtcggtaagtatgatggagcttatatcctgctagtaggtaggtctttcagccctttctactccatctcctgactcagactctaaagtgcaaagtggtcagactcacaaaactcagtgttccccaaacagttgacagacgtctgtggagcaagctgtgtgccacacactgtcttgtgtgctggaagtgcccagaagagtaagaaagttcccacgctcagggcatccacagatgtgtaaaagagtcagtgcagccagagatccaaggtgccacacctggcttgtggtcaggggaggatgaaggcaggagcagccatatctctctgggccatcagggagagcaccacagaggaagcagctcttgagcttagtacccaggcggaaagtaggagtgttccaggaggagggaggggtggcatgaacaaaggcctgaccttttacattccatttatttgcccatgctcttctttttgcctgacctgtccttacctgacaaatgacttgtctttcaaaattagctcagatattatctccaaggacctctttccaagttgctggggagctgtaaccagtccctctcctgagccacgtactggactgccagcttagtgcctgttgtgttatgttagtcataatatgcctctctctcttccctgttaggctgtgagtgtctcaaagcatcaaagcacatcttatttgtctttatgtttccagaatttagcacagtatctgatgtttttaggtattctgtaaacaactgttggactaaattgcatttgtctaaagtgtgtttatgccttgtatagattttcctagtccccaaattgtcaagggtcctcttaggctcttcagctgcagtgttgaatggacttgatatagtgagctttctgtcaacttgatatatactgagctttccattaataaaaaagaaactaagacgtttctttccaatgtaacttaattttttctgttgtctcagtctggtttgttttaggttttattcctgtggttctctggtaatttccaagattggataaaacaactaaatctcactcccacttgcttttttaaaatgctttttctacgtaaccaagcacattttagttgatgccatgacaagtgagaaatttgcatctgtgatgtttcagctgaatacacaccattggcactgacatttccactgagcctgctccagaaatctggacagaacagaggccaccagtataggagctggctgtcatcctccttcccacccactgcacatgccatgcacagctttggcaggctgttcagacttcacacatcagctgccttcattctctcaatttatctttgtactgcccattttgggggcaaggtgtcagcttattttccttcagcacctgttaacacccaaaggaattaaagataaaaatagcagacctttctattaatgtgctaatggacttcccttatgctcagaggatttccagaggatttgactggaaatcgttaaatgcagtggaaattctaatttcagtgtttggctccagcagcaagcgtacatgaagaacacctaggggccagattaaaatcatctttatgtatggactctctgaagggtgaagattcatgttttctctattgttagtaaataaaaagtgattttctttgttaacttacaaaggagaaaggtggcgagtttctcctgtactactggtccgtatttttaaatgatgtttgttcaatatattgtgttctgagacacctgacctttaaggcatcagacagaaggctttgtgccatatagaaaggaaatatttagtttgtccagacagaggaaggggaaaaaaaggaattagtcacccttaccaggaggtacagaaaaaaacagagctccttacattcccatggatgatgtagaagagctcctagcttcttaatgtactgttaaaaacctaggactaccagaagctttttttttaaatctagcccttccttattttaagcattcagttaaaatactgagatcatggcagggaaattatgctacgttcccaattttgctgtttctcttaagttttcctgggattttgttacatggtaaatttagcaaacatcatgtgatctaatcccaggcagttgttaaatggaacaaattgtggctctgcacttcagattggtttgatttttcttgttgagccaaagagtaacacaagcacctcattctcagcaggctctgtgccctctgtagggataagtcctttatcattggtggcatttcattcacatgcatgttggattgaatcccaagagtttctgtgttttttgtgtatgctttttctctcagcagcctgctaaaaatttcagttcatatttcccacctacatggaatgttttaaaacataatcagtgtagtatgaacccactttgaggaggacaggtgaaaacaggctcaatttctatgagaaatttgggaaagctgctcctttctgctgatctgcaaaaagtgtggcctttacaaattcttccttttgaagaatgtggttccaaatctattccagaaagccaagtttcatattttagagaaagtcatgtgacctggataaataaatgatctcagggctagatagtgtagaaacatcagcaatcttaaaacaaaaaaacaccaagtaatgaattttctttcttcttcacaggccttctttcaaggcaaattgaaaatcactggcaacatgggtctcgctatgaagttacaaaatcttcagcttcagccaggcaacgctaagctctgaagaactccctttggctacttttgaaaatcaagatgagatatatagatatatatccatacattttattgtcagaatttagactgaaactacacattggcaaatagcgtgggatagatttgtttcttaatgggtgtgaccaatcctgtttttcctatgctctgggtgaatagagcctgatggtatactactgctttgcggaattgcatacaactgtgcattacaaagttaatatggtaattatggtctggggtaaaattgagtttcagaataaaattaggaacagtaaaatccaaagaactatgtaaacaaaaaagcttttgttttgcttacaaagtatatttaaggattattctgctgaagattcagtttaagagttttccttgggagaactaagtaagaaacacaatgccaacagctggccagtaattagtgttgtgcacttcatgtcattaatcaatttctcaatagttcttaaaattagtgagattaaaaatctaaaaattttgcatttcatgctatcagaaacagtattttcttcccaaatcaaaataaaagaaatatgatcagagcttgaacacaggcttatttttaaaataaaaatatttttaacatgggtttccttattgaaaaatcagtgtattagtcataaaacaccatcattaagaataattgaacaataaagtttgctttcagatgcagttttcaaattataatctcatttcaatttataacgttctcagtcctttgttataattttcctttttcatgtaagtttaattatctgcatttatcttttttcctagtttttctaatactaatgttatttcttaaaattcagtgagatataggataaaataatgctttgagaagaatgtttaatagaaaattaaaataactttttctggc

SEQ ID NO: 30158 - DNA, 1896 bp, Homo sapiens
  source 1..1896: mol_type = unassigned DNA
gttgccgcccgcggccctggcttcgggcttcagggagctctggtgcagtctccgcctgtcagtgccggcagtcgtccgcggcgcccgccccggtcccgcactggtgcagccatgtcctcttccccgtgggagcctgcgaccctgcgccgggtgttcgtggtgggggttggcatgaccaaggcaagaaggctttagctgatgcacagatcccttattcagcagtggaccaggcatgtgttggctatgtttttggtgactctacctgtgggcagagggctatctatcacagtttgggaatgactggaattcctataatcaatgtcaacaataactgtgctactggttctactgctttgtttatggcccgccagctgattcagggtggtgtggcagaatgtgtcttggctcttgggtttgagaagatgagtaagggaagccttggaataaaattttcagatagaaccattcccactgataagcatgttgacctcctgatcaataagtatggattgtctgctcacccagttgctcctcagatgtttgggtatgctggaaaagaacatatggaaaaatatggaacaaaaattgaacactttgcaaaaattggatggaaaaatcataaacattcagttaataacccgtattcccagttccaagatgaatacagtttagatgaagtgatggcatctaaagaagtttttgattttttgactatcttacaatgttgtcccacttcagatggtgctgcagcagcaattttggccagtgaagcatttgtacagaagtatggcctgcaatccaaagctgtggaaattttggcacaagaaatgatgactgatttgccaagctcgtttgaagaaaaaagcattattaaaatggttggctttgatatgagtaaagaagctgcaagaaaatgctatgagaaatctggcctgacaccaaatgatattgacgtaatagaacttcacgattgcttttctaccaacgaactccttacttatgaagcactgggactctgtccagaaggacaaggtgcaacgctggttgatagaggagataatacatatggaggaaagtgggtcataaatcctagtggtggactgatttcaaagggacacccactaggcgctacaggtcttgctcagtgtgcagaactctgctggcagctgagaggggaagccggaaagaggcaagttcctggtgcaaaggtggctctgcagcataatttaggcattggaggagctgtggttgtaacactctacaagatgggttttccggaagccgccagttcttttagaactcatcaaattgaagctgttccaaccagctctgcaagtgatggatttaaggcaaatcttgtttttaaggagattgagaagaaacttgaagaggaaggggaacagtttgtgaagaaaatcggtggtatttttgccttcaaggtgaaagatggccctgggggtaaagaggccacctgggtggtggatgtgaagaatggcaaaggatcagtgcttcctaactcagataagaaggctgactgcacaatcacaatggctgactcagacttcctggctttaatgactggtaaaatgaatcctcagtcggccttctttcaaggcaaattgaaaatcactggcaacatgggtctcgctatgaagttacaaaatcttcagcttcagccaggcaacgctaagctctgaagaactccctttggctacttttgaaaatcaagatgagatatatagatatatatccatacattttattgtcagaatttagactgaaactacacattggcaaatagcgtgggatagatttgtttcttaatgggtgtgaccaatcctgtttttcctatgctctgggtgaatagagcctgatggtatactactgctttgcgga

SEQ ID NO: 30159 - DNA, 1889 bp, Homo sapiens
  source 1..1889: mol_type = unassigned DNA
gttgccgcccgcggccctggcttcgggcttcagggagctctggtgcagtctccgcctgtcagtgccggcagtcgtccgcggcgcccgccccggtcccgcactggtgcagccatgtcctcttccccgtgggagcctgcgaccctgcgccgggtgttcgtggtgggggttggcatgaccaagtttgtgaagcctggagctgagaattcaagagactaccctgacttggcagaagaagcaggcaagaaggctttagctgatgcacagatcccttattcagcagtggaccaggcatgtgttggctatgtttttggtgtggcagaatgtgtcttggctcttgggtttgagaagatgagtaagggaagccttggaataaaattttcagatagaaccattcccactgataagcatgttgacctcctgatcaataagtatggattgtctgctcacccagttgctcctcagatgtttgggtatgctggaaaagaacatatggaaaaatatggaacaaaaattgaacactttgcaaaaattggatggaaaaatcataaacattcagttaataacccgtattcccagttccaagatgaatacagtttagatgaagtgatggcatctaaagaagtttttgattttttgactatcttacaatgttgtcccacttcagatggtgctgcagcagcaattttggccagtgaagcatttgtacagaagtatggcctgcaatccaaagctgtggaaattttggcacaagaaatgatgactgatttgccaagctcgtttgaagaaaaaagcattattaaaatggttggctttgatatgagtaaagaagctgcaagaaaatgctatgagaaatctggcctgacaccaaatgatattgacgtaatagaacttcacgattgcttttctaccaacgaactccttacttatgaagcactgggactctgtccagaaggacaaggtgcaacgctggttgatagaggagataatacatatggaggaaagtgggtcataaatcctagtggtggactgatttcaaagggacacccactaggcgctacaggtcttgctcagtgtgcagaactctgctggcagctgagaggggaagccggaaagaggcaagttcctggtgcaaaggtggctctgcagcataatttaggcattggaggagctgtggttgtaacactctacaagatgggttttccggaagccgccagttcttttagaactcatcaaattgaagctgttccaaccagctctgcaagtgatggatttaaggcaaatcttgtttttaaggagattgagaagaaacttgaagaggaaggggaacagtttgtgaagaaaatcggtggtatttttgccttcaaggtgaaagatggccctgggggtaaagaggccacctgggtggtggatgtgaagaatggcaaaggatcagtgcttcctaactcagataagaaggctgactgcacaatcacaatggctgactcagacttcctggctttaatgactggtaaaatgaatcctcagtcggccttctttcaaggcaaattgaaaatcactggcaacatgggtctcgctatgaagttacaaaatcttcagcttcagccaggcaacgctaagctctgaagaactccctttggctacttttgaaaatcaagatgagatatatagatatatatccatacattttattgtcagaatttagactgaaactacacattggcaaatagcgtgggatagatttgtttcttaatgggtgtgaccaatcctgtttttcctatgctctgggtgaatagagcctgatggtatactactgctttgcggaattgcatacaactgtgcattacaaagttaatatggtaattatggtctggggtaaaattgagtttcag

SEQ ID NO: 30160 - DNA, 6835 bp, Homo sapiens
  source 1..6835: mol_type = unassigned DNA
agcttagcaggcgacgttgcgggccctgggcgccaggagagcttcccggagtcgaccttcctgctggctgctctgtgaccgcttcccggctctgccctcttggccgaagtgcccgctgccgggcgcgggcctcagacaatacaatggtgggtgaagagaagatgtctctaagaaaccggctgtcaaagtccagggaaaatcctgaggaagatgaagaccagagaaaccctgcaaaggagtccctagagacacctagtaatggtcgaattgacataaaacagttgatagcaaagaagataaagttgacagcagaggcagaggaattgaagccattttttatgaaggaagttggcagtcactttgatgattttgtgaccaatctcattgaaaagtcagcatcattagataatggtgggtgcgctctcacaaccttttctgttcttgaaggagagaaaaacaaccatagagcgaaggatttgagagcacctccagaacaaggaaagatttttattgcaaggcgctctctcttagatgaactgcttgaagtggaccacatcagaacaatatatcacatgtttattgccctcctcattctctttatcctcagcacacttgtagtagattacattgatgaaggaaggctggtgcttgagttcagcctcctgtcttatgcttttggcaaatttcctaccgttgtttggacctggtggatcatgttcctgtctacattttcagttccctattttctgtttcaacattgggccactggctatagcaagagttctcatccgctgatccgttctctcttccatggctttcttttcatgatcttccagattggagttctaggttttggaccaacatatgttgtgttagcatatacactgccaccagcttcccggttcatcattatattcgagcagattcgttttgtaatgaaggcccactcatttgtcagagagaacgtgcctcgggtactaaattcagctaaggagaaatcaagcactgttccaatacctacagtcaaccagtatttgtacttcttatttgctcctacccttatctaccgtgacagctatcccaggaatcccactgtaagatggggttatgtcgctatgaagtttgcacaggtctttggttgctttttctatgtgtactacatctttgaaaggctttgtgcccccttgtttcggaatatcaaacaggagcccttcagcgctcgtgttctggtcctatgtgtatttaactccatcttgccaggtgtgctgattctcttccttactttttttgcctttttgcactgctggctcaatgcctttgctgagatgttacgctttggtgacaggatgttctataaggattggtggaactccacgtcatactccaactattatagaacctggaatgtggtggtccatgactggctatattactatgcttacaaggactttctctggtttttctccaagagattcaaatctgctgccatgttagctgtctttgctgtatctgctgtagtacacgaatatgccttggctgtttgcttgagctttttctatcccgtgctcttcgtgctcttcatgttctttggaatggctttcaacttcattgtcaatgatagtcggaaaaagccgatttggaatgttctgatgtggacttctcttttcttgggcaatggagtcttactctgcttttattctcaagaatggtatgcacgtcagcactgtcctctgaaaaatcccacatttttggattatgtccggccacgttcctggacttgtcgttacgtgttttagaagcttggactttgtttcctccttgtcactgaagattgggtagctccctgatttggagccagctgtttccagttgttactgaagttatctgtgttatttggaccactccaggctttacagatgactcactccattcctaggtcacttgaagccaaactgttggaagttcactggagtcttgtacacttaagcagagcagaactttttttgtggggctgggtggggggagaagaccgactaacagctgaagtaatgacagattgttgctgggtcatatcagctttatcccttggtaattatatctgttttgtttcttgactctgtccaatcagagaataaacatcatagtttcttggccactgaattagccaaaacacttaggaagaaatcacttaaatacctctggcttagaaattttttcatgcacactgttggaatgtatgctaattgaacatgcaattggggaagaaaaaatgtagaatgatttttgctatttctagtagaaagaaaatgtctgttttccaaagataatgttatacatcctattttgtaatttttttgaaaaaagttcaatgttcagttttccttagtttttaccttgttttctctataggtcatgatttctgtgaagcaaaaagatgccttttaccatgaattcttgagtttacatcaataatattgtatattaaggggatcagaagtaggaaggaaaaaataagagatagcagaggaaaaagaaaaacatttcctcttataacttctgaagtaatttgtaaaaaagatttgtagagtcaatcatgtgtttaaattattttatcacaaacttaacatggaagatattcctttttaactttgtggtaacttctttgaagttatttagaaatatcctttggaacaattattttattgtctaataaatattgacttctcttgaattattttgcagactagtgagtctgtaccataagtattaatcacctccactcatattaaagtgatcattaagaatccagaagctggcttctgcatttgctcagttatacttttaatggtagtatgtttttaggtggaataaattaatatgtgattggtttcaaggaaatgtactctattatgtaatacttccattttataagatgcccatttctaatacaatgtgtgtaggaattatttgtatgtatgaggtatgattgtaaagattgagcattggaaggggtatcagagaccatgtagttcaactttccactcaaagtaagatttatgaattatttaaatgatagttgttacttggaacagccacttgagaggctctcttggtattgtttggaattgttttaaagtcagtttgagtctcacaagaaggtaagtagagtttcttaatagtcacaacttaatttgaaccacaagtatccagcttaatcacgtatcttactcacgataccactggtccagatgagtttaggtaattttcaaacattaaatccaacttcaacggaaacaaatacactcaagggaagttatttttaaaaaggtactctgcatgttcccgcagtaatgttctgcacaacagtattgtaattgtaatggaatcataacctgctaactagtttgctttaatatggcttgtaattcttgacatttttcttaaaattaaaacgaatttttattttgaatttataactgcattttaaatatattggggacagattgcgctgagacctggttatgagcaagccaatcttttgaatctagagaatggaattcttaggtttatatttctgttaagaaatactataaatatgactcttatgagaagactttgttgctctgtagtgtttctgaatactgtatttgttggattgatcaaggctatttttcaaaaagctctctgcttcctgtttgtttgtttgtttgtttttgagacagagtcttgctctgtcgccggggctggagtgcaatggcgtgaactcagctcactgcaacctctgcctccctggttcaagctattctcctgcctcagcctcctgagtagctgggattacagggccacgcctggctaatttttgtatttttagtagagatggggtttcaccctgttggtcaggctggtctcaaactcctgaccttgtgatctgcccacctcagcctcccaaagtgctgggaagacaggcgttagccaccgtgcccggcctctgtttcctgttattagtgattttcctgcccaagattgcaacaacaaatatgtagaactacagactgtttagaatgctgagactgttctaagaaactttcaaaaacagtagcacttcaaggaatggtcactttctatgaaagaaactggtttgatagccataatcttattgctagctgcttttagcaaaagtcttttcttgaaaccaccacctatactctttaaacaaataaaaactaaaatctcttgctaatgtttcaggaagatttattttttctattttgctattgtggcgaaaattattttcagttataggatacttttttccttctgaaaagtaataagcttaaagtttttgtttctgtaagatgtaatgatagtaactattattttgggcatattaaccaacagaacaattatgtagtatgtatatcactttctcattagatctctaacttgaccttctagtacctttatgtgtgaggataaatttgttagatccttttattctcaatcttggataatgatgcaaaatggaattttgttttgtttgttggtagattcacatactaaaactttgcaggtaaagttgcttgcctcatgttagaatttaattagaaaactgaggctgcctttttttttttttttttttttttttaagacagagtcttgttctgtcgcccaggccagttttttttttcttgtacagatggggttttaccatgttgctcaggctggtctcaaactcctggagtcaagggatctatttgcctcagcctctcaaagtgctgggattacaggtgtgagccacggctcctggctccttgctccagaatcagttttttaatggaagatagctcatactttgtttttgtttttaaagagacagggtctcactctgttgcccaggctggtagtagcgtgatcatagctcactgcagtctcaaactcctggactcaaatagtgctctggagtacctagaactacaagtgcctaccaccacacccagctaatttatttgtttttttttttttagagatggggggggtctccctatgttgcccaggctggtctcaaactcttcacctcaagcaaaactcccactgcagaaagctttgggattacaggcatgagccaccatgccaagcccatacttattgttaataaagtttcagtgacttgcttactaatcttatgcaaaatttcatgtaatttatgtaatactacataacaatgctacatatggtatgtatacatacactgtatacacacaaaggtctgttctgggtattttatgtatcttatctctaggctttatggctctgaaatggagggaactggacataaatgtttcaaggaataaagtgaatgttttgtttgtttgtttgttttgagacggagtctcagtcaccaggctggagtgcagtgctgtgatctcagctcactgcaacctctgcctcctgggttcaagcgattctcctgcctcagcctcccgagtagctggcattacaggtgcctgccaccatgtccagctaatttttgtgtttttagtagagatggggtttcaccatgatggtcaggctggtctcgaactcctgacctcatgatccgccagcctcagcctcccatagtgctgggattataggcatgagccatgctcccggccaaagtgaatgttttgggtgaagtttatataaggatttgacttttgtatcattattaaagtttctgtcaggtaatacagtgttggccctctgttgaaataaaatgttacatatcgctgggtgtagtggctcatgcctttaatcccagtactttgggaggccaaggcaggaggattgcttgagctcagaagtttgagaccagcctgggcaacatagcaaaaccttgtcactataaaaaatacaaaaattagccaggcgtggtggtgcacgcctgtagtctcagctactcagtcggctgaggtgggaagatggcttcaagccgggagatggaggcttcagtgacctgtgacctgtgatcacaccacttaattcctcaaaacatttatgtcccagttccctccatttcagagccatgggcaacagagcgagaccctgtctcaaaaaaaaaattacatataagcccggtttaaagagaggataatatgcaaccaccctagttgaaacagagtgtatcacttctttctcaccctaaatttaatgcctagtttgaaaatcagtagacaataataaagttgataagctttaggttggtaggaaagctatgtaatctatatagtgtactaaatccttatatgtttttggtaaaaaaagactttaatagctaatttggacttcagaaaatgggttaatttcacgagtgcatatcacttttgactatattagtcaagcatattattaaagtttaaaaaactctaaaacttctgtactgtttttttcttaagtgctctcttccttatttctacattactacattcacatttctgctgtcaataagccctaatggagtgataaactttaagctagtagatactgcaccatgtcttgtggtggtgttttcttaatgaaatggaagctgtacttcctgtttgtttttaaatacttttgaaacagacagttcatgtaccccatcatttagagatgcagtttgaatttccatggaaaaaggtgccaattttggattgggaaaggagctgaagccccagtcaagactttgccatttggggtaatgcagcagattcctgtgtctgtatctttccagtgtgtgtgttaatccatagtgttctgagcaccagaagggtcatgtaaatctgaagttgttattaaaggtttttctatagtgaaa

SEQ ID NO: 30161 - DNA, 870 bp, Homo sapiens
  source 1..870: mol_type = unassigned DNA
gtattagcaagacatgaaaatctgtaggggcaccagaacctttaatcaagctcatgttttattgtaaaatattaggatgtagacaatacaatggtgggtgaagagaagatgtctctaagaaaccggctgtcaaagtccagggaaaatcctgaggaagatgaagaccagagaaaccctgcaaaggagtccctagagacacctagtaatggtcgaattgacataaaacagttgatagcaaagaagataaagttgacagcagaggcagaggaattgaagccattttttatgaaggaagttggcagtcactttgatgattttgtgaccaatctcattgaaaagtcagcatcattagataatggtgggtgcgctctcacaaccttttctgttcttgaaggagagaaaaacaaccatagagcgaaggatttgagagcacctccagaacaaggaaagatttttattgcaaggcgctctctcttagatgaactgcttgaagtggaccacatcagaacaatatatcacatgtttattgccctcctcattctctttatcctcagcacacttgtagtagattacattgatgaaggaaggctggtgcttgagttcagcctcctgtcttatgcttttggcaaatttcctaccgttgtttggacctggtggatcatgttcctgtctacattttcagttccctattttctgtttcaacattgggccactggctatagcaagagttctcatccgctgatccgttctctcttccatggctttcttttcatgatcttccagattggagttctaggttttggaccaacatatgttgtgttagcatatacactgccaccagcttcccggttcatcattatattcgagcag

SEQ ID NO: 30162 - DNA, 1941 bp, Homo sapiens
  source 1..1941: mol_type = unassigned DNA
gctttagcttagcaggcgacgttgcgggccctgggcgccaggagagcttcccggagtcgaccttcctgctggctgctctgtgaccgcttcccggctctgccctcttggccgaagtgcccgctgccgggcgcgggcctcaggaattgaagccattttttatgaaggaagttggcagtcactttgatgattttgtgaccaatctcattgaaaagtcagcatcattagataatggtgggtgcgctctcacaaccttttctgttcttgaaggagagaaaaacaaccatagagcgaaggatttgagagcacctccagaacaaggaaagatttttattgcaaggcgctctctcttagatgaactgcttgaagtggaccacatcagaacaatatatcacatgtttattgccctcctcattctctttatcctcagcacacttgtagtagattacattgatgaaggaaggctggtgcttgagttcagcctcctgtcttatgcttttggcaaatttcctaccgttgtttggacctggtggatcatgttcctgtctacattttcagttccctattttctgtttcaacattgggccactggctatagcaagagttctcatccgctgatccgttctctcttccatggctttcttttcatgatcttccagattggagttctaggttttggaccaacatatgttgtgttagcatatacactgccaccagcttcccggttcatcattatattcgagcaggattttctgactttactggctatctataatgcatttgactaatggaaaggacacttgcaggagactttctttgaagagacatctttttcctcctgcttttgtagattcgttttgtaatgaaggcccactcatttgtcagagagaacgtgcctcgggtactaaattcagctaaggagaaatcaagcactgttccaatacctacagtcaaccagtatttgtacttcttatttgctcctacccttatctaccgtgacagctatcccaggaatcccactgtaagatggggttatgtcgctatgaagtttgcacaggtctttggttgctttttctatgtgtactacatctttgaaaggctttgtgcccccttgtttcggaatatcaaacaggagcccttcagcgctcgtgttctggtcctatgtgtatttaactccatcttgccaggtgtgctgattctcttccttactttttttgcctttttgcactgctggctcaatgcctttgctgagatgttacgctttggtgacaggatgttctataaggattggtggaactccacgtcatactccaactattatagaacctggaatgtggtggtccatgactggctatattactatgcttacaaggactttctctggtttttctccaagagattcaaatctgctgccatgttagctgtctttgctgtatctgctgtagtacacgaatatgccttggctgtttgcttgagctttttctatcccgtgctcttcgtgctcttcatgttctttggaatggctttcaacttcattgtcaatgatagtcggaaaaagccgatttggaatgttctgatgtggacttctcttttcttgggcaatggagtcttactctgcttttattctcaagaatggtatgcacgtcagcactgtcctctgaaaaatcccacatttttggattatgtccggccacgttcctggacttgtcgttacgtgttttagaagcttggactttgtttcctccttgtcactgaagattgggtagctccctgatttggagccagctgtttccagttgttactgaagttatctgtgttatttggaccactccaggctttacagatgactcactccattcctaggtcacttgaagccaaactgttggaagttcactggagtcttgtacacttaagcagagcagaactttttttgtggggctgggt

SEQ ID NO: 30163 - DNA, 1848 bp, Homo sapiens
  source 1..1848: mol_type = unassigned DNA
gtccggcgctttagcttagcaggcgacgttgcgggccctgggcgccaggagagcttcccggagtcgaccttcctgctggctgctctgtgaccgcttcccggctctgccctcttggccgaagtgcccgctgccgggcgcgggcctcaggtcgaattgacataaaacagttgatagcaaagaagataaagttgacagcagaggcagaggaattgaagccattttttatgaaggaagttggcagtcactttgatgattttgtgaccaatctcattgaaaagtcagcatcattagataatggtgggtgcgctctcacaaccttttctgttcttgaaggagagaaaaacaaccatagagcgaaggatttgagagcacctccagaacaaggaaagatttttattgcaaggcgctctctcttagatgaactgcttgaagtggaccacatcagaacaatatatcacatgtttattgccctcctcattctctttatcctcagcacacttgtagtagattacattgatgaaggaaggctggtgcttgagttcagcctcctgtcttatgcttttggcaaatttcctaccgttgtttggacctggtggatcatgttcctgtctacattttcagttccctattttctgtttcaacattgggccactggctatagcaagagttctcatccgctgatccgttctctcttccatggctttcttttcatgatcttccagattggagttctaggttttggaccaacatatgttgtgttagcatatacactgccaccagcttcccggttcatcattatattcgagcagattcgttttgtaatgaaggcccactcatttgtcagagagaacgtgcctcgggtactaaattcagctaaggagaaatcaagcactgttccaatacctacagtcaaccagtatttgtacttcttatttgctcctacccttatctaccgtgacagctatcccaggaatcccactgtaagatggggttatgtcgctatgaagtttgcacaggtctttggttgctttttctatgtgtactacatctttgaaaggctttgtgcccccttgtttcggaatatcaaacaggagcccttcagcgctcgtgttctggtcctatgtgtatttaactccatcttgccaggtgtgctgattctcttccttactttttttgcctttttgcactgctggctcaatgcctttgctgagatgttacgctttggtgacaggatgttctataaggattggtggaactccacgtcatactccaactattatagaacctggaatgtggtggtccatgactggctatattactatgcttacaaggactttctctggtttttctccaagagattcaaatctgctgccatgttagctgtctttgctgtatctgctgtagtacacgaatatgccttggctgtttgcttgagctttttctatcccgtgctcttcgtgctcttcatgttctttggaatggctttcaacttcattgtcaatgatagtcggaaaaagccgatttggaatgttctgatgtggacttctcttttcttgggcaatggagtcttactctgcttttattctcaagaatggtatgcacgtcagcactgtcctctgaaaaatcccacatttttggattatgtccggccacgttcctggacttgtcgttacgtgttttagaagcttggactttgtttcctccttgtcactgaagattgggtagctccctgatttggagccagctgtttccagttgttactgaagttatctgtgttatttggaccactccaggctttacagatgactcactccattcctaggtcacttgaagccaaactgttggaag

SEQ ID NO: 30164 - DNA, 2104 bp, Homo sapiens
  source 1..2104: mol_type = unassigned DNA
gctttagcttagcaggcgacgttgcgggccctgggcgccaggagagcttcccggagtcgaccttcctgctggctgctctgtgaccgcttcccggctctgccctcttggccgaagtgcccgctgccgggcgcgggcctcagacaatacaatggtgggtgaagagaagatgtctctaagaaaccggctgtcaaagtccagggaaaatcctgaggaagatgaagaccagagaaaccctgcaaaggagtccctagagacacctagtaatggaattgaagccattttttatgaaggaagttggcagtcactttgatgattttgtgaccaatctcattgaaaagtcagcatcattagataatggtgggtgcgctctcacaaccttttctgttcttgaaggagagaaaaacaaccatagagcgaaggatttgagagcacctccagaacaaggaaagatttttattgcaaggcgctctctcttagatgaactgcttgaagtggaccacatcagaacaatatatcacatgtttattgccctcctcattctctttatcctcagcacacttgtagtagattacattgatgaaggaaggctggtgcttgagttcagcctcctgtcttatgcttttggcaaatttcctaccgttgtttggacctggtggatcatgttcctgtctacattttcagttccctattttctgtttcaacattgggccactggctatagcaagagttctcatccgctgatccgttctctcttccatggctttcttttcatgatcttccagattggagttctaggttttggaccaacatatgttgtgttagcatatacactgccaccagcttcccggttcatcattatattcgagcagattcgttttgtaatgaaggcccactcatttgtcagagagaacgtgcctcgggtactaaattcagctaaggagaaatcaagcactgttccaatacctacagtcaaccagtatttgtacttcttatttgctcctacccttatctaccgtgacagctatcccaggaatcccactgtaagatggggttatgtcgctatgaagtttgcacaggtctttggttgctttttctatgtgtactacatctttgaaaggctttgtgcccccttgtttcggaatatcaaacaggagcccttcagcgctcgtgttctggtcctatgtgtatttaactccatcttgccaggtgtgctgattctcttccttactttttttgcctttttgcactgctggctcaatgcctttgctgagatgttacgctttggtgacaggatgttctataaggattggtggaactccacgtcatactccaactattatagaacctggaatgtggtggtccatgactggctatattactatgcttacaaggactttctctggtttttctccaagagattcaaatctgctgccatgttagctgtctttgctgtatctgctgtagtacacgaatatgccttggctgtttgcttgagctttttctatcccgtgctcttcgtgctcttcatgttctttggaatggctttcaacttcattgtcaatgatagtcggaaaaagccgatttggaatgttctgatgtggacttctcttttcttgggcaatggagtcttactctgcttttattctcaagaatggtatgcacgtcagcactgtcctctgaaaaatcccacatttttggattatgtccggccacgttcctggacttgtcgttacgtgttttagaagcttggactttgtttcctccttgtcactgaagattgggtagctccctgatttggagccagctgtttccagttgttactgaagttatctgtgttatttggaccactccaggctttacagatgactcactccattcctaggtcacttgaagccaaactgttggaagttcactggagtcttgtacacttaagcagagcagaactttttttgtggggctgggtggggggagaagaccgactaacagctgaagtaatgacagattgttgctgggtcatatcagctttatcccttggtaattatatctgttttgtttcttgactctgtccaatcagagaataaacatcatagtttcttggccactg

SEQ ID NO: 30165 - DNA, 2044 bp, Homo sapiens
  source 1..2044: mol_type = unassigned DNA
actgcgaaggaaggaggcaacacgggcaagggctgcctgctgcccgctggagaccgcaccatggagccaggcggggcccgtctgcgtctgcagaggacagaagggctgggaggggagcgggagcgccaaccctgtggagatggaaacactgagacgcacagagccccggacttggtacaatggacccgacacatggaggctgtgaaggcacaattgctggagcaagcgcagggacaactgagggagctgctggatcgggccatgcgggaggctatacaatcctacccatcacaagacaaacctctgcccccacctcccccaggttccttgagcaggacccaggagccatccctggggaaacagaaagttttcatcatccgcaagtccctgcttgatgagctgatggaggtgcagcatttccgcaccatctaccacatgttcatcgctggcctgtgtgtcttcatcatcagcaccctggccatcgacttcattgatgagggcaggctgctgctggagtttgacctactgatcttcagcttcggacagctgccattggcgctggtgacctgggtgcccatgtttctgtccaccctgttggcgccgtaccaggccctacggctgtgggccaggggcacctggacgcaggcgacgggcctgggctgtgcgctgctagccgcccacgccgtggtgctctgcgcgctgccggtccacgtggccgtggagcatcagctcccgccggcctcccgttgtgtcctggtcttcgagcaggttaggttcctgatgaaaagctactccttcctgagagaggctgtgcctgggacccttcgtgccagacgaggtgaggggatccaggcccccagtttctccagctacctctacttcctcttctgcccaacactcatctacagggagacttaccctaggacgccctatgtcaggtggaattatgtggccaagaactttgcccaggccctgggatgtgtgctctatgcctgcttcatcctgggccgcctctgtgttcctgtctttgccaacatgagccgagagcccttcagcacccgtgccctggtgctctctatcctgcatgccacgttgccaggcatcttcatgctgctgctcatcttctttgccttcctccattgctggctcaacgcctttgccgagatgctacgatttggagacaggatgttctaccgggactggtggaactcaacgtccttctccaactactaccgcacttggaacgtggtggtccatgactggctgtacagctacgtgtatcaggatgggctgcggctccttggtgcccgggcccgaggggtagccatgctgggtgtgttcctggtctccgcagtggcccatgagtatatcttctgcttcgtcctggggttcttctatcccgtcatgctgatactcttccttgtcattggaggaatgttgaacttcatgatgcatgaccagcgcaccggcccggcatggaacgtgctgatgtggaccatgctgtttctaggccagggaatccaggtcagcctgtactgccaggagtggtacgcacggcggcactgccccttaccccaggcaactttctgggggctggtgacacctcgatcttggtcctgccatacctagaggtcgggacagacgacgctacctgcccagacaccaccaagttctctgcctgcaaaacctgggaccaggactcctgtctgcattcccaaatttggctctgagtcgaggcaacctgcacacaagaccccaccaaggaatgtgcaaggactgagatctgcagacttgtgggtaactgatcacagacctcagcatgggggtgaccagggtgactcttcaatccctatccccatgggctgggtacaggatatcctcctaccccatgactgtcttagggagacttggggtaccttatggatttgatgaatgtgggggaactcagaggaactggggccaccaaggttggaaaagggtttggttcttgactttgtattccttccaatacagcaataaactttgtctccctttttattcattc

SEQ ID NO: 30166 - DNA, 5240 bp, Homo sapiens
  source 1..5240: mol_type = unassigned DNA
ctttctgtgcggcgcccgggcgcaacgcaaacatggcggcgggtggcacccgtcggtgaggcggtgccgggcgggggttgtcgggtgtcatgggcggtggcgacggcaccgcccccgcgtctccctgagcgggacggcagggggggcttctgcgctgagccgggcgatggacgacagcggcgagctgggtggtctggagaccatggagaccctcacggagctgggcgacgagctgaccctgggagacatcgacgagatgctgcaatttgtcagtaatcaagtgggagagttccctgacttgttttcagaacagctgtgtagctcctttcctggcagtggtggtagtggtagcagcagcggcagcagtggcagcagcagcagcagcagcaatggcaggggcagcagcagcggagctgtggacccttcagtgcaacggtcattcacccaggtcacattaccttccttctctccctcggcggcctccccacaggctccaactctgcaagtcaaggtttctcccacctcagttcccaccacacccagggcaactcctattcttcagccccgcccccagccccagcctcaacctcaaactcagctgcaacaacagacggtaatgatcacgccaacattcagcaccactccgcagacgaggatcatccagcagcctttgatataccagaatgcagctactagctttcaagtccttcagcctcaagtccaaagcctggtgacatcctcccaggtacagccggtcaccattcagcagcaggtgcagacagtacaggcccagcgggtgctgacacaaacggccaatggcacgctgcagacccttgccccggctacggtgcagacagttgctgcgccacaggtgcagcaggtcccggtcctggtccagcctcagatcatcaagacagattcccttgttttgaccacactgaagacagatggcagccctgttatggctgcggtccagaacccggccctcaccgccctcaccacccctatccagacggctgcccttcaagtaccaaccctggtgggcagcagtgggaccattctgaccacaatgcctgtaatgatggggcaagagaaagtgcccattaagcaggtacctgggggagtcaagcagcttgagccccccaaagaaggagaaaggcggacaacccataatatcattgagaaacgatatcgctcctccatcaatgacaaaatcatcgaattgaaagacctggtcatggggacagacgccaagatgcacaagtctggcgttctgaggaaggccattgattacatcaaatacttgcagcaggtcaatcataaactgcgccaggagaacatggtgctgaagctggcaaatcaaaagaacaagcttctaaagggcatcgacctaggcagtctggtggacaatgaggtggacctgaagatcgaggactttaatcagaatgtccttctgatgtcccccccagcctctgactcagggtcccaggctggcttctctccctactccattgactctgagccaggaagccctctattggatgatgcaaaggtcaaagatgagccagactctcctcctgtggcgctgggcatggtagaccgctcacggattcttctgtgtgtcctcaccttcctgtgcctctcctttaaccccctgacttccctgctgcagtggggaggggcccacgactctgaccagcacccacactcaggctctggccgcagtgtcctgtcattcgagtcaggttctgggggctggtttgactggatgatgcctactcttctcttatggctggtaaatggtgtgattgtcctgagcgtctttgtgaagctgctggttcatggggagccagtgatccggccacactcgcgctcctcggtcaccttctggaggcaccggaaacaggcagatctggatctcgccagaggagattttgcagctgctgccggcaacctacaaacctgcctggcagttttgggccgggcactgcccacctcccgcctggacctggcctgcagcctctcctggaacgtgatccgctacagcctgcagaagctacgcctggtgcgctggctgctcaagaaagtcttccagtgccggcgggccacgccagccactgaggcaggctttgaagacgaagctaagaccagcgcccgggatgcggctctggcctatcaccggctgcaccagctgcacatcacagggaagcttcctgcaggatccgcctgttccgatgtacacatggcgttgtgtgccgtgaacctggctgaatgtgcagaggagaagatcccaccgagcacactggttgagatccatctgactgctgccatggggctcaagacccggtgtggaggcaagctgggcttcctggccagctacttcctcagccgagcccagagcctgtgtggccccgagcacagtgctgttcctgactccctgcgctggctctgccaccccctgggccagaagtttttcatggagcggagctggtctgtgaagtcagctgccaaggagagtctatactgtgcccagaggaacccagctgaccccattgcgcaggtccaccaggccttctgcaagaacctgctggagcgagctatagagtccttggtgaaacctcaggccaagaagaaggctggagaccaggaagaagagagctgtgaattctccagtgctctggagtacttgaaattacttcattcttttgtggactctgtgggggttatgagccccccactctccaggagctccgtgctcaagtccgccctgggtccagacatcatctgtcggtggtggacgtctgcaatcactgtggccatcagctggctccagggagacgatgcagctgtgcgctctcattttaccaaagtggaacgcatccccaaggccctggaagtgacagagagccccctggtgaaggccatcttccatgcctgcagagccatgcatgcctcactccctgggaaagcagatgggcagcagagttccttctgccattgcgagagggccagtggccacctatggagcagcctcaacgtcagtggggccacctctgaccctgccctcaaccacgtggtccagctgctcacctgtgacctgctactgtcgctacggacagcgctctggcaaaaacaggccagtgccagccaggctgtgggggagacctaccacgcgtcaggcgctgaactggcgggcttccaacgggacctgggcagcctgcgcaggctggcacacagcttccgcccagcataccgcaaggtgttcctgcatgaagccaccgtgcgcctgatggcaggagccagccccacccgcacccaccagctgctggaacacagcctgcggcggcgcaccacgcagagcaccaagcacggagaggtggatgcctggcccggccagcgagagcgggccaccgccatcctgctggcctgccgccacctgcccctctccttcctctcctccccgggccagcgggcagtgctgctggccgaagctgcccgcaccctggagaaggtgggcgaccggcgctcctgcaacgactgccagcagatgattgttaagctgggtggtggcactgccattgccgcctcctgaccaccaggctcagcccacccctccacctctctctcgatttctctctctccccctcagcatcttcccgctgagagtggtggggaagagccttgtcttcttagctgtcacctgccgaggcttctgggccactcaggccagtgcacccctgggcagagccccttaaagctgctgtcactagatgcccatggtccagggcctggtgggcgtgagaggataggtggcagggcagaaactgggcagccctgacttgatagcagcagggggagctcccaagctgccaagcccctgcctccagccttcctgagtttctctctcctgaaccctactctctcctttttgcttcctcagtttttatcaggctttctctgggggacagcagtctctgagcaccagggagcagttgccctcaggcctgtgcccagcatgccctcccctttttatacgaatgttttctaccagtgtgcttgggtttgccatgatgcgaggctgagttgctgtagcgtcttgattctctccctgggtctgcgttccctcccctgggcctgactgagcctgctcattgtttttccctttattacacaggacagccaggggaggaggggggcccagccctgggaggctggtgggaggcagggggcaggcctgcggatgcatgaaataatgttggcattattttttaattttttaaaaaataaatggtatcttatttaattgtcctgttccttcccactccccgcctcctaggatgttagcccaagctcagggtaggcccagggggctgggagaaatgaagccacccatggggactggggaccaggggccttcagcatggcttctaggttccctcctccccctaccccatctcctacctccacagtacagactgtccccaacttaacagtggttcaacttaaaccatgtttcaactttacaattggtctgttggggtattaaatgaatttgtgacttaggatattttcatttatgatgggtttatcaggaagtaaccccatggtaagttgaggcatatctgtatatatttaaacctaattaattcttgagctgaaaataaataaaccaggatggcagggaccaacccctaatccctccccagcggcaagcccctcttttcagagtgggcagagggttgcctatggtgggcactaggaatgaggtcccctgcctcgatgcgggtcctaggagaaaaagtcctacttttctgggtccccaggtgcagcacctcccggagactgtttctcccatggcctcctgagtgatgggccctgcctccctgtgcctcatcctcaggctggttggagcagagggtgggcaggagccccagcacagactggggggtgctcacagcagggccaccttgatgcaggctggaatgttatccctggggtgtgcttggaccccacctgctttctttctctcctgcccctcccctactctcactgtaatttatggaccctgcccgcctgcgtgttgtgtgtatgtcctgtgccttttctcactattgtttgggtgtgggagggggtggtttttcactgaaaaggggggtacacctatagctttcttgatgttcaatcaatcagtcactgtgtcccagacatattcaataaacacagattggtaccacccagca

SEQ ID NO: 30167 - DNA, 5697 bp, Homo sapiens
  source 1..5697: mol_type = unassigned DNA
ggcggtgccgggcgggggttgtcgggtgtcatgggcggtggcgacggcaccgcccccgcgtctccctgagcgggacggcagggggggcttctgcgctgagccgggcgatggacgacagcggcgagctgggtggtctggagaccatggagaccctcacggagctgggcgacgagctgaccctgggagacatcgacgagatgctgcaatttgtcagtaatcaagtgggagagttccctgacttgttttcagaacagctgtgtagctcctttcctggcagtggtggtagtggtagcagcagcggcagcagtggcagcagcagcagcagcagcaatggcaggggcagcagcagcggagctgtggacccttcagtgcaacggtcattcacccaggtcacattaccttccttctctccctcggcggcctccccacaggctccaactctgcaagtcaaggtttctcccacctcagttcccaccacacccagggcaactcctattcttcagccccgcccccagccccagcctcaacctcaaactcagctgcaacaacagacggtaatgatcacgccaacattcagcaccactccgcagacgaggatcatccagcagcctttgatataccagaatgcagctactagctttcaagtccttcagcctcaagtccaaagcctggtgacatcctcccaggtacagccggtcaccattcagcagcaggtgcagacagtacaggcccagcgggtgctgacacaaacggccaatggcacgctgcagacccttgccccggctacggtgcagacagttgctgcgccacaggtgcagcaggtcccggtcctggtccagcctcagatcatcaagacagattcccttgttttgaccacactgaagacagatggcagccctgttatggctgcggtccagaacccggccctcaccgccctcaccacccctatccagacggctgcccttcaagtaccaaccctggtgggcagcagtgggaccattctgaccacaatgcctgtaatgatggggcaagagaaagtgcccattaagcaggtacctgggggagtcaagcagcttgagccccccaaagaaggagaaaggcggacaacccataatatcattgagaaacgatatcgctcctccatcaatgacaaaatcatcgaattgaaagacctggtcatggggacagacgccaagatgcacaagtctggcgttctgaggaaggccattgattacatcaaatacttgcagcaggtcaatcataaactgcgccaggagaacatggtgctgaagctggcaaatcaaaagaacaagcttctaaagggcatcgacctaggcagtctggtggacaatgaggtggacctgaagatcgaggactttaatcagaatgtccttctgatgtcccccccagcctctgactcagggtcccaggctggcttctctccctactccattgactctgagccaggaagccctctattggatgatgcaaaggtcaaagatgagccagactctcctcctgtggcgctgggcatggtagaccgctcacggattcttctgtgtgtcctcaccttcctgtgcctctcctttaaccccctgacttccctgctgcagtggggaggggcccacgactctgaccagcacccacactcaggctctggccgcagtgtcctgtcattcgagtcaggttctgggggctggtttgactggatgatgcctactcttctcttatggctggtaaatggtgtgattgtcctgagcgtctttgtgaagctgctggttcatggggagccagtgatccggccacactcgcgctcctcggtcaccttctggaggcaccggaaacaggcagatctggatctcgccagaggagtttacggaaaaaaatctggggcaactcacagcattgaggaagagttaaacatccacatttcaagaggaacaagaaccagaacactcctcagcagcaggagattttgcagctgctgccggcaacctacaaacctgcctggcagttttgggccgggcactgcccacctcccgcctggacctggcctgcagcctctcctggaacgtgatccgctacagcctgcagaagctacgcctggtgcgctggctgctcaagaaagtcttccagtgccggcgggccacgccagccactgaggcaggctttgaagacgaagctaagaccagcgcccgggatgcggctctggcctatcaccggctgcaccagctgcacatcacagggaagcttcctgcaggatccgcctgttccgatgtacacatggcgttgtgtgccgtgaacctggctgaatgtgcagaggagaagatcccaccgagcacactggttgagatccatctgactgctgccatggggctcaagacccggtgtggaggcaagctgggcttcctggccagctacttcctcagccgagcccagagcctgtgtggccccgagcacagtgctgttcctgactccctgcgctggctctgccaccccctgggccagaagtttttcatggagcggagctggtctgtgaagtcagctgccaaggagagtctatactgtgcccagaggaacccagctgaccccattgcgcaggtccaccaggccttctgcaagaacctgctggagcgagctatagagtccttggtgaaacctcaggccaagaagaaggctggagaccaggaagaagagagctgtgaattctccagtgctctggagtacttgaaattacttcattcttttgtggactctgtgggggttatgagccccccactctccaggagctccgtgctcaagtccgccctgggtccagacatcatctgtcggtggtggacgtctgcaatcactgtggccatcagctggctccagggagacgatgcagctgtgcgctctcattttaccaaagtggaacgcatccccaaggccctggaagtgacagaccacctccacccccaccatcaaccctggcaactttgtcctgtaactaaaatagcctttagcacatggcataaccggagagcttttgacattcctctttggagattcatgtctgcgtcttgggggcattcggcactagtgatgggcagccctgcctgctgactccccggctgtttctaattggatctgagtattctaagagaaactgtaaaatgctccaagacagaaaggccccacgaggtcctatccttagagccaaggctgtagcatttcctatcaagcagacccttaaccggcgcacaggaaggagctgagaagagtgagtatactgtggggcgtggcagtcactggcttgggcccctctgcctgtcacgcaggtgacacatagtgacctgcctctcgactccctgtcactgctgcaggagccccctggtgaaggccatcttccatgcctgcagagccatgcatgcctcactccctgggaaagcagatgggcagcagagttccttctgccattgcgagagggccagtggccacctatggagcagcctcaacgtcagtggggccacctctgaccctgccctcaaccacgtggtccagctgctcacctgtgacctgctactgtcgctacggacagcgctctggcaaaaacaggccagtgccagccaggctgtgggggagacctaccacgcgtcaggcgctgaactggcgggcttccaacgggacctgggcagcctgcgcaggctggcacacagcttccgcccagcataccgcaaggtgttcctgcatgaagccaccgtgcgcctgatggcaggagccagccccacccgcacccaccagctgctggaacacagcctgcggcggcgcaccacgcagagcaccaagcacggagaggtggatgcctggcccggccagcgagagcgggccaccgccatcctgctggcctgccgccacctgcccctctccttcctctcctccccgggccagcgggcagtgctgctggccgaagctgcccgcaccctggagaaggtgggcgaccggcgctcctgcaacgactgccagcagatgattgttaagctgggtggtggcactgccattgccgcctcctgaccaccaggctcagcccacccctccacctctctctcgatttctctctctccccctcagcatcttcccgctgagagtggtggggaagagccttgtcttcttagctgtcacctgccgaggcttctgggccactcaggccagtgcacccctgggcagagccccttaaagctgctgtcactagatgcccatggtccagggcctggtgggcgtgagaggataggtggcagggcagaaactgggcagccctgacttgatagcagcagggggagctcccaagctgccaagcccctgcctccagccttcctgagtttctctctcctgaaccctactctctcctttttgcttcctcagtttttatcaggctttctctgggggacagcagtctctgagcaccagggagcagttgccctcaggcctgtgcccagcatgccctcccctttttatacgaatgttttctaccagtgtgcttgggtttgccatgatgcgaggctgagttgctgtagcgtcttgattctctccctgggtctgcgttccctcccctgggcctgactgagcctgctcattgtttttccctttattacacaggacagccaggggaggaggggggcccagccctgggaggctggtgggaggcagggggcaggcctgcggatgcatgaaataatgttggcattattttttaattttttaaaaaataaatggtatcttatttaattgtcctgttccttcccactccccgcctcctaggatgttagcccaagctcagggtaggcccagggggctgggagaaatgaagccacccatggggactggggaccaggggccttcagcatggcttctaggttccctcctccccctaccccatctcctacctccacagtacagactgtccccaacttaacagtggttcaacttaaaccatgtttcaactttacaattggtctgttggggtattaaatgaatttgtgacttaggatattttcatttatgatgggtttatcaggaagtaaccccatggtaagttgaggcatatctgtatatatttaaacctaattaattcttgagctgaaaataaataaaccaggatggcagggaccaacccctaatccctccccagcggcaagcccctcttttcagagtgggcagagggttgcctatggtgggcactaggaatgaggtcccctgcctcgatgcgggtcctaggagaaaaagtcctacttttctgggtccccaggtgcagcacctcccggagactgtttctcccatggcctcctgagtgatgggccctgcctccctgtgcctcatcctcaggctggttggagcagagggtgggcaggagccccagcacagactggggggtgctcacagcagggccaccttgatgcaggctggaatgttatccctggggtgtgcttggaccccacctgctttctttctctcctgcccctcccctactctcactgtaatttatggaccctgcccgcctgcgtgttgtgtgtatgtcctgtgccttttctcactattgtttgggtgtgggagggggtggtttttcactgaaaaggggggtacacctatagctttcttgatgttcaatcaatcagtcactgtgtcccagacatattcaataaacacagattggtaccaccc

SEQ ID NO: 30168 - DNA, 3565 bp, Homo sapiens
  source 1..3565: mol_type = unassigned DNA
gcttctgcgctgagccgggcgatggacgacagcggcgagctgggtggtctggagaccatggagaccctcacggagctgggcgacgagctgaccctgggagacatcgacgagatgctgcaatttgtcagtaatcaagtgggagagttccctgacttgttttcagaacagctgtgtagctcctttcctggcagtggtggtagtggtagcagcagcggcagcagtggcagcagcagcagcagcagcaatggcaggggcagcagcagcggagctgtggacccttcagtgcaacggtcattcacccaggtcacattaccttccttctctccctcggcggcctccccacaggctccaactctgcaagtcaaggtttctcccacctcagttcccaccacacccagggcaactcctattcttcagccccgcccccagccccagcctcaacctcaaactcagctgcaacaacagacggtaatgatcacgccaacattcagcaccactccgcagacgaggatcatccagcagcctttgatataccagaatgcagctactagctttcaagtccttcagcctcaagtccaaagcctggtgacatcctcccaggtacagccggtcaccattcagcagcaggtgcagacagtacaggcccagcgggtgctgacacaaacggccaatggcacgctgcagacccttgccccggctacggtgcagacagttgctgcgccacaggtgcagcaggtcccggtcctggtccagcctcagatcatcaagacagattcccttgttttgaccacactgaagacagatggcagccctgttatggctgcggtccagaacccggccctcaccgccctcaccacccctatccagacggctgcccttcaagtaccaaccctggtgggcagcagtgggaccattctgaccacaatgcctgtaatgatggggcaagagaaagtgcccattaagcaggtacctgggggagtcaagcagcttgagccccccaaagaaggagaaaggcggacaacccataatatcattgagaaacgatatcgctcctccatcaatgacaaaatcatcgaattgaaagacctggtcatggggacagacgccaagatgcacaagtctggcgttctgaggaaggccattgattacatcaaatacttgcagcaggtcaatcataaactgcgccaggagaacatggtgctgaagctggcaaatcaaaagaacaagcttctaaagggcatcgacctaggcagtctggtggacaatgaggtggacctgaagatcgaggactttaatcagaatgtccttctgatgtcccccccagcctctgactcagggtcccaggctggcttctctccctactccattgactctgagccaggaagccctctattggatgatgcaaaggtcaaagatgagccagactctcctcctgtggcgctgggcatggtagaccgctcacggattcttctgtgtgtcctcaccttcctgtgcctctcctttaaccccctgacttccctgctgcagtggggaggggcccacgactctgaccagcacccacactcaggctctggccgcagtgtcctgtcattcgagtcaggttctgggggctggtttgactggatgatgcctactcttctcttatggctggtaaatggtgtgattgtcctgagcgtctttgtgaagctgctggttcatggggagccagtgatccggccacactcgcgctcctcggtcaccttctggaggcaccggaaacaggcagatctggatctcgccagaggagattttgcagctgctgccggcaacctacaaacctgcctggcagttttgggccgggcactgcccacctcccgcctggacctggcctgcagcctctcctggaacgtgatccgctacagcctgcagaagctacgcctggtgcgctggctgctcaagaaagtcttccagtgccggcgggccacgccagccactgaggcaggctttgaagacgaagctaagaccagcgcccgggatgcggctctggcctatcaccggctgcaccagctgcacatcacagggaagcttcctgcaggatccgcctgttccgatgtacacatggcgttgtgtgccgtgaacctggctgaatgtgcagaggagaagatcccaccgagcacactggttgagatccatctgactgctgccatggggctcaagacccggtgtggaggcaagctgggcttcctggccagctacttcctcagccgagcccagagcctgtgtggccccgagcacagtgctgttcctgactccctgcgctggctctgccaccccctgggccagaagtttttcatggagcggagctggtctgtgaagtcagctgccaaggagagtctatactgtgcccagaggaacccagctgaccccattgcgcaggtccaccaggccttctgcaagaacctgctggagcgagctatagagtccttggtgaaacctcaggccaagaagaaggctggagaccaggaagaagagagctgtgaattctccagtgctctggagtacttgaaattacttcattcttttgtggactctgtgggggttatgagccccccactctccaggagctccgtgctcaagtccgccctgggtccagacatcatctgtcggtggtggacgtctgcaatcactgtggccatcagctggctccagggagacgatgcagctgtgcgctctcattttaccaaagtggaacgcatccccaaggccctggaagtgacagagagccccctggtgaaggccatcttccatgcctgcagagccatgcatgcctcactccctgggaaagcagatgggcagcagagttccttctgccattgcgagagggccagtggccacctatggagcagcctcaacgtcagtggggccacctctgaccctgccctcaaccacgtggtccagctgctcacctgtgacctgctactgtcgctacggacagcgctctggcaaaaacaggccagtgccagccaggctgtgggggagacctaccacgcgtcaggcgctgaactggcgggcttccaacgggacctgggcagcctgcgcaggctggcacacagcttccgcccagcataccgcaaggtgttcctgcatgaagccaccgtgcgcctgatggcaggagccagccccacccgcacccaccagctgctggaacacagcctgcggcggcgcaccacgcagagcaccaagcacggagaggtggatgcctggcccggccagcgagagcgggccaccgccatcctgctggcctgccgccacctgcccctctccttcctcccctgcctccagccttcctgagtttctctctcctgaaccctactctctcctttttgcttcctcagtttttatcaggctttctctgggggacagcagtctctgagcaccagggagcagttgccctcaggcctgtgcccagcatgccctcccctttttatacgaatgttttctaccagtgtgcttgggtttgccatgatgcgaggctgagttgctgtagcgtcttgattctctccctgggtctgcgttccctcccctg

SEQ ID NO: 30169 - DNA, 3106 bp, Homo sapiens
  source 1..3106: mol_type = unassigned DNA
cctagctaggagccaggcttgggaactctcaaatgggtaattcccggtccttgttatcagctagctcacaacatgctgacctcaggctttctcttactctagcagaaacaggtatgttttactttgtgtcccactatggatagactgctgaatacatcaggtatgttcaagcattaccacatctctatttgtttccgtatctcagtaacagcagagatgagctgagaatgaatcagaacgtgccctgtagtgacattgatatatttcctgaggtacatcacgatagtctaggggacaaagggcgcagggaagcccagtgtactctttatgtctacacttgatcttagccagaaggctgagaagtgatactttttatgtcttacctctgtttctggtgactacagataagagactcatcccttgattcactcattcagcaaatatgactgagcaccgtctctaagcaggacatttgccttgtcctcagggagcatagttggcaaggaatctagacagcagcccttcttgagcttgacattgatcttctcatgaggaggactgggctccagatcttcctgggaccaggtcttcaggacagtgtgagctaggttatcagctcagattcagtgagtgctttgtggaaggttggcagagggtcgcgagggtcctctacatttgttctccagtatccagtatcaacactggttaccaaagaggaaggacggactattggtgcccctggtcccagtgattagaaatagctacttcctcagccgagcccagagcctgtgtggccccgagcacagtgctgttcctgactccctgcgctggctctgccaccccctgggccagaagtttttcatggagcggagctggtctgtgaagtcagctgccaaggagagtctatactgtgcccagaggaacccagctgaccccattgcgcaggtccaccaggccttctgcaagaacctgctggagcgagctatagagtccttggtgaaacctcaggccaagaagaaggctggagaccaggaagaagagagctgtgaattctccagtgctctggagtacttgaaattacttcattcttttgtggactctgtgggggttatgagccccccactctccaggagctccgtgctcaagtccgccctgggtccagacatcatctgtcggtggtggacgtctgcaatcactgtggccatcagctggctccagggagacgatgcagctgtgcgctctcattttaccaaagtggaacgcatccccaaggccctggaagtgacagaccacctccacccccaccatcaaccctggcaactttgtcctgtaactaaaatagcctttagcacatggcataaccggagagcttttgacattcctctttggagattcatgtctgcgtcttgggggcattcggcactagtgatgggcagccctgcctgctgactccccggctgtttctaattggatctgagtattctaagagaaactgtaaaatgctccaagacagaaaggccccacgaggtcctatccttagagccaaggctgtagcatttcctatcaagcagacccttaaccggcgcacaggaaggagctgagaagagtgagtatactgtggggcgtggcagtcactggcttgggcccctctgcctgtcacgcaggtgacacatagtgacctgcctctcgactccctgtcactgctgcaggagccccctggtgaaggccatcttccatgcctgcagagccatgcatgcctcactccctgggaaagcagatgggcagcagagttccttctgccattgcgagagggccagtggccacctatggagcagcctcaacgtcagtggggccacctctgaccctgccctcaaccacgtggtccagctgctcacctgtgacctgctactgtcgctacggacagcgctctggcaaaaacaggccagtgccagccaggctgtgggggagacctaccacgcgtcaggcgctgaactggcgggcttccaacgggacctgggcagcctgcgcaggctggcacacagcttccgcccagcataccgcaaggtgttcctgcatgaagccaccgtgcgcctgatggcaggagccagccccacccgcacccaccagctgctggaacacagcctgcggcggcgcaccacgcagagcaccaagcacggagaggtggatgcctggcccggccagcgagagcgggccaccgccatcctgctggcctgccgccacctgcccctctccttcctctcctccccgggccagcgggcagtgctgctggccgaagctgcccgcaccctggagaaggtgggcgaccggcgctcctgcaacgactgccagcagatgattgttaagctgggtggtggcactgccattgccgcctcctgaccaccaggctcagcccacccctccacctctctctcgatttctctctctccccctcagcatcttcccgctgagagtggtggggaagagccttgtcttcttagctgtcacctgccgaggcttctgggccactcaggccagtgcacccctgggcagagccccttaaagctgctgtcactagatgcccatggtccagggcctggtgggcgtgagaggataggtggcagggcagaaactgggcagccctgacttgatagcagcagggggagctcccaagctgccaagcccctgcctccagccttcctgagtttctctctcctgaaccctactctctcctttttgcttcctcagtttttatcaggctttctctgggggacagcagtctctgagcaccagggagcagttgccctcaggcctgtgcccagcatgccctcccctttttatacgaatgttttctaccagtgtgcttgggtttgccatgatgcgaggctgagttgctgtagcgtcttgattctctccctgggtctgcgttccctcccctgggcctgactgagcctgctcattgtttttccctttattacacaggacagccaggggaggaggggggcccagccctgggaggctggtgggaggcagggggcaggcctgcggatgcatgaaataatgttggcattattttttaattttttaaaaaataaatggtatcttattt

SEQ ID NO: 30170 - DNA, 2456 bp, Homo sapiens
  source 1..2456: mol_type = unassigned DNA
atgtttgtataaacaccgtaaacctgcctggtaccaccatgaatgacacaagagctagtttaaaaagaaagcaaagaaacaaacgcaaaacccgaaaccgcatcctccaccgcaaaggtactcggatggggcgcccgccctccccttagtcagaggacaaagggggcgtggccgagcgcgcggcgcccacgtgaccgcggagagctgcgcgcaggcccttcgcgcgatctgccgtcatatcagcttatggcgccggtcgctgattggctggccgctccagcctcccggcccgcttgctggctgcccagctgctaggacagtttgcagagcagtggcgtgcggagcggcggcggaccacctccaggggctaagtgatggatcttgtactccgtgttgcagattactatttttttacaccatacgtgtatccagccacatggccagaagatgacatcttccgacaagctattagtcttctgattgtaacaaatgttggtgcttacatcctttatttcttctgtgcaacactgagctattattttgtcttcgatcatgcattaatgaaacatccacaatttttaaagaatcaagtccgtcgagagattaagtttactgtccaggcattgccatggataagtattcttactgttgcactgttcttgctggagataagaggttacagcaaattacatgatgacctaggagagtttccatatggattgtttgaacttgtcgttagtataatatctttcctctttttcactgacatgttcatctactggattcacagaggccttcatcatagactggtatataagcgcctacataaacctcaccatatttggaagattcctactccatttgcaagtcatgcttttcaccctattgatggctttcttcagagtctaccttaccatatatacccttttatctttccattacacaaggtggtttatttaagtctgtacatcttggttaatatctggacaatttccattcatgacggtgattttcgtgtcccccaaatcttacagccatttattaatggctcagctcatcatacagaccaccatatgttctttgactataattatggacaatatttcactttgtgggataggattggcggctcattcaaaaatccttcatcctttgaggggaagggaccgctcagttatgtgaaggagatgacagagggaaagcgcagcagccattcaggaaatggctgtaagaatgaaaaattattcaatggagagtttacaaagactgaatagattattgcccagttattcttaagtaaggacaaagaaggaaatatcatcgtatttcttttttttaataaggaaaaaataatatccatacagtcaagatacatagtaaatggtatcatttggaaatcagcatcgtgggcactgctgaggaatgatcctagtggtaggtcagaagaagatgctgtgaacaccaggactttaatcttatgcttaaaatgccagatgttgttcgggggacaacttgtatctttctagcagcagatctgtagtttgtatagcctcaacaacaattttaaataagatggagaataaattattgaggggactaggctatatgcatttgccttcatccacccatgtttattaagaatcattgtgcttaataataccaagactaagcaccataaccaagaaatactaatgtaaagattgtttcttgtttcaggaatggttaattcttcaacgttggtatgataatgataacttgttttgacttgaataaagtactacatcagtgtggaaaaaaattctgatacattagcagctatgtaaatgacctaattgatagcaggtgtaataagactatcgtcttcctacacataggaggctcattctctggacacactatcacctattacattttactgattaacaaataaattggaatttaaaaatatcgatatcaccatgatttaatccagatctgggattatgtagctaaacattgtgatgattattatttaaaaccattatttaataagagtaaaaatatgtgaatctggatatatttaaaaaaagaaatttgatgcccagataatatattaggcactactgattttttagttaaattgatgcactacacttttgatgtttgaagttacaaacctgtaatttttttgtaaaggaaataattgccaaatacctaggcccattgctgacgattagttctaaaatcttattcctcctcttctcccctcacttttccctacttcctctgcaaaaagatttaacaaatacattcataaggaaatgtgtgttgtaacaaatatattgcaaaaacatagtttgtaaaggcattctataagctatttatgtaaaatcaataaaagttgatcataattaaactgtatcagttgagtattatagcagcacaaagtattctttgtacagattttgtgccaattt

SEQ ID NO: 30171 - DNA, 2258 bp, Homo sapiens
  source 1..2258: mol_type = unassigned DNA
tacacctgagcgggctgggccggggggcgatggaataaaagaagatggagagacttcagcgcctgggactcgggtgggcgaggcggaaggtgtcctcgcagcacggcttttctccgcgccgcggttggttagcgagtgccctctgggtgctaggcgttgggcggatggtaggatcgcggtagcatacggatccgagtcctgcgccgagtgagaggagaggctggcaggggctaagtgatggatcttgtactccgtgttgcagattactatttttttacaccatacgtgtatccagccacatggccagaagatgacatcttccgacaagctattagtcttctgattgtaacaaatgttggtgcttacatcctttatttcttctgtgcaacactgagctattattttgtcttcgatcatgcattaatgaaacatccacaatttttaaagaatcaagtccgtcgagagattaagtttactgtccaggcattgccatggataagtattcttactgttgcactgttcttgctggagataagaggttacagcaaattacatgatgacctaggagagtttccatatggattgtttgaacttgtcgttagtataatatctttcctctttttcactgacatgttcatctactggattcacagaggccttcatcatagactggtatataagcgcctacataaacctcaccatatttggaagattcctactccatttgcaagtcatgcttttcaccctattgatggctttcttcagagtctaccttaccatatatacccttttatctttccattacacaaggtggtttatttaagtctgtacatcttggttaatatctggacaatttccattcatgacggtgattttcgtgtcccccaaatcttacagccatttattaatggctcagctcatcatacagaccaccatatgttctttgactataattatggacaatatttcactttgtgggataggattggcggctcattcaaaaatccttcatcctttgaggggaagggaccgctcagttatgtgaaggagatgacagagggaaagcgcagcagccattcaggaaatggctgtaagaatgaaaaattattcaatggagagtttacaaagactgaatagattattgcccagttattcttaagtaaggacaaagaaggaaatatcatcgtatttcttttttttaataaggaaaaaataatatccatacagtcaagatacatagtaaatggtatcatttggaaatcagcatcgtgggcactgctgaggaatgatcctagtggtaggtcagaagaagatgctgtgaacaccaggactttaatcttatgcttaaaatgccagatgttgttcgggggacaacttgtatctttctagcagcagatctgtagtttgtatagcctcaacaacaattttaaataagatggagaataaattattgaggggactaggctatatgcatttgccttcatccacccatgtttattaagaatcattgtgcttaataataccaagactaagcaccataaccaagaaatactaatgtaaagattgtttcttgtttcaggaatggttaattcttcaacgttggtatgataatgataacttgttttgacttgaataaagtactacatcagtgtggaaaaaaattctgatacattagcagctatgtaaatgacctaattgatagcaggtgtaataagactatcgtcttcctacacataggaggctcattctctggacacactatcacctattacattttactgattaacaaataaattggaatttaaaaatatcgatatcaccatgatttaatccagatctgggattatgtagctaaacattgtgatgattattatttaaaaccattatttaataagagtaaaaatatgtgaatctggatatatttaaaaaaagaaatttgatgcccagataatatattaggcactactgattttttagttaaattgatgcactacacttttgatgtttgaagttacaaacctgtaatttttttgtaaaggaaataattgccaaatacctaggcccattgctgacgattagttctaaaatcttattcctcctcttctcccctcacttttccctacttcctctgcaaaaagatttaacaaatacattcataaggaaatgtgtgttgtaacaaatatattgcaaaaacatagtttgtaaaggcattctataagctatttatgtaaaatcaataaaagttgatcataattaaa

SEQ ID NO: 30172 - DNA, 751 bp, Homo sapiens
  source 1..751: mol_type = unassigned DNA
ctcattggctggaggcgcggggcggggttccggtgggcgcgcgttgaggctgcggtcatggagggagcaggagctggatccggcttccggaaggagctggtgagcaggctgctgcacctgcacttcaaggatgacaagaccaaagaagcagcagtccgcggcgtgcggcaggcccaggcagaagacgcgctccgtgtggacgtggaccagctggagaaggtgcttccgcagctgctcctggacttctagggatctcagccgtggctgaggccacccccagaggagcccctggtccacagaagcaggccttgtgtttccagcggcctctgataagaggcagggaaggacctgaaggatttggagttgattcaaacaagatctctgggagtctccagcctgtgcagaaggggcaggactgcagtgcactgcgggccttggagtgtccagtggggacactggtgtgggaaggggcagcacctggggagtccctgcctctcctccctgggacaatagtgtgcatgccacccggggtcctacaggcaggtgctgggaaaggcctggccagcaggtagcctgtgtgtttgacaaacagcagctggcagcgctgcctcctgcccacattcctgccacccgacatcaaagctggcgtgtgacctttccagccatgcgatattccccttggaagatgcttccccaggctataaatttgttctcacaaagcaacatcaataaatcaaaactgtctctccca

SEQ ID NO: 30173 - DNA, 805 bp, Homo sapiens
  source 1..805: mol_type = unassigned DNA
ctcattggctggaggcgcggggcggggttccggtgggcgcgcgttgaggctgcggtcatggagggagcaggagctggatccggcttccggaaggagctggtgagcaggctgctgcacctgcacttcaaggatgacaagaccaaagtgagcggggacgcgctgcagctcatggtggagttgctgaaggtcttcgttgtggaagcagcagtccgcggcgtgcggcaggcccaggcagaagacgcgctccgtgtggacgtggaccagctggagaaggtgcttccgcagctgctcctggacttctagggatctcagccgtggctgaggccacccccagaggagcccctggtccacagaagcaggccttgtgtttccagcggcctctgataagaggcagggaaggacctgaaggatttggagttgattcaaacaagatctctgggagtctccagcctgtgcagaaggggcaggactgcagtgcactgcgggccttggagtgtccagtggggacactggtgtgggaaggggcagcacctggggagtccctgcctctcctccctgggacaatagtgtgcatgccacccggggtcctacaggcaggtgctgggaaaggcctggccagcaggtagcctgtgtgtttgacaaacagcagctggcagcgctgcctcctgcccacattcctgccacccgacatcaaagctggcgtgtgacctttccagccatgcgatattccccttggaagatgcttccccaggctataaatttgttctcacaaagcaacatcaataaatcaaaactgtctctccca

SEQ ID NO: 30174 - DNA, 2565 bp, Homo sapiens
  source 1..2565: mol_type = unassigned DNA
aaaggggccagaaaggggcaggctgaggctgggggaggggctcaagggagcccagctgggagggcccaggcaggcagtgcggagctggccgtgggctgcctaccctttcatctctgcaactccttcctccctgggcctcccttctggtgtgtctgtgggtctgtctaggtgggcttgggaaaggggaaggaaggggcgtctctttaggcagctcagactggacaagccttctttgaaaatggtcctttgaacacacgcctgctggtggttggtcagacagatgcgccagcgggagccccggggccccaaggggacagctatctctgcaggaccagtgcgatgggcgggaagggaggaggggacacgagaggccctgtcctcttcccgtgccagcttgctcaggccctcagtcccagacgggcttttcccagagagctaaaagagaagggccagagaatgtcgtcccagccagcagggaaccagacctcccccggggccacagaggactactcctatggcagctggtacatcgatgagccccaggggggcgaggagctccagccagagggggaagtgccctcctgccacaccagcataccacccggcctgtaccacgcctgcctggcctcgctgtcaatccttgtgctgctgctcctggccatgctggtgaggcgccgccagctctggcctgactgtgtgcgtggcaggcccggcctgcccagccctgtggatttcttggctggggacaggccccgggcagtgcctgctgctgttttcatggtcctcctgagctccctgtgtttgctgctccccgacgaggacgcattgcccttcctgactctcgcctcagcacccagccaagatgggaaaactgaggctccaagaggggcctggaagatactgggactgttctattatgctgccctctactaccctctggctgcctgtgccacggctggccacacagctgcacacctgctcggcagcacgctgtcctgggcccaccttggggtccaggtctggcagagggcagagtgtccccaggtgcccaagatctacaagtactactccctgctggcctccctgcctctcctgctgggcctcggattcctgagcctttggtaccctgtgcagctggtgagaagcttcagccgtaggacaggagcaggctccaaggggctgcagagcagctactctgaggaatatctgaggaacctcctttgcaggaagaagctgggaagcagctaccacacctccaagcatggcttcctgtcctgggcccgcgtctgcttgagacactgcatctacactccacagccaggattccatctcccgctgaagctggtgctttcagctacactgacagggacggccatttaccaggtggccctgctgctgctggtgggcgtggtacccactatccagaaggtgagggcaggggtcaccacggatgtctcctacctgctggccggctttggaatcgtgctctccgaggacaagcaggaggtggtggagctggtgaagcaccatctgtgggctctggaagtgtgctacatctcagccttggtcttgtcctgcttactcaccttcctggtcctgatgcgctcactggtgacacacaggaccaaccttcgagctctgcaccgaggagctgccctggacttgagtcccttgcatcggagtccccatccctcccgccaagccatattctgttggatgagcttcagtgcctaccagacagcctttatctgccttgggctcctggtgcagcagatcatcttcttcctgggaaccacggccctggccttcctggtgctcatgcctgtgctccatggcaggaacctcctgctcttccgttccctggagtcctcgtggcccttctggctgactttggccctggctgtgatcctgcagaacatggcagcccattgggtcttcctggagactcatgatggacacccacagctgaccaaccggcgagtgctctatgcagccacctttcttctcttccccctcaatgtgctggtgggtgccatggtggccacctggcgagtgctcctctctgccctctacaacgccatccaccttggccagatggacctcagcctgctgccaccgagagccgccactctcgaccccggctactacacgtaccgaaacttcttgaagattgaagtcagccagtcgcatccagccatgacagccttctgctccctgctcctgcaagcgcagagcctcctacccaggaccatggcagccccccaggacagcctcagaccaggggaggaagacgaagggatgcagctgctacagacaaaggactccatggccaagggagctaggcccggggccagccgcggcagggctcgctggggtctggcctacacgctgctgcacaacccaaccctgcaggtcttccgcaagacggccctgttgggtgccaatggtgcccagccctgagggcagggaaggtcaacccacctgcccatctgtgctgaggcatgttcctgcctaccatcctcctccctccccggctctcctcccagcatcacaccagccatgcag

SEQ ID NO: 30175 - DNA, 2864 bp, Homo sapiens
  source 1..2864: mol_type = unassigned DNA
agatcaaacaccttttaaagcaggtgctggggacacttctcagggccaactgccgagaccacacaaccagccacccctctaggatcccagcccagctggtgctgggctcagaggagaaggccccgtgttgggagcaccctgcttgcctggagggacaagtttccgggagagatcaataaaggaaaggaaagagacaaggaagggagaggtcaggagagcgcttgattggaggagaagggccagagaatgtcgtcccagccagcagggaaccagacctcccccggggccacagaggactactcctatggcagctggtacatcgatgagccccaggggggcgaggagctccagccagagggggaagtgccctcctgccacaccagcataccacccggcctgtaccacgcctgcctggcctcgctgtcaatccttgtgctgctgctcctggccatgctggtgaggcgccgccagctctggcctgactgtgtgcgtggcaggcccggcctgcccagccctgtggatttcttggctggggacaggccccgggcagtgcctgctgctgttttcatggtcctcctgagctccctgtgtttgctgctccccgacgaggacgcattgcccttcctgactctcgcctcagcacccagccaagatgggaaaactgaggctccaagaggggcctggaagatactgggactgttctattatgctgccctctactaccctctggctgcctgtgccacggctggccacacagctgcacacctgctcggcagcacgctgtcctgggcccaccttggggtccaggtctggcagagggcagagtgtccccaggtgcccaagatctacaagtactactccctgctggcctccctgcctctcctgctgggcctcggattcctgagcctttggtaccctgtgcagctggtgagaagcttcagccgtaggacaggagcaggctccaaggggctgcagagcagctactctgaggaatatctgaggaacctcctttgcaggaagaagctgggaagcagctaccacacctccaagcatggcttcctgtcctgggcccgcgtctgcttgagacactgcatctacactccacagccaggattccatctcccgctgaagctggtgctttcagctacactgacagggacggccatttaccaggtggccctgctgctgctggtgggcgtggtacccactatccagaaggtgagggcaggggtcaccacggatgtctcctacctgctggccggctttggaatcgtgctctccgaggacaagcaggaggtggtggagctggtgaagcaccatctgtgggctctggaagtgtgctacatctcagccttggtcttgtcctgcttactcaccttcctggtcctgatgcgctcactggtgacacacaggaccaaccttcgagctctgcaccgaggagctgccctggacttgagtcccttgcatcggagtccccatccctcccgccaagccatattctgttggatgagcttcagtgcctaccagacagcctttatctgccttgggctcctggtgcagcagatcatcttcttcctgggaaccacggccctggccttcctggtgctcatgcctgtgctccatggcaggaacctcctgctcttccgttccctggagtcctcgtggcccttctggctgactttggccctggctgtgatcctgcagaacatggcagcccattgggtcttcctggagactcatgatggacacccacagctgaccaaccggcgagtgctctatgcagccacctttcttctcttccccctcaatgtgctggtgggtgccatggtggccacctggcgagtgctcctctctgccctctacaacgccatccaccttggccagatggacctcagcctgctgccaccgagagccgccactctcgaccccggctactacacgtaccgaaacttcttgaagattgaagtcagccagtcgcatccagccatgacagccttctgctccctgctcctgcaagcgcagagcctcctacccaggaccatggcagccccccaggacagcctcagaccaggggaggaagacgaagggatgcagctgctacagacaaaggactccatggccaagggagctaggcccggggccagccgcggcagggctcgctggggtctggcctacacgctgctgcacaacccaaccctgcaggtcttccgcaagacggccctgttgggtgccaatggtgcccagccctgagggcagggaaggtcaacccacctgcccatctgtgctgaggcatgttcctgcctaccatcctcctccctccccggctctcctcccagcatcacaccagccatgcagccagcaggtcctccggatcactgtggttgggtggaggtctgtctgcactgggagcctcaggagggctctgctccacccacttggctatgggagagccagcaggggttctggagaaagaaactggtgggttagggccttggtccaggagccagttgagccagggcagccacatccaggcgtctccctaccctggctctgccatcagccttgaagggcctcgatgaagccttctctggaaccactccagcccagctccacctcagccttggccttcacgctgtggaagcagccaaggcacttcctcaccccctcagcgccacggacctctctggggagtggccggaaagctcccgggcctctggcctgcagggcagcccaagtcatgactcagaccaggtcccacactgagctgcccacactcgagagccagatatttttgtagtttttatgcctttggctattatgaaagaggttagtgtgttccctgcaataaacttgttcctgagaaa

SEQ ID NO: 30176 - DNA, 2800 bp, Homo sapiens
  source 1..2800: mol_type = unassigned DNA
gtatttccatcaccgaggcccaaaggggccagaaaggggcaggctgaggctgggggaggggctcaagggagcccagctgggagggcccaggcaggcagtgcggagctggccgtgggctgcctaccctttcatctctgcaactccttcctccctgggcctcccttctggagaagggccagagaatgtcgtcccagccagcagggaaccagacctcccccggggccacagaggactactcctatggcagctggtacatcgatgagccccaggggggcgaggagctccagccagagggggaagtgccctcctgccacaccagcataccacccggcctgtaccacgcctgcctggcctcgctgtcaatccttgtgctgctgctcctggccatgctggtgaggcgccgccagctctggcctgactgtgtgcgtggcaggcccggcctgcccagccctgtggatttcttggctggggacaggccccgggcagtgcctgctgctgttttcatggtcctcctgagctccctgtgtttgctgctccccgacgaggacgcattgcccttcctgactctcgcctcagcacccagccaagatgggaaaactgaggctccaagaggggcctggaagatactgggactgttctattatgctgccctctactaccctctggctgcctgtgccacggctggccacacagctgcacacctgctcggcagcacgctgtcctgggcccaccttggggtccaggtctggcagagggcagagtgtccccaggtgcccaagatctacaagtactactccctgctggcctccctgcctctcctgctgggcctcggattcctgagcctttggtaccctgtgcagctggtgagaagcttcagccgtaggacaggagcaggctccaaggggctgcagagcagctactctgaggaatatctgaggaacctcctttgcaggaagaagctgggaagcagctaccacacctccaagcatggcttcctgtcctgggcccgcgtctgcttgagacactgcatctacactccacagccaggattccatctcccgctgaagctggtgctttcagctacactgacagggacggccatttaccaggtggccctgctgctgctggtgggcgtggtacccactatccagaaggtgagggcaggggtcaccacggatgtctcctacctgctggccggctttggaatcgtgctctccgaggacaagcaggaggtggtggagctggtgaagcaccatctgtgggctctggaagtgtgctacatctcagccttggtcttgtcctgcttactcaccttcctggtcctgatgcgctcactggtgacacacaggaccaaccttcgagctctgcaccgaggagctgccctggacttgagtcccttgcatcggagtccccatccctcccgccaagccatattctgttggatgagcttcagtgcctaccagacagcctttatctgccttgggctcctggtgcagcagatcatcttcttcctgggaaccacggccctggccttcctggtgctcatgcctgtgctccatggcaggaacctcctgctcttccgttccctggagtcctcgtggcccttctggctgactttggccctggctgtgatcctgcagaacatggcagcccattgggtcttcctggagactcatgatggacacccacagctgaccaaccggcgagtgctctatgcagccacctttcttctcttccccctcaatgtgctggtgggtgccatggtggccacctggcgagtgctcctctctgccctctacaacgccatccaccttggccagatggacctcagcctgctgccaccgagagccgccactctcgaccccggctactacacgtaccgaaacttcttgaagattgaagtcagccagtcgcatccagccatgacagccttctgctccctgctcctgcaagcgcagagcctcctacccaggaccatggcagccccccaggacagcctcagaccaggggaggaagacgaagggatgcagctgctacagacaaaggactccatggccaagggagctaggcccggggccagccgcggcagggctcgctggggtctggcctacacgctgctgcacaacccaaccctgcaggtcttccgcaagacggccctgttgggtgccaatggtgcccagccctgagggcagggaaggtcaacccacctgcccatctgtgctgaggcatgttcctgcctaccatcctcctccctccccggctctcctcccagcatcacaccagccatgcagccagcaggtcctccggatcactgtggttgggtggaggtctgtctgcactgggagcctcaggagggctctgctccacccacttggctatgggagagccagcaggggttctggagaaagaaactggtgggttagggccttggtccaggagccagttgagccagggcagccacatccaggcgtctccctaccctggctctgccatcagccttgaagggcctcgatgaagccttctctggaaccactccagcccagctccacctcagccttggccttcacgctgtggaagcagccaaggcacttcctcaccccctcagcgccacggacctctctggggagtggccggaaagctcccgggcctctggcctgcagggcagcccaagtcatgactcagaccaggtcccacactgagctgcccacactcgagagccagatatttttgtagtttttatgcctttggctattatgaaagaggttagtgtgttccctgcaataaacttgttcctgagaaa

SEQ ID NO: 30177 - DNA, 2889 bp, Homo sapiens
  source 1..2889: mol_type = unassigned DNA
acaaaaagggtttaccaatgagacacatgttgcctccttcatggaaaccctaggagaagaaacggacagattccccttccctgcctccgccccagcccagccccagcggtccgtctcactcggttgttgctgtaatgctggtctcctgtctgtgtgcggcactgcagatgtggcgggcaggggcttgggagctctggggcaggcgctgaaggcaggagaagggccagagaatgtcgtcccagccagcagggaaccagacctcccccggggccacagaggactactcctatggcagctggtacatcgatgagccccaggggggcgaggagctccagccagaggggggggcctgacgcaggcctgagccagccttcatttgctctgcagggaagtgccctcctgccacaccagcataccacccggcctgtaccacgcctgcctggcctcgctgtcaatccttgtgctgctgctcctggccatgctggtgaggcgccgccagctctggcctgactgtgtgcgtggcaggcccggcctgcccagccctgtggatttcttggctggggacaggccccgggcagtgcctgctgctgttttcatggtcctcctgagctccctgtgtttgctgctccccgacgaggacgcattgcccttcctgactctcgcctcagcacccagccaagatgggaaaactgaggctccaagaggggcctggaagatactgggactgttctattatgctgccctctactaccctctggctgcctgtgccacggctggccacacagctgcacacctgctcggcagcacgctgtcctgggcccaccttggggtccaggtctggcagagggcagagtgtccccaggtgcccaagatctacaagtactactccctgctggcctccctgcctctcctgctgggcctcggattcctgagcctttggtaccctgtgcagctggtgagaagcttcagccgtaggacaggagcaggctccaaggggctgcagagcagctactctgaggaatatctgaggaacctcctttgcaggaagaagctgggaagcagctaccacacctccaagcatggcttcctgtcctgggcccgcgtctgcttgagacactgcatctacactccacagccaggattccatctcccgctgaagctggtgctttcagctacactgacagggacggccatttaccaggtggccctgctgctgctggtgggcgtggtacccactatccagaaggtgagggcaggggtcaccacggatgtctcctacctgctggccggctttggaatcgtgctctccgaggacaagcaggaggtggtggagctggtgaagcaccatctgtgggctctggaagtgtgctacatctcagccttggtcttgtcctgcttactcaccttcctggtcctgatgcgctcactggtgacacacaggaccaaccttcgagctctgcaccgaggagctgccctggacttgagtcccttgcatcggagtccccatccctcccgccaagccatattctgttggatgagcttcagtgcctaccagacagcctttatctgccttgggctcctggtgcagcagatcatcttcttcctgggaaccacggccctggccttcctggtgctcatgcctgtgctccatggcaggaacctcctgctcttccgttccctggagtcctcgtggcccttctggctgactttggccctggctgtgatcctgcagaacatggcagcccattgggtcttcctggagactcatgatggacacccacagctgaccaaccggcgagtgctctatgcagccacctttcttctcttccccctcaatgtgctggtgggtgccatggtggccacctggcgagtgctcctctctgccctctacaacgccatccaccttggccagatggacctcagcctgctgccaccgagagccgccactctcgaccccggctactacacgtaccgaaacttcttgaagattgaagtcagccagtcgcatccagccatgacagccttctgctccctgctcctgcaagcgcagagcctcctacccaggaccatggcagccccccaggacagcctcagaccaggggaggaagacgaagggatgcagctgctacagacaaaggactccatggccaagggagctaggcccggggccagccgcggcagggctcgctggggtctggcctacacgctgctgcacaacccaaccctgcaggtcttccgcaagacggccctgttgggtgccaatggtgcccagccctgagggcagggaaggtcaacccacctgcccatctgtgctgaggcatgttcctgcctaccatcctcctccctccccggctctcctcccagcatcacaccagccatgcagccagcaggtcctccggatcactgtggttgggtggaggtctgtctgcactgggagcctcaggagggctctgctccacccacttggctatgggagagccagcaggggttctggagaaagaaactggtgggttagggccttggtccaggagccagttgagccagggcagccacatccaggcgtctccctaccctggctctgccatcagccttgaagggcctcgatgaagccttctctggaaccactccagcccagctccacctcagccttggccttcacgctgtggaagcagccaaggcacttcctcaccccctcagcgccacggacctctctggggagtggccggaaagctcccgggcctctggcctgcagggcagcccaagtcatgactcagaccaggtcccacactgagctgcccacactcgagagccagatatttttgtagtttttatgcctttggctattatgaaagaggttagtgtgttccctgcaataaacttgttcctgag

SEQ ID NO: 30178 - DNA, 2832 bp, Homo sapiens
  source 1..2832: mol_type = unassigned DNA
agatcaaacaccttttaaagcaggtgctggggacacttctcagggccaactgccgagaccacacaaccagccacccctctaggatcccagcccagctggtgctgggctcagaggagaaggccccgtgttgggagcaccctgcttgcctggagggacaagtttccgggagagatcaataaaggaaaggaaagagacaaggaagggagaggtcaggagagcgcttgattggaggagaagggccagagaatgtcgtcccagccagcagggaaccagacctcccccggggccacagaggactactcctatggcagctggtacatcgatgagccccaggggggcgaggagctccagccagagggggaagtgccctcctgccacaccagcataccacccggcctgtaccacgcctgcctggcctcgctgtcaatccttgtgctgctgctcctggccatgctggtgaggcgccgccagctctggcctgactgtgtgcgtggcaggcccggcctgcccaggccccgggcagtgcctgctgctgttttcatggtcctcctgagctccctgtgtttgctgctccccgacgaggacgcattgcccttcctgactctcgcctcagcacccagccaagatgggaaaactgaggctccaagaggggcctggaagatactgggactgttctattatgctgccctctactaccctctggctgcctgtgccacggctggccacacagctgcacacctgctcggcagcacgctgtcctgggcccaccttggggtccaggtctggcagagggcagagtgtccccaggtgcccaagatctacaagtactactccctgctggcctccctgcctctcctgctgggcctcggattcctgagcctttggtaccctgtgcagctggtgagaagcttcagccgtaggacaggagcaggctccaaggggctgcagagcagctactctgaggaatatctgaggaacctcctttgcaggaagaagctgggaagcagctaccacacctccaagcatggcttcctgtcctgggcccgcgtctgcttgagacactgcatctacactccacagccaggattccatctcccgctgaagctggtgctttcagctacactgacagggacggccatttaccaggtggccctgctgctgctggtgggcgtggtacccactatccagaaggtgagggcaggggtcaccacggatgtctcctacctgctggccggctttggaatcgtgctctccgaggacaagcaggaggtggtggagctggtgaagcaccatctgtgggctctggaagtgtgctacatctcagccttggtcttgtcctgcttactcaccttcctggtcctgatgcgctcactggtgacacacaggaccaaccttcgagctctgcaccgaggagctgccctggacttgagtcccttgcatcggagtccccatccctcccgccaagccatattctgttggatgagcttcagtgcctaccagacagcctttatctgccttgggctcctggtgcagcagatcatcttcttcctgggaaccacggccctggccttcctggtgctcatgcctgtgctccatggcaggaacctcctgctcttccgttccctggagtcctcgtggcccttctggctgactttggccctggctgtgatcctgcagaacatggcagcccattgggtcttcctggagactcatgatggacacccacagctgaccaaccggcgagtgctctatgcagccacctttcttctcttccccctcaatgtgctggtgggtgccatggtggccacctggcgagtgctcctctctgccctctacaacgccatccaccttggccagatggacctcagcctgctgccaccgagagccgccactctcgaccccggctactacacgtaccgaaacttcttgaagattgaagtcagccagtcgcatccagccatgacagccttctgctccctgctcctgcaagcgcagagcctcctacccaggaccatggcagccccccaggacagcctcagaccaggggaggaagacgaagggatgcagctgctacagacaaaggactccatggccaagggagctaggcccggggccagccgcggcagggctcgctggggtctggcctacacgctgctgcacaacccaaccctgcaggtcttccgcaagacggccctgttgggtgccaatggtgcccagccctgagggcagggaaggtcaacccacctgcccatctgtgctgaggcatgttcctgcctaccatcctcctccctccccggctctcctcccagcatcacaccagccatgcagccagcaggtcctccggatcactgtggttgggtggaggtctgtctgcactgggagcctcaggagggctctgctccacccacttggctatgggagagccagcaggggttctggagaaagaaactggtgggttagggccttggtccaggagccagttgagccagggcagccacatccaggcgtctccctaccctggctctgccatcagccttgaagggcctcgatgaagccttctctggaaccactccagcccagctccacctcagccttggccttcacgctgtggaagcagccaaggcacttcctcaccccctcagcgccacggacctctctggggagtggccggaaagctcccgggcctctggcctgcagggcagcccaagtcatgactcagaccaggtcccacactgagctgcccacactcgagagccagatatttttgtagtttttatgcctttggctattatgaaagaggttagtgtgttccctgcaataaacttgttcctg

SEQ ID NO: 30179 - DNA, 1935 bp, Homo sapiens
  source 1..1935: mol_type = unassigned DNA
agatcaaacaccttttaaagcaggtgctggggacacttctcagggccaactgccgagaccacacaaccagccacccctctaggatcccagcccagctggtgctgggctcagaggagaaggccccgtgttgggagcaccctgcttgcctggagggacaagtttccgggagagatcaataaaggaaaggaaagagacaaggaagggagaggtcaggagagcgcttgattggaggagaagggccagagaatgtcgtcccagccagcagggaaccagacctcccccggggccacagaggactactcctatggcagctggtacatcgatgagccccaggggggcgaggagctccagccagagggggaagtgccctcctgccacaccagcataccacccggcctgtaccacgcctgcctggcctcgctgtcaatccttgtgctgctgctcctggccatgctggtgaggcgccgccagctctggcctgactgtgtgcgtggcaggcccggcctgcccagccctgtggatttcttggctggggacaggccccgggcagtgcctgctgctgttttcatggtcctcctgagctccctgtgtttgctgctccccgacgaggacgcattgcccttcctgactctcgcctcagcacccagccaagatgggaaaactgaggctccaagaggtaacttgcccaagatcacagagttgagactagtcagagcctggatttgaacctagtgttcttgcccactgaacgtgctgaagggcttggaagctggagaccgaagagaggcctgggtgggctcactgcaggccccatgtctgcccctccagcatgggtctctctgcttgtttcaccttccaggggcctggaagatactgggactgttctattatgctgccctctactaccctctggctgcctgtgccacggctggccacacagctgcacacctgctcggcagcacgctgtcctgggcccaccttggggtccaggtctggcagagggcagagtgtccccaggtgcccaaggtaaccgctgatcacaatggcctagggcagaggggcgcacagagcaacctactcaaaccacagtgcctcctttgagctctgattctatgatgggccgccctgcagccttccattgtgcatgggattccatgccttcaaacatgtgccccttccaagcttggctgctctgcaggagaggcagggaacaaggtggctgggcccagccctcaggaactttaagtctaggaggtggcggagaaggggaagtgggcagagtagggggaagagaaagcctgaaatggcccccacccccaatgcctgtgttagtgatcccccagcttccctttggtcaggctggagagggaatgggagtgaagcttgatggaggccggcaagtgcgaagtcagggatggtctaagagggctgagaggagaattccggaacctcaggaccttgctcactggctgctggctggggctgtgaagctgtccagtctagaactcaaagagtgatggtacaggctttagagccagacaacctgagtgtgaatccagcttcaccacttcattcattcactcacccattcattcaacaacatatttgaagcacatactttgtaccagggacatttccaggcactggactacagctatgaacaagacaaacagtccctagcctcccaagagccgtcacttcagaagggcagacatgacacgcaaacaaaatgatgccaggtggtaccaagtgccttggggaaacagtgccacctttctgagaccgtttctccatccgtccatggagctgataacaccagtccctcagggtggaggtgaagactaagaggttgctttgagagggggaacttggtggctttttttcaccacctagaacctggcacatactaagctctcaataaaagtatattgaacc

SEQ ID NO: 30180 - DNA, 2730 bp, Homo sapiens
  source 1..2730: mol_type = unassigned DNA
atgggcgggaagggaggaggggacacgagaggccctgtcctcttcccgtgccagcttgctcaggccctcagtcccagacgggcttttcccagagagctaaaagagaagggccagagaatgtcgtcccagccagcagggaaccagacctcccccggggccacagaggactactcctatggcagctggtacatcgatgagccccaggggggcgaggagctccagccagagggggaagtgccctcctgccacaccagcataccacccggcctgtaccacgcctgcctggcctcgctgtcaatccttgtgctgctgctcctggccatgctggtgaggcgccgccagctctggcctgactgtgtgcgtggcaggcccggcctgcccagccctgtggatttcttggctggggacaggccccgggcagtgcctgctgctgttttcatggtcctcctgagctccctgtgtttgctgctccccgacgaggacgcattgcccttcctgactctcgcctcagcacccagccaagatgggaaaactgaggctccaagaggggcctggaagatactgggactgttctattatgctgccctctactaccctctggctgcctgtgccacggctggccacacagctgcacacctgctcggcagcacgctgtcctgggcccaccttggggtccaggtctggcagagggcagagtgtccccaggtgcccaagatctacaagtactactccctgctggcctccctgcctctcctgctgggcctcggattcctgagcctttggtaccctgtgcagctggtgagaagcttcagccgtaggacaggagcaggctccaaggggctgcagagcagctactctgaggaatatctgaggaacctcctttgcaggaagaagctgggaagcagctaccacacctccaagcatggcttcctgtcctgggcccgcgtctgcttgagacactgcatctacactccacagccaggattccatctcccgctgaagctggtgctttcagctacactgacagggacggccatttaccaggtggccctgctgctgctggtgggcgtggtacccactatccagaaggtgagggcaggggtcaccacggatgtctcctacctgctggccggctttggaatcgtgctctccgaggacaagcaggaggtggtggagctggtgaagcaccatctgtgggctctggaagtgtgctacatctcagccttggtcttgtcctgcttactcaccttcctggtcctgatgcgctcactggtgacacacaggaccaaccttcgagctctgcaccgaggagctgccctggacttgagtcccttgcatcggagtccccatccctcccgccaagccatattctgttggatgagcttcagtgcctaccagacagcctttatctgccttgggctcctggtgcagcagatcatcttcttcctgggaaccacggccctggccttcctggtgctcatgcctgtgctccatggcaggaacctcctgctcttccgttccctggagtcctcgtggcccttctggctgactttggccctggctgtgatcctgcagaacatggcagcccattgggtcttcctggagactcatgatggacacccacagctgaccaaccggcgagtgctctatgcagccacctttcttctcttccccctcaatgtgctggtgggtgccatggtggccacctggcgagtgctcctctctgccctctacaacgccatccaccttggccagatggacctcagcctgctgccaccgagagccgccactctcgaccccggctactacacgtaccgaaacttcttgaagattgaagtcagccagtcgcatccagccatgacagccttctgctccctgctcctgcaagcgcagagcctcctacccaggaccatggcagccccccaggacagcctcagaccaggggaggaagacgaagggatgcagctgctacagacaaaggactccatggccaagggagctaggcccggggccagccgcggcagggctcgctggggtctggcctacacgctgctgcacaacccaaccctgcaggtcttccgcaagacggccctgttgggtgccaatggtgcccagccctgagggcagggaaggtcaacccacctgcccatctgtgctgaggcatgttcctgcctaccatcctcctccctccccggctctcctcccagcatcacaccagccatgcagccagcaggtcctccggatcactgtggttgggtggaggtctgtctgcactgggagcctcaggagggctctgctccacccacttggctatgggagagccagcaggggttctggagaaagaaactggtgggttagggccttggtccaggagccagttgagccagggcagccacatccaggcgtctccctaccctggctctgccatcagccttgaagggcctcgatgaagccttctctggaaccactccagcccagctccacctcagccttggccttcacgctgtggaagcagccaaggcacttcctcaccccctcagcgccacggacctctctggggagtggccggaaagctcccgggcctctggcctgcagggcagcccaagtcatgactcagaccaggtcccacactgagctgcccacactcgagagccagatatttttgtagtttttatgcctttggctattatgaaagaggttagtgtgttccctgcaataaacttgttcctg

SEQ ID NO: 30181 - DNA, 2631 bp, Homo sapiens
  source 1..2631: mol_type = unassigned DNA
gtgctcaggtgaggggggatgcagccgactgtccagcagcgttggaggttgcaggcatgtacttggggtgaagagcaggactccagaaccccagcctgtctgtgagaagtgagaaatagaagagaaagctccgagggggcctttttcacttcccctgggaatagatcatacctggaattccagccctgaagccctgtgatgactccccttagctgtggtcagggccctcagcccagctgggcagcagcaggatgcagatccggttattaagagccgagctggtggttcccctctggcaattcatcaggcagtggccccctgggagtgatggatggggacaaatggaggagaagggccagagaatgtcgtcccagccagcagggaaccagacctcccccggggccacagaggactactcctatggcagctggtacatcgatgagccccaggggggcgaggagctccagccagagggggaagtgccctcctgccacaccagcataccacccggcctgtaccacgcctgcctggcctcgctgtcaatccttgtgctgctgctcctggccatgctggtgaggcgccgccagctctggcctgactgtgtgcgtggcaggcccggcctgcccagccctgtggatttcttggctggggacaggccccgggcagtgcctgctgctgttttcatggtcctcctgagctccctgtgtttgctgctccccgacgaggacgcattgcccttcctgactctcgcctcagcacccagccaagatgggaaaactgaggctccaagaggggcctggaagatactgggactgttctattatgctgccctctactaccctctggctgcctgtgccacggctggccacacagctgcacacctgctcggcagcacgctgtcctgggcccaccttggggtccaggtctggcagagggcagagtgtccccaggtgcccaagatctacaagtactactccctgctggcctccctgcctctcctgctgggcctcggattcctgagcctttggtaccctgtgcagctggtgagaagcttcagccgtaggacaggagcaggctccaaggggctgcagagcagctactctgaggaatatctgaggaacctcctttgcaggaagaagctgggaagcagctaccacacctccaagcatggcttcctgtcctgggcccgcgtctgcttgagacactgcatctacactccacagccaggattccatctcccgctgaagctggtgctttcagctacactgacagggacggccatttaccaggtggccctgctgctgctggtgggcgtggtacccactatccagaaggtgagggcaggggtcaccacggatgtctcctacctgctggccggctttggaatcgtgctctccgaggacaagcaggaggtggtggagctggtgaagcaccatctgtgggctctggaagtgtgctacatctcagccttggtcttgtcctgcttactcaccttcctggtcctgatgcgctcactggtgacacacaggaccaaccttcgagctctgcaccgaggagctgccctggacttgagtcccttgcatcggagtccccatccctcccgccaagccatattctgttggatgagcttcagtgcctaccagacagcctttatctgccttgggctcctggtgcagcagatcatcttcttcctgggaaccacggccctggccttcctggtgctcatgcctgtgctccatggcaggaacctcctgctcttccgttccctggagtcctcgtggcccttctggctgactttggccctggctgtgatcctgcagaacatggcagcccattgggtcttcctggagactcatgatggacacccacagctgaccaaccggcgagtgctctatgcagccacctttcttctcttccccctcaatgtgctggtgggtgccatggtggccacctggcgagtgctcctctctgccctctacaacgccatccaccttggccagatggacctcagcctgctgccaccgagagccgccactctcgaccccggctactacacgtaccgaaacttcttgaagattgaagtcagccagtcgcatccagccatgacagccttctgctccctgctcctgcaagcgcagagcctcctacccaggaccatggcagccccccaggacagcctcagaccaggggaggaagacgaagggatgcagctgctacagacaaaggactccatggccaagggagctaggcccggggccagccgcggcagggctcgctggggtctggcctacacgctgctgcacaacccaaccctgcaggtcttccgcaagacggccctgttgggtgccaatggtgcccagccctgagggcagggaaggtcaacccacctgcccatctgtgctgaggcatgttcctgcctaccatcctcctccctccccggctctcctcccagcatcacaccagccatgcagccagcaggtcctccggatcactgtggttgggtggaggtctgtctgcactgggagcctcaggagggctctgctccacccacttggctatgggagagccagcaggggttctggagaaagaaactggtgggttagggccttggtccaggagccagttgagcca

SEQ ID NO: 30182 - DNA, 1806 bp, Homo sapiens
  source 1..1806: mol_type = unassigned DNA
cctttcatctctgcaactccttcctccctgggcctcccttctggagaagggccagagaatgtcgtcccagccagcagggaaccagacctcccccggggccacagaggactactcctatggcagctggtacatcgatgagccccgacgaggacgcattgcccttcctgactctcgcctcagcacccagccaagatgggaaaactgaggctccaagaggggcctggaagatactgggactgttctattatgctgccctctactaccctctggctgcctgtgccacggctggccacacagctgcacacctgctcggcagcacgctgtcctgggcccaccttggggtccaggtctggcagagggcagagtgtccccaggtgcccaagatctacaagtactactccctgctggcctccctgcctctcctgctgggcctcggattcctgagcctttggtaccctgtgcagctggtgagaagcttcagccgtaggacaggagcaggctccaaggggctgcagagcagctactctgaggaatatctgaggaacctcctttgcaggaagaagctgggaagcagctaccacacctccaagcatggcttcctgtcctgggcccgcgtctgcttgagacactgcatctacactccacagccaggattccatctcccgctgaagctggtgctttcagctacactgacagggacggccatttaccaggtggccctgctgctgctggtgggcgtggtacccactatccagaaggtgagggcaggggtcaccacggatgtctcctacctgctggccggctttggaatcgtgctctccgaggacaagcaggaggtggtggagctggtgaagcaccatctgtgggctctggaagtgtgctacatctcagccttggtcttgtcctgcttactcaccttcctggtcctgatgcgctcactggtgacacacaggaccaaccttcgagctctgcaccgaggagctgccctggacttgagtcccttgcatcggagtccccatccctcccgccaagccatattctgttggatgagcttcagtgcctaccagacagcctttatctgccttgggctcctggtgcagcagatcatcttcttcctgggaaccacggccctggccttcctggtgctcatgcctgtgctccatggcaggaacctcctgctcttccgttccctggagtcctcgtggcccttctggctgactttggccctggctgtgatcctgcagaacatggcagcccattgggtcttcctggagactcatgatggacacccacagctgaccaaccggcgagtgctctatgcagccacctttcttctcttccccctcaatgtgctggtgggtgccatggtggccacctggcgagtgctcctctctgccctctacaacgccatccaccttggccagatggacctcagcctgctgccaccgagagccgccactctcgaccccggctactacacgtaccgaaacttcttgaagattgaagtcagccagtcgcatccagccatgacagccttctgctccctgctcctgcaagcgcagagcctcctacccaggaccatggcagccccccaggacagcctcagaccaggggaggaagacgaagggatgcagctgctacagacaaaggactccatggccaagggagctaggcccggggccagccgcggcagggctcgctggggtctggcctacacgctgctgcacaacccaaccctgcaggtcttccgcaagacggccctgttgggtgccaatggtgcccagccctgagggcagggaaggtcaa

SEQ ID NO: 30183 - DNA, 2324 bp, Homo sapiens
  source 1..2324: mol_type = unassigned DNA
atgaatgaatgaaggggccttattcccccatctagaaagtgggactgactccacctccttgatttatggaatacagctgggaggtaatgggggtgcaggggctgagcaactccctcctgccctgtccttgcctctgtgctagccctgtggatttcttggctggggacaggccccgggcagtgcctgctgctgttttcatggtcctcctgagctccctgtgtttgctgctccccgacgaggacgcattgcccttcctgactctcgcctcagcacccagccaagatgggaaaactgaggctccaagagatctacaagtactactccctgctggcctccctgcctctcctgctgggcctcggattcctgagcctttggtaccctgtgcagctggtgagaagcttcagccgtaggacaggagcaggctccaaggggctgcagagcagctactctgaggaatatctgaggaacctcctttgcaggaagaagctgggaagcagctaccacacctccaagcatggcttcctgtcctgggcccgcgtctgcttgagacactgcatctacactccacagccaggattccatctcccgctgaagctggtgctttcagctacactgacagggacggccatttaccaggtggccctgctgctgctggtgggcgtggtacccactatccagaaggtgagggcaggggtcaccacggatgtctcctacctgctggccggctttggaatcgtgctctccgaggacaagcaggaggtggtggagctggtgaagcaccatctgtgggctctggaagtgtgctacatctcagccttggtcttgtcctgcttactcaccttcctggtcctgatgcgctcactggtgacacacaggaccaaccttcgagctctgcaccgaggagctgccctggacttgagtcccttgcatcggagtccccatccctcccgccaagccatattctgttggatgagcttcagtgcctaccagacagcctttatctgccttgggctcctggtgcagcagatcatcttcttcctgggaaccacggccctggccttcctggtgctcatgcctgtgctccatggcaggaacctcctgctcttccgttccctggagtcctcgtggcccttctggctgactttggccctggctgtgatcctgcagaacatggcagcccattgggtcttcctggagactcatgatggacacccacagctgaccaaccggcgagtgctctatgcagccacctttcttctcttccccctcaatgtgctggtgggtgccatggtggccacctggcgagtgctcctctctgccctctacaacgccatccaccttggccagatggacctcagcctgctgccaccgagagccgccactctcgaccccggctactacacgtaccgaaacttcttgaagattgaagtcagccagtcgcatccagccatgacagccttctgctccctgctcctgcaagcgcagagcctcctacccaggaccatggcagccccccaggacagcctcagaccaggggaggaagacgaagggatgcagctgctacagacaaaggactccatggccaagggagctaggcccggggccagccgcggcagggctcgctggggtctggcctacacgctgctgcacaacccaaccctgcaggtcttccgcaagacggccctgttgggtgccaatggtgcccagccctgagggcagggaaggtcaacccacctgcccatctgtgctgaggcatgttcctgcctaccatcctcctccctccccggctctcctcccagcatcacaccagccatgcagccagcaggtcctccggatcactgtggttgggtggaggtctgtctgcactgggagcctcaggagggctctgctccacccacttggctatgggagagccagcaggggttctggagaaagaaactggtgggttagggccttggtccaggagccagttgagccagggcagccacatccaggcgtctccctaccctggctctgccatcagccttgaagggcctcgatgaagccttctctggaaccactccagcccagctccacctcagccttggccttcacgctgtggaagcagccaaggcacttcctcaccccctcagcgccacggacctctctggggagtggccggaaagctcccgggcctctggcctgcagggcagcccaagtcatgactcagaccaggtcccacactgagctgcccacactcgagagccagatatttttgtagtttttatgcctttggctattatgaaagaggttagtgtgttccctgcaataaacttgttcctgag

SEQ ID NO: 30184 - DNA, 993 bp, Homo sapiens
  source 1..993: mol_type = unassigned DNA
atggggaagattgatgtggacaagatcctctttttcaatcaagaaatcaggctgtggcagcttataatggcaacccctgaagaaaacagcaatccccatgacagagcaacaccccagctgccagcacagctgcaggagcttgagcatcgggtggcccggagacggctgtcccaggcccgccaccgagccaccctggcagcgctcttcaacaacctcaggaagacagtgtactctcagtctgatctcatagcctcaaagtggcaggttctgaataaggcaaagagtcatattccagaactggagcaaaccctggataatttgctgaagctgaaagcatccttcaacctggaagatgggcatgcaagcagcttagaggaggtcaagaaagaatatgccagcatgtattctggaaatgacagttttcctcagaatggttcctccccttggtatctcaacttttacaaacagacgatggaccttctgactggcagcgggatcattaccccgcaggaggcggcgctgcccatcgtctccgcggccatctcccacctgtggcagaacctctcggaggagaggaaggccagcctccggcaggcctgggcgcagaagcaccgcggccctgcgaccctggcggaggcctgccgagagccggcctgtgccgagggcagcgtgaaggacagcggcgtggacagccagggggccagctgctcgctggtctccacgcccgaggagatcctttttgaggatgcctttgatgtggcaagcttcctggacaaaagtgaggttccgagtacatctagctccagttcagtgcttgccagctgcaacccagaaaacccagaggagaagtttcagctctatatgcagatcatcaacttttttaaaggccttagctgtgcaaacactcaagtaaagcaggaagcatcctttcccgttgatgaagagatgatcatgttgcagtgcacagagacctttgacgatgaagatttgtaa

SEQ ID NO: 30185 - DNA, 1426 bp, Homo sapiens
  source 1..1426: mol_type = unassigned DNA
tggagcgttcctcccagcccccgacgtcgcgggcccagtgtccccgtccaggctggttgggcgcacgcgcggccccactcgcccccacgcgtgcgtccccgctggtcccgcccccggccggaagttccggcggcggagctgggccgggcccgagcggatcgcgggctcgggctgcggggctccggctgcgggcgctgggccgcgaggcgcggagcttgggagcggagcccaggccgtgccgcgcggcgccatgaagggcaaggaggagaaggagggcggcgcacggctgggcgctggcggcggaagccccgagaagagcccgagcgcgcaggagctcaaggagcagggcaatcgtctgttcgtgggccgaaagtacccggaggcggcggcctgctacggccgcgcgatcacccggaacccgctggtggccgtgtattacaccaaccgggccttgtgctacctgaagatgcagcagcacgagcaggccctggccgactgccggcgcgccctggagctggacgggcagtctgtgaaggcgcacttcttcctggggcagtgccagctggagatggagagctatgatgaggccatcgccaatctgcagcgagcttacagcctggccaaggagcagcggctgaacttcggggacgacatccccagcgctcttcgaatcgcgaagaagaagcgctggaacagcattgaggagcggcgcatccaccaggagagcgagctgcactcctacctctccaggctcattgccgcggagcgtgagagggagctggaagagtgccagcgaaaccacgagggtgatgaggacgacagccacgtccgggcccagcaggcctgcattgaggccaagcacgacaagtacatggcggacatggacgagcttttttctcaggtggatgagaagaggaagaagcgagacatccccgactacctgtgtggcaagatcagctttgagctgatgcgggagccgtgcatcacgcccagtggcatcacctacgaccgcaaggacatcgaggagcacctgcagcgtgtgggtcattttgaccccgtgacccggagccccctgacccaggaacagctcatccccaacttggctatgaaggaggttattgacgcattcatctctgagaatggctgggtggaggactactgaggttccctgccctacctggcgtcctggtccaggggagccctgggcagaagcccccggcccctatacatagtttatgttcctggccaccccgaccgcttcccccaagttctgctgttggactctggactgtttcccctctcagcatcgcttttgctgggccgtgatcgtccccctttgtgggctggaaaagcaggtgagggtgggctgggctgaggccattgccgccactatctgtgtaataaaatccgtgagcacgaggtggga

SEQ ID NO: 30186 - DNA, 2053 bp, Homo sapiens
  source 1..2053: mol_type = unassigned DNA
gcgccgccgcgggtggccgcgcgggtgaagccggaagcagcagccaggagggcggggccgcgtagggcccactggccagggagggcgccgcgcggaggcgcggggcgtgtctcctgtcaaaagccatgctcggcaggtctgggtaccgggcgctgcccctgggtgattttgaccgcttccagcagtcgagcttcggctttctgggctcgcagaagggctgcttgtccccggagcggggcggcgtggggacaggggccgatgtaccccagagctggccctcctgcctctgtcatggcctcatcagtttcctggggttcttgctgctgttggtcaccttccccatttctggctggtttgccctgaagattgtgcccacctacgagcggatgattgtgttccgcctgggccggatccgcaccccccagggacctggcatggttctgctcttgcccttcattgactcctttcagagggtggatctgaggacacgagccttcaacgtccctccctgcaagctggcctctaaggacggggctgtgctgtccgtgggagccgatgtccagtttcgcatctgggacccggtgctgtcggtgatgactgtgaaagacctgaacacagccacacgcatgacagcccagaacgccatgaccaaggccctgctcaagaggccgctgcgggagatccagatggagaagctcaagatcagcgaccagcttctgctggagatcaacgatgtgaccagggcctgggggctggaggtagaccgcgtggagctggcagtggaggccgtgctccagccgccccaggacagcccagctgggcccaacctggacagcaccctccagcagctggccctgcacttcctgggaggaagcatgaactcaatggcaggaggtgccccgtccccggggccagcagacaccgtggagatggtgagtgaagttgagccacctgcccctcaagttggtgccaggtccagtccgaagcagcctctggcggaggggctactgactgctctacagcccttcctgtctgaggccctggtcagccaagtcggggcctgctaccagttcaatgtcgtcctgcccagcggcacccaaagcgcctacttcctggacctcactacaggacgaggaagagtgggacacggggtgcctgatggcatccctgatgtggtggtggagatggccgaggcagacctgcgggccctgctatgcagagagctgcggcccctgggggcctacatgagtggacggctgaaggtgaagggcgacctggctatggccatgaagctggaggctgtcctcagggccttgaagtagcagccttggctgactttccagagcccagtcccaagcctggcaccaagcctgaggggcctcttggaggaggaggtgttcatctgcaccacagagagttgaggccctaacaaatttcaggcccagccaagagcccatgaatggaggctgcaggaggctgagtccggctgccatgcacgtctcccctacagtggttctctggacaaggctttgtccatcccggtccccagctgagtgcccagcgctgagctgggtgcacggtgtgattccaggaggagagccaggcctgccctgccctgctggcttcctgactggagagacaggacccacagaaacagcctgacagcagctggtttggtccttgtgtgagggaccaagcatgtggcccaggctctaagctctgcggggattggagagggatggggagggaagggaaggcagctccaagaagaggtccctgtggcgaagttacctggggatcctggctggcccaccttcctggctgcagtccaggcccgtgctggcgggattgggcatgggaaggagcagggcctgctgcttccctggcgctgctcccaaagatttctgactcatctgccagctctgtcctgcatgcctggcgagctggggcccagggcagcatgaaggagagccctgcgttctgtgcttcttaccagaggtttgcaagcctcagacaaataaatgtggtgtttacaatgtataaaagagaagaa

SEQ ID NO: 30187 - DNA, 1835 bp, Homo sapiens
  source 1..1835: mol_type = unassigned DNA
gggccgcgtagggcccactggccagggagggcgccgcgcggaggcgcggggcgtgtctcctgtcaaaagccatgctcggcaggtctgggtaccgggcgctgcccctgggtgattttgaccgcttccagcagtcgagcttcggctttctgggctcgcagaagggctgcttgtccccggagcggggcggcgtggggacaggggccgatgtaccccagagctggccctcctgcctctgtcatggcctcatcagtttcctggggttcttgctgctgttggtcaccttccccatttctggctggtttgccctgaagctggcctctaaggacggggctgtgctgtccgtgggagccgatgtccagtttcgcatctgggacccggtgctgtcggtgatgactgtgaaagacctgaacacagccacacgcatgacagcccagaacgccatgaccaaggccctgctcaagaggccgctgcgggagatccagatggagaagctcaagatcagcgaccagcttctgctggagatcaacgatgtgaccagggcctgggggctggaggtagaccgcgtggagctggcagtggaggccgtgctccagccgccccaggacagcccagctgggcccaacctggacagcaccctccagcagctggccctgcacttcctgggaggaagcatgaactcaatggcaggaggtgccccgtccccggggccagcagacaccgtggagatggtgagtgaagttgagccacctgcccctcaagttggtgccaggtccagtccgaagcagcctctggcggaggggctactgactgctctacagcccttcctgtctgaggccctggtcagccaagtcggggcctgctaccagttcaatgtcgtcctgcccagcggcacccaaagcgcctacttcctggacctcactacaggacgaggaagagtgggacacggggtgcctgatggcatccctgatgtggtggtggagatggccgaggcagacctgcgggccctgctatgcagagagctgcggcccctgggggcctacatgagtggacggctgaaggtgaagggcgacctggctatggccatgaagctggaggctgtcctcagggccttgaagtagcagccttggctgactttccagagcccagtcccaagcctggcaccaagcctgaggggcctcttggaggaggaggtgttcatctgcaccacagagagttgaggccctaacaaatttcaggcccagccaagagcccatgaatggaggctgcaggaggctgagtccggctgccatgcacgtctcccctacagtggttctctggacaaggctttgtccatcccggtccccagctgagtgcccagcgctgagctgggtgcacggtgtgattccaggaggagagccaggcctgccctgccctgctggcttcctgactggagagacaggacccacagaaacagcctgacagcagctggtttggtccttgtgtgagggaccaagcatgtggcccaggctctaagctctgcggggattggagagggatggggagggaagggaaggcagctccaagaagaggtccctgtggcgaagttacctggggatcctggctggcccaccttcctggctgcagtccaggcccgtgctggcgggattgggcatgggaaggagcagggcctgctgcttccctggcgctgctcccaaagatttctgactcatctgccagctctgtcctgcatgcctggcgagctggggcccagggcagcatgaaggagagccctgcgttctgtgcttcttaccagaggtttgcaagcctcagacaaataaatgtggtgtttacaatgt

SEQ ID NO: 30188 - DNA, 984 bp, Homo sapiens
  source 1..984: mol_type = unassigned DNA
atgctcggcaggtctgggtaccgggcgctgcccctgggtgattttgaccgcttccagcagtcgagcttcggctttctgggctcgcagaagggctgcttgtccccggagcggggcggcgtggggacaggggccgatgtaccccagagctggccctcctgcctctgtcatggcctcatcagtttcctggggttcttgctgctgttggtcaccttccccatttctggctggtttgccctgaagattgtgcccacctacgagcggatgattgtgttccgcctgggccggatccgcaccccccagggacctggcatggttctgctcttgcccttcattgactcctttcagagggtggatctgaggacacgagccttcaacgtccctccctgcaagctggcctctaaggacggggctgtgctgtccgtgggagccgatgtccagtttcgcatctgggacccggtgctgtcggtgatgactgtgaaagacctgaacacagccacacgcatgacagcccagaacgccatgaccaaggccctgctcaagaggccgctgcgggagatccagatggagaagctcaagatcagcgaccagcttctgctggagatcaacgatgtgaccagggcctgggggctggaggtagaccgcgtggagctggcagtggaggccgtgctccagccgccccaggacagcccagctgggcccaacctggacagcaccctccagcagctggccctgcacttcctgggaggaagcatgaactcaatggcaggaggtgccccgtccccggggccaggacgaggaagagtgggacacggggtgcctgatggcatccctgatgtggtggtggagatggccgaggcagacctgcgggccctgctatgcagagagctgcggcccctgggggcctacatgagtggacggctgaaggtgaagggcgacctggctatggccatgaagctggaggctgtcctcagggccttgaagtag

SEQ ID NO: 30189 - DNA, 1448 bp, Homo sapiens
  source 1..1448: mol_type = unassigned DNA
aaaagccatgctcggcaggtctgggtaccgggcgctgcccctgggtgattttgaccgcttccagcagtcgagcttcggctttctgggctcgcagaagggctgcttgtccccggagcggggcggcgtggggacaggggccggctaaggcatcatcttcataaggactcctggaaagcacacttctggggctgatggtataggaggaatgtgttttgccagcagtattcagtgcatgtttacagatgcccaggtgctcctggctccatgccagatgtaccccagagctggccctcctgcctctgtcatggcctcatcagtttcctggggttcttgctgctgttggtcaccttccccatttctggctggtttgccctgaagattgtgcccacctacgagcggatgattgtgttccgcctgggccggatccgcaccccccagggacctggcatggttctgctcttgcccttcattgactcctttcagagggtggatctgaggacacgagccttcaacgtccctccctgcaagctggcctctaaggacggggctgtgctgtccgtgggagccgatgtccagtttcgcatctgggacccggtgctgtcggtgatgactgtgaaagacctgaacacagccacacgcatgacagcccagaacgccatgaccaaggccctgctcaagaggccgctgcgggagatccagatggagaagctcaagatcagcgaccagcttctgctggagatcaacgatgtgaccagggcctgggggctggaggtagaccgcgtggagctggcagtggaggccgtgctccagccgccccaggacagcccagctgggcccaacctggacagcaccctccagcagctggccctgcacttcctgggaggaagcatgaactcaatggcaggaggtgccccgtccccggggccagacaccgtggagatggtgagtgaagttgagccacctgcccctcaagttggtgccaggtccagtccgaagcagcctctggcggaggggctactgactgctctacagcccttcctgtctgaggccctggtcagccaagtcggggcctgctaccagttcaatgtcgtcctgcccagcggcacccaaagcgcctacttcctggacctcactacaggacgaggaagagtgggacacggggtgcctgatggcatccctgatgtggtggtggagatggccgaggcagacctgcgggccctgctatgcagagagctgcggcccctgggggcctacatgagtggacggctgaaggtgaagggcgacctggctatggccatgaagctggaggctgtcctcagggccttgaagtagcagccttggctgactttccagagcccagtcccaagcctggcaccaagcctgaggggcctcttggaggaggaggtgttcatctgcaccacagagagttgaggccctaacaaatttca

SEQ ID NO: 30190 - DNA, 1833 bp, Homo sapiens
  source 1..1833: mol_type = unassigned DNA
tgggttttaaagacacgcccagagcggggaggaggtagaggcggagagctgcagacctaccgctgacttacgatgtaccccagagctggccctcctgcctctgtcatggcctcatcagtttcctggggttcttgctgctgttggtcaccttccccatttctggctggtttgccctgaagattgtgcccacctacgagcggatgattgtgttccgcctgggccggatccgcaccccccagggacctggcatggttctgctcttgcccttcattgactcctttcagagggtggatctgaggacacgagccttcaacgtccctccctgcaagctggcctctaaggacggggctgtgctgtccgtgggagccgatgtccagtttcgcatctgggacccggtgctgtcggtgatgactgtgaaagacctgaacacagccacacgcatgacagcccagaacgccatgaccaaggccctgctcaagaggccgctgcgggagatccagatggagaagctcaagatcagcgaccagcttctgctggagatcaacgatgtgaccagggcctgggggctggaggtagaccgcgtggagctggcagtggaggccgtgctccagccgccccaggacagcccagctgggcccaacctggacagcaccctccagcagctggccctgcacttcctgggaggaagcatgaactcaatggcaggaggtgccccgtccccggggccagacaccgtggagatggtgagtgaagttgagccacctgcccctcaagttggtgccaggtccagtccgaagcagcctctggcggaggggctactgactgctctacagcccttcctgtctgaggccctggtcagccaagtcggggcctgctaccagttcaatgtcgtcctgcccagcggcacccaaagcgcctacttcctggacctcactacaggacgaggaagagtgggacacggggtgcctgatggcatccctgatgtggtggtggagatggccgaggcagacctgcgggccctgctatgcagagagctgcggcccctgggggcctacatgagtggacggctgaaggtgaagggcgacctggctatggccatgaagctggaggctgtcctcagggccttgaagtagcagccttggctgactttccagagcccagtcccaagcctggcaccaagcctgaggggcctcttggaggaggaggtgttcatctgcaccacagagagttgaggccctaacaaatttcaggcccagccaagagcccatgaatggaggctgcaggaggctgagtccggctgccatgcacgtctcccctacagtggttctctggacaaggctttgtccatcccggtccccagctgagtgcccagcgctgagctgggtgcacggtgtgattccaggaggagagccaggcctgccctgccctgctggcttcctgactggagagacaggacccacagaaacagcctgacagcagctggtttggtccttgtgtgagggaccaagcatgtggcccaggctctaagctctgcggggattggagagggatggggagggaagggaaggcagctccaagaagaggtccctgtggcgaagttacctggggatcctggctggcccaccttcctggctgcagtccaggcccgtgctggcgggattgggcatgggaaggagcagggcctgctgcttccctggcgctgctcccaaagatttctgactcatctgccagctctgtcctgcatgcctggcgagctggggcccagggcagcatgaaggagagccctgcgttctgtgcttcttaccagaggtttgcaagcctcagacaaataaa

SEQ ID NO: 30191 - DNA, 1849 bp, Homo sapiens
  source 1..1849: mol_type = unassigned DNA
gcggggccgcgtagggcccactggccagggagggcgccgcgcggaggcgcggggcgtgtctcctgtcaaaagccatgctcggcaggtctgggtaccgggcgctgcccctgggtgattttgaccgcttccagcagtcgagcttcggctttctgggctcgcagaagggctgcttgtccccggagcggggcggcgtggggacaggggccgatgtaccccagagctggccctcctgcctctgtcatggcctcatcagtttcctggggttcttgctgctgttggtcaccttccccatttctggctggtttgccctgaagctggcctctaaggacggggctgtgctgtccgtgggagccgatgtccagtttcgcatctgggacccggtgctgtcggtgatgactgtgaaagacctgaacacagccacacgcatgacagcccagaacgccatgaccaaggccctgctcaagaggccgctgcgggagatccagatggagaagctcaagatcagcgaccagcttctgctggagatcaacgatgtgaccagggcctgggggctggaggtagaccgcgtggagctggcagtggaggccgtgctccagccgccccaggacagcccagctgggcccaacctggacagcaccctccagcagctggccctgcacttcctgggaggaagcatgaactcaatggcaggaggtgccccgtccccggggccagacaccgtggagatggtgagtgaagttgagccacctgcccctcaagttggtgccaggtccagtccgaagcagcctctggcggaggggctactgactgctctacagcccttcctgtctgaggccctggtcagccaagtcggggcctgctaccagttcaatgtcgtcctgcccagcggcacccaaagcgcctacttcctggacctcactacaggacgaggaagagtgggacacggggtgcctgatggcatccctgatgtggtggtggagatggccgaggcagacctgcgggccctgctatgcagagagctgcggcccctgggggcctacatgagtggacggctgaaggtgaagggcgacctggctatggccatgaagctggaggctgtcctcagggccttgaagtagcagccttggctgactttccagagcccagtcccaagcctggcaccaagcctgaggggcctcttggaggaggaggtgttcatctgcaccacagagagttgaggccctaacaaatttcaggcccagccaagagcccatgaatggaggctgcaggaggctgagtccggctgccatgcacgtctcccctacagtggttctctggacaaggctttgtccatcccggtccccagctgagtgcccagcgctgagctgggtgcacggtgtgattccaggaggagagccaggcctgccctgccctgctggcttcctgactggagagacaggacccacagaaacagcctgacagcagctggtttggtccttgtgtgagggaccaagcatgtggcccaggctctaagctctgcggggattggagagggatggggagggaagggaaggcagctccaagaagaggtccctgtggcgaagttacctggggatcctggctggcccaccttcctggctgcagtccaggcccgtgctggcgggattgggcatgggaaggagcagggcctgctgcttccctggcgctgctcccaaagatttctgactcatctgccagctctgtcctgcatgcctggcgagctggggcccagggcagcatgaaggagagccctgcgttctgtgcttcttaccagaggtttgcaagcctcagacaaataaatgtggtgtttacaatgtataaaagagaagaa

SEQ ID NO: 30192 - DNA, 1278 bp, Homo sapiens
  source 1..1278: mol_type = unassigned DNA
ggcttctgggagcgaccgctccgctcgtctcgttggttccggaggtcgctgcggcggtgggaaatgctggcgcgcgcggcgcggggcactggggcccttttgctgaggggctctctactggcttctggccgcgctccgcgccgcgcctcctctggattgccccgaaacaccgtggtactgttcgtgccgcagcaggaggcctgggtggtggagcgaatgggccgattccaccggatcctggagcctggtttgaacatcctcatccctgtgttagaccggatccgatatgtgcagagtctcaaggaaattgtcatcaacgtgcctgagcagtcggctgtgactctcgacaatgtaactctgcaaatcgatggagtcctttacctgcgcatcatggacccttacaaggcaagctacggtgtggaggaccctgagtatgccgtcacccagctagctcaaacaaccatgagatcagagctcggcaaactctctctggacaaagtcttccgggaacgggagtccctgaatgccagcattgtggatgccatcaaccaagctgctgactgctggggtatccgctgcctccgttatgagatcaaggatatccatgtgccaccccgggtgaaagagtctatgcagatgcaggtggaggcagagcggcggaaacgggccacagttctagagtctgaggggacccgagagtcggccatcaatgtggcagaagggaagaaacaggcccagatcctggcctccgaagcagaaaaggctgaacagataaatcaggcagcaggagaggccagtgcagttctggcgaaggccaaggctaaagctgaagctattcgaatcctggctgcagctctgacacaacataatggagatgcagcagcttcactgactgtggccgagcagtatgtcagcgcgttctccaaactggccaaggactccaacactatcctactgccctccaaccctggcgatgtcaccagcatggtggctcaggccatgggtgtatatggagccctcaccaaagccccagtgccagggactccagactcactctccagtgggagcagcagagatgtccagggtacagatgcaagtcttgatgaggaacttgatcgagtcaagatgagttagtggagctgggcttggccagggagtctgggaacaaggaagcagattttcctgattctggctctagcttccctgccaagattttggtttttatttttttatttgaactttagtcgtgtaataaactcaccagtggcaaaccagaaa

SEQ ID NO: 30193 - DNA, 1049 bp, Homo sapiens
  source 1..1049: mol_type = unassigned DNA
tcgtctcgttggttccggaggtcgctgcggcggtgggaaatgctggcgcgcgcggcgcggggcactggggcccttttgctgaggggctctctactggcttctggccgcgctccgcgccgcgcctcctctggattgccccgaaacaccgtggtactgttcgtgccgcagcaggaggcctgggtggtggagcgaatgggccgattccaccggatcctggagcctggtttgaacatcctcatccctgtgttagaccggatccgatatgtgcagagtctcaaggaaattgtcatcaacgtgcctgagcagtcggctgtgactctcgacaatgtaactctgcaaatcgatggagtcctttacctgcgcatcatggacccttacaaggcaagctacggtgtggaggaccctgagtatgccgtcacccagctagctcaaacaaccatgagatcagagctcggcaaactctctctggacaaagtcttccgggtggaggcagagcggcggaaacgggccacagttctagagtctgaggggacccgagagtcggccatcaatgtggcagaagggaagaaacaggcccagatcctggcctccgaagcagaaaaggctgaacagataaatcaggcagcaggagaggccagtgcagttctggcgaaggccaaggctaaagctgaagctattcgaatcctggctgcagctctgacacaacataatggagatgcagcagcttcactgactgtggccgagcagtatgtcagcgcgttctccaaactggccaaggactccaacactatcctactgccctccaaccctggcgatgtcaccagcatggtggctcaggccatgggtgtatatggagccctcaccaaagccccagtgccagggactccagactcactctccagtgggagcagcagagatgtccagggtacagatgcaagtcttgatgaggaacttgatcgagtcaagatgagttagtggagctgggcttggccagggagtctgggaacaaggaagcagattttcctgattctggctctagcttccctgcc

SEQ ID NO: 30194 - DNA, 2121 bp, Homo sapiens
  source 1..2121: mol_type = unassigned DNA
tatacaaggtgcatagaagtgttttatgaaatataaatgctatagaaaattacacagcaatattttacaggaagcaataccaccagatggtcatattctttcaagttttttctgtgaacaaaggcagtctgaactcataaaagaaatctttttgtttatgttatcaggcttccctcaccagggtaactaccccttagggagttcactaaagagaaggaatgtctttcactctctcatactttctcctctcccctctcccaagcacatctgagttgctgcctgttcttcacacttagctccaaacccatgaaaaattgccaagtataaaagcttctcaagaatgagatggattctagggtgtcttcacctgagaagcaagataaagagaatttcgtgggtgtcaacaataaacggcttggtgtatgtggctggatcctgttttccctctctttcctgttggtgatcattaccttccccatctccatatggatgtgcttgaagatcattaaggagtatgaacgtgctgttgtattccgtctgggacgcatccaagctgacaaagccaaggggccaggtttgatcctggtcctgccatgcatagatgtgtttgtcaaagttgacctccgaacagttacttgcaacattcctccacaagagatcctcaccagagactccgtaactactcaggtagatggagttgtctattacagaatctatagtgctgtctcagcagtggctaatgtcaacgatgtccatcaagcaacatttctgctggctcaaaccactctgagaaatgtcttagggacacagaccttgtcccagatcttagctggacgagaagagatcgcccatagcatccagactttacttgatgatgccaccgaactgtgggggatccgggtggcccgagtggaaatcaaagatgttcggattcccgtgcagttgcagagatccatggcagccgaggctgaggccacccgggaagcgagagccaaggtccttgcagctgaaggagaaatgaatgcttccaaatccctgaagtcagcctccatggtgctggctgagtctcccatagctctccagctgcgctacctgcagaccttgagcacggtagccaccgagaagaattctacgattgtgtttcctctgcccatgaatatactagagggcattggtggcgtcagctatgataaccacaagaagcttccaaataaagcctgaggtcctcttgcggtagtcagctattgcatagagagtggtgtctattcctatggagaagccagtagttagaaacggtgagaattccaacactgttcatgtaacagtaactccatagatggaagagcattggcaggaaaaagctctagaggctatacagagaagaaaaaaagagcaaaaatgagacctgtatattacttttatttttaggaccataatcaactttgtaatattcttatataattaattagtggtggtctccgactttatagcaggaactttctggtagtatgagaagaaatcattgggtgactatgactaatgtttcagaattactttttaattgttttaaaaagcactccagataatttatagagtaacataggcctcatatttacactatatgttcgctttataattccgaagttgttatttgctaaatctccaatggttgcaatcaaaccccacaatgctgaaaacagagattgattttgatgttaagaacaaaagaagtatggaaacttccaggctcaaacatgtcccccgtgccacaaggcaaactgcgatgagctcacagtccaggtctcttgctgtgtgtcctgcagggagtggccaactctccaccttccagcaccattatcagagggtgggaaaaggcacatgaaagtggccagctcctgtcaatttatttgcttacaagggagaatgcttggaaaggttgcattggttgaaaccactgaggagcatcaccctggggatttcatgttttcactctgttcttagtcccaggagccacaggtaatcgagaatgtttgtgaactctatccacatcccctcccccacctgccaaataacctgttcaaaacaaagaaggcatagaatataaatgaatttcaaaagtta

SEQ ID NO: 30195 - DNA, 1997 bp, Homo sapiens
  source 1..1997: mol_type = unassigned DNA
aaagagaaggaatgtctttcactctctcatactttctcctctcccctctcccaagcacatctgagttgctgcctgttcttcacacttagctccaaacccatgaaaaattgccaagtataaaagcttctcaagaatgagatggattctagggtgtcttcacctgagaagcaagataaagagaatttcgtggcacgtctattacctaatggagctgagcctcatgtgcacgtgtaatgatgcaagggcttgatgaactccagaggcgagcttgtaggtgtcaacaataaacggcttggtgtatgtggctggatcctgttttccctctctttcctgttggtgatcattaccttccccatctccatatggatgtgcttgaagatcattaaggagtatgaacgtgctgttgtattccgtctgggacgcatccaagctgacaaagccaaggggccaggtttgatcctggtcctgccatgcatagatgtgtttgtcaaagttgacctccgaacagttacttgcaacattcctccacaagagatcctcaccagagactccgtaactactcaggtagatggagttgtctattacagaatctatagtgctgtctcagcagtggctaatgtcaacgatgtccatcaagcaacatttctgctggctcaaaccactctgagaaatgtcttagggacacagaccttgtcccagatcttagctggacgagaagagatcgcccatagcatccagactttacttgatgatgccaccgaactgtgggggatccgggtggcccgagtggaaatcaaagatgttcggattcccgtgcagttgcagagatccatggcagccgaggctgaggccacccgggaagcgagagccaaggtccttgcagctgaaggagaaatgaatgcttccaaatccctgaagtcagcctccatggtgctggctgagtctcccatagctctccagctgcgctacctgcagaccttgagcacggtagccaccgagaagaattctacgattgtgtttcctctgcccatgaatatactagagggcattggtggcgtcagctatgataaccacaagaagcttccaaataaagcctgaggtcctcttgcggtagtcagctattgcatagagagtggtgtctattcctatggagaagccagtagttagaaacggtgagaattccaacactgttcatgtaacagtaactccatagatggaagagcattggcaggaaaaagctctagaggctatacagagaagaaaaaaagagcaaaaatgagacctgtatattacttttatttttaggaccataatcaactttgtaatattcttatataattaattagtggtggtctccgactttatagcaggaactttctggtagtatgagaagaaatcattgggtgactatgactaatgtttcagaattactttttaattgttttaaaaagcactccagataatttatagagtaacataggcctcatatttacactatatgttcgctttataattccgaagttgttatttgctaaatctccaatggttgcaatcaaaccccacaatgctgaaaacagagattgattttgatgttaagaacaaaagaagtatggaaacttccaggctcaaacatgtcccccgtgccacaaggcaaactgcgatgagctcacagtccaggtctcttgctgtgtgtcctgcagggagtggccaactctccaccttccagcaccattatcagagggtgggaaaaggcacatgaaagtggccagctcctgtcaatttatttgcttacaagggagaatgcttggaaaggttgcattggttgaaaccactgaggagcatcaccctggggatttcatgttttcactctgttcttagtcccaggagccacaggtaatcgagaatgtttgtgaactctatccacatcccctcccccacctgccaaataacctgttcaaaacaaagaaggcatagaatataaatgaatttcaaaagtt

SEQ ID NO: 30196 - DNA, 3377 bp, Homo sapiens
  source 1..3377: mol_type = unassigned DNA
gatcctcccgccgagcgagcggcgtcgtagccgccgcgctcgccgaggccctgcgttgcgggctcccggccgccggcgaaagcatggcccggcccgtgcagctggcgccgggctcgctggcgctagtgctgtgccggctggaggcgcagaaggcggcgggggccgcggaggagcctggtgggcgcgcggtgttccgcgctttccgtcgcgccaacgcgcgctgcttctggaacgcgcggctggcgcgcgccgcctcgcggctggccttccagggctggctgcggcggggggtgctgctggtgcgcgcgccccccgcctgcctgcaggtgctgcgcgatgcctggcggcgccgggccctgcggccgccgcgcggcttccgcatcagggcggtgggtgatgtctttccagtgcaaatgaatccaataactcaatctcagttcgtacctttgggtgaagttctttgctgtgctatatctgatatgaatacagctcagattgtagtaacgcaggaatcacttttggagcgtttgatgaaacattacccaggcattgcaattccatcggaagatattctttataccactctgggaacgctgattaaagaaaggaagatttatcacactggagaaggatacttcatagttactcctcagacttacttcattacaaatacaaccacccaggaaaataagagaatgctgccatcagatgaaagtcgcctgatgccagcttccatgacatatctggtgagcatggagagctgtgcagagtcagcccaagagaatgctgcccccatatcccactgtcagtcttgccagtgtttccgggacatgcacactcaggatgttcaggaagcaccagttgctgcagaagtgactaggaagagtcacagaggtcttggggaatccgtatcttgggtacagaatggggcagtttcagtgtctgcggagcaccacatttgtgagagcaccaaacctttaccatacacaagagataaagaaaaaggcaagaagtttggttttagtctcttatggcgcagcttatctagaaaggagaagcccaaaacagaacacagcagtttctctgctcagttcccacctgaagaatggcccgtccgagatgaagatgacttggacaatatccctcgagatgttgaacatgagataatcaaacgaattaaccccattttgactgttgacaatttaatcaaacacactgtcctaatgcaaaaatacgaagaacagaaaaaatataatagccagggcacttccactgacatgctgacaatcgggcataagtatccttcaaaagagggggttaagaaaaggcagggtctgtctgcaaaacctcaagggcagggccattctcgaagggatagacacaaagccaggaatcagggaagtgagtttcagccaggaagcattagactggagaaacaccccaagctccctgctacacagcccatccccagaattaaaagcccaaatgaaatggtaggtcagaaaccacttggtgagattacaacagtgctaggttcccatttgatttacaaaaagcgaatcagtaatcctttccagggtttgtctcaccgaggaagcacaatatccaaagggcacaaaattcagaagacgagtgatctgaaacccagccagactggaccaaaggaaaagcctttccaaaagcctaggtccttggattcctcaagaatctttgatggtaaagccaaagagccatatgctgaacaacctaatgataaaatggaagcagaatccatttacataaatgaccctactgtcaaacccatcaatgatgacttcagaggtcacctcttcagtcaccctcaacagagcatgttgcaaaatgatggtaaatgctgtccctttatggaaagcatgttgagatatgaagtgtatggtggagaaaatgaggtaattcctgaagtcttgaggaaaagtcattcccactttgacaaattaggggagaccaaacagactccgcatagtctgccatcacgaggtgcctccttttcagaccgaacaccctctgcttgtagattagtggataacacaatacaccagtttcaaaatcttggccttttggattacccagttggcgtgaaccctttaagacaagctgcaagacaagacaaagactcagaagaattattgagaaaaggatttgtccaggatgcagagactacaagcctagaaaatgaacagctttctaacgatgaccaggccttgtatcagaatgaagtggaagatgatgatggtgcctgtagttcattatatctagaggaggatgacatttctgagaatgacgacttacgtcaaatgctgcctggccacagtcagtattccttcacaggtggaagccagggaaatcatttaggaaaacaaaaagtgattgagagatctctgaccgagtacaacagcacaatggagagggttgagtctcaggtgcttaaaagaaatgaatgctacaaacccactgggctgcatgctaccccaggtgaaagccaagaacctaacctctctgctgaaagttgtggcctaaattcaggggcccagtttggttttaactacgaagaagaacccagtgttgctaaatgtgtacaggcctcagcacctgctgatgaaagaatctttgattactatagcgcaagaaaagccagttttgaagctgaagtcatacaagacactattggtgacacaggaaagaagccagctagctggagtcagagtcctcagaatcaggaaatgagaaaacatttcccacaaaagttccaacttttcaacacttcacatatgccagtgttggctcaggatgtccaatatgaacacagtcacttggaagggacagaaaatcacagcatggcaggagatagtggaatagattctccacggacacagagtctgggatctaataattcagtcattttggatggactaaaaagaagacagaattttctgcaaaatgtcgaaggcacaaagagcagtcaaccactcacatctaattccttactaccgctaactccagtcataaacgtttaattttcttttggaaacctacttttttctttataaaaaggtagagcattattacagaatctttcaatcatgtaagaattgagtatataagaattgtctaaaggcaagcatatctatactattaaccacattacacattttgttctaattactggctttttttcctcttttggtgtcttaaggctttttgaagcttattttactgtgagtttattgggagtatatagattattttcgattaaaaagtggaattattggtccccttccaattgtaattatcttgaatttttatacattagtttctcaaatatatagaatgccaattta

SEQ ID NO: 30197 - DNA, 935 bp, Homo sapiens
  source 1..935: mol_type = unassigned DNA
atggcccggcccgtgcagctggcgccgggctcgctggcgctagtgctgtgccggctggaggcgcagaaggcggcgggggccgcggaggagcctggtgggcgcgcggtgttccgcgctttccgtcgcgccaacgcgcgctgcttctggaacgcgcggctggcgcgcgccgcctcgcggctggccttccagggctggctgcggcggggggtgctgctggtgcgcgcgccccccgcctgcctgcaggtgctgcgcgatgcctggcggcgccgggccctgcggccgccgcgcggcttccgcatcagggcggtgggtgatgtctttccagtgcaaatgaatccaataactcaatctcagttcgtacctttgggtgaagttctttgctgtgctatatctgatatgaatacagctcagattgtagtaacgcaggaatcacttttggagcgtttgatgaaacattacccaggacacagagtctgggatctaataattcagtcattttggatggactaaaaagaagacagaattttctgcaaaatgtcgaaggcacaaagagcagtcaaccactcacatctaattccttactaccgctaactccagtcataaacgtttaattttcttttggaaacctacttttttctttataaaaaggtagagcattattacagaatctttcaatcatgtaagaattgagtatataagaattgtctaaaggcaagcatatctatactattaaccacattacacattttgttctaattactggctttttttcctcttttggtgtcttaaggctttttgaagcttattttactgtgagtttattgggagtatatagattattttcgattaaaaagtggaattattggtccccttccaattgtaattatcttgaatttttatacattagtttctcaaatatatagaatgccaattta

SEQ ID NO: 30198 - DNA, 1135 bp, Homo sapiens
  source 1..1135: mol_type = unassigned DNA
atggcccggcccgtgcagctggcgccgggctcgctggcgctagtgctgtgccggctggaggcgcagaaggcggcgggggccgcggaggagcctggtgggcgcgcggtgttccgcgctttccgtcgcgccaacgcgcgctgcttctggaacgcgcggctggcgcgcgccgcctcgcggctggccttccagggctggctgcggcggggggtgctgctggtgcgcgcgccccccgcctgcctgcaggtgctgcgcgatgcctggcggcgccgggccctgcggccgccgcgcggcttccgcatcagggcggtgggtgatgtctttccagtgcaaatgaatccaataactcaatctcagttcgtacctttgggtgaagttctttgctgtgctatatctgatatgaatacagctcagattgtagtaacgcaggaatcacttttggagcgtttgatgaaacattacccaggcattgcaattccatcggaagatattctttataccactctgggaacgctgattaaagaaaggaagatttatcacactggagaaggatacttcatagttactcctcagacttacttcattacaaatacaaccacccaggaaaataagagaatgctgccatcagatgaaagtcgcctgatgccagcttccatgacatatctggacacagagtctgggatctaataattcagtcattttggatggactaaaaagaagacagaattttctgcaaaatgtcgaaggcacaaagagcagtcaaccactcacatctaattccttactaccgctaactccagtcataaacgtttaattttcttttggaaacctacttttttctttataaaaaggtagagcattattacagaatctttcaatcatgtaagaattgagtatataagaattgtctaaaggcaagcatatctatactattaaccacattacacattttgttctaattactggctttttttcctcttttggtgtcttaaggctttttgaagcttattttactgtgagtttattgggagtatatagattattttcgattaaaaagtggaattattggtccccttccaattgtaattatcttgaatttttatacattagtttctcaaatatatagaatgccaattta

SEQ ID NO: 30199 - DNA, 3281 bp, Homo sapiens
  source 1..3281: mol_type = unassigned DNA
gatcctcccgccgagcgagcggcgtcgtagccgccgcgctcgccgaggccctgcgttgcgggctcccggccgccggcgaaagcatggcccggcccgtgcagctggcgccgggctcgctggcgctagtgctgtgccggctggaggcgcagaaggcggcgggggccgcggaggagcctggtgggcgcgcggtgttccgcgctttccgtcgcgccaacgcgcgctgcttctggaacgcgcggctggcgcgcgccgcctcgcggctggccttccagggctggctgcggcggggggtgctgctggtgcgcgcgccccccgcctgcctgcaggtgctgcgcgatgcctggcggcgccgggccctgcggccgccgcgcggcttccgcatcagggcggtgggtgatgtctttccagtgcaaatgaatccaataactcaatctcagttcgtacctttgggtgaagttctttgctgtgctatatctgatatgaatacagctcagattgtagtaacgcaggaatcacttttggagcgtttgatgaaacattacccaggcattgcaattccatcggaagatattctttataccactctgggaacgctgattaaagaaaggaagatttatcacactggagaaggatacttcatagttactcctcagacttacttcattacaaatacaaccacccaggaaaataagagaatgctgccatcagatgaaagtcgcctgatgccagcttccatgacatatctggtgagcatggagagctgtgcagagtcagcccaagagaatgctgcccccatatcccactgtcagtcttgccagtgtttccgggacatgcacactcaggatgttcaggaagcaccagttgctgcagaagtgactaggaagagtcacagaggtcttggggaatccgtatcttgggtacagaatggggcagtttcagtgtctgcggagcaccacatttgtgagagcaccaaacctttaccatacacaagagataaagaaaaaggcaagaagtttggttttagtctcttatggcgcagcttatctagaaaggagaagcccaaaacagaacacagcagtttctctgctcagttcccacctgaagaatggcccgtccgagatgaagatgacttggacaatatccctcgagatgttgaacatgagataatcaaacgaattaaccccattttgactgttgacaatttaatcaaacacactgtcctaatgcaaaaatacgaagaacagaaaaaatataatagccagggcacttccactgacatgctgacaatcgggcataagtatccttcaaaagagggggttaagaaaaggcagggtctgtctgcaaaacctcaagggcagggccattctcgaagggatagacacaaagccaggaatcagggaagtgagtttcagccaggaagcattagactggagaaacaccccaagctccctgctacacagcccatccccagaattaaaagcccaaatgaaatggtaggtcagaaaccacttggtgagattacaacagtgctaggttcccatttgatttacaaaaagcgaatcagtaatcctttccagggtttgtctcaccgaggaagcacaatatccaaagggcacaaaattcagaagacgagtgatctgaaacccagccagactggaccaaaggaaaagcctttccaaaagcctaggtccttggattcctcaagaatctttgatggtaaagccaaagagccatatgctgaacaacctaatgataaaatggaagcagaatccatttacataaatgaccctactgtcaaacccatcaatgatgacttcagaggtcacctcttcagtcaccctcaacagagcatgttgcaaaatgatggtaaatgctgtccctttatggaaagcatgttgagatatgaagtgtatggtggagaaaatgaggtaattcctgaagtcttgaggaaaagtcattcccactttgacaaattaggggagaccaaacagactccgcatagtctgccatcacgaggtgcctccttttcagaccgaacaccctctgcttgtagattagtggataacacaatacaccagtttcaaaatcttggccttttggattacccagttggcgtgaaccctttaagacaagctgcaagacaagacaaagactcagaagaattattgagaaaaggatttgtccaggatgcagagactacaagcctagaaaatgaacagctttctaacgatgaccaggccttgtatcagaatgaagtggaagatgatgatggtgcctgtagttcattatatctagaggaggatgacatttctgagaatgacgacttacgtcaaatgctgcctggccacagtcagtattccttcacaggtggaagccagggaaatcatttaggaaaacaaaaagtgattgagagatctctgaccgagtacaacagcacaatggagagggttgagtctcaggtgcttaaaagaaatgaatgctacaaacccactgggctgcatgctaccccaggtgaaagccaagaacctaacctctctgctgaaagttgtggcctaaattcaggggcccagtttggttttaactacgaagaagaacccagtgttgctaaatgtgtacaggcctcagcacctgctgatgaaagaatctttgattactatagcgcaagaaaagccagttttgaagctgaagtcatacaagacactattggtgacacaggaaagaagccagctagctggagtcagagtcctcagaatcaggaaatgagaaaacatttcccacaaaagttccaacttttcaacacttcacatatgccagtgttggctcaggatgtccaatatgaacacagtcacttggaagggacagaaaatcacagcatggcaggagatagtggaatagattctccacggacacagagtctgggatctaataattcagtcattttggatggactaaaaagaagacagaattttctgcaaaatgtcgaaggcacaaagagcagtcaaccactcacatctaattccttactaccgctaactccagtcataaacgtttaattttcttttggaaacctacttttttctttataaaaaggagatggggttttgccatgttgcgcaactaatgaagtccatctaattttgccactggatgcattatgacactctccctgttttaaaggaatgtattaaatgaatcaagctcattatgaaaccagtaaaattttctcctatgaaactcatcatataacacagacattaaagatgggaatatgtgcgattaaa

SEQ ID NO: 30200 - DNA, 3111 bp, Homo sapiens
  source 1..3111: mol_type = unassigned DNA
cttccagggctggctgcggcggggggtgctgctggtgcgcgcgccccccgcctgcctgcaggtgctgcgcgatgcctggcggcgccgggccctgcggccgccgcgcggcttccgcatcagggcggtgggtgatgtctttccagtgcaaatgaatccaataactcaatctcagttcgtacctttgggtgaagttctttgctgtgctatatctgatatgaatacagctcagattgtagtaacgcaggaatcacttttggagcgtttgatgaaacattacccaggcattgcaattccatcggaagatattctttataccactctgggaacgctgattaaagaaaggaagatttatcacactggagaaggatacttcatagttactcctcagacttacttcattacaaatacaaccacccaggaaaataagagaatgctgccatcagatgaaagtcgcctgatgccagcttccatgacatatctggtgagcatggagagctgtgcagagtcagcccaagagaatgctgcccccatatcccactgtcagtcttgccagtgtttccgggacatgcacactcaggatgttcaggaagcaccagttgctgcagaagtgactaggaagagtcacagaggtcttggggaatccgtatcttgggtacagaatggggcagtttcagtgtctgcggagcaccacatttgtgagagcaccaaacctttaccatacacaagagataaagaaaaaggcaagaagtttggttttagtctcttatggcgcagcttatctagaaaggagaagcccaaaacagaacacagcagtttctctgctcagttcccacctgaagaatggcccgtccgagatgaagatgacttggacaatatccctcgagatgttgaacatgagataatcaaacgaattaaccccattttgactgttgacaatttaatcaaacacactgtcctaatgcaaaaatacgaagaacagaaaaaatataatagccagggcacttccactgacatgctgacaatcgggcataagtatccttcaaaagagggggttaagaaaaggcagggtctgtctgcaaaacctcaagggcagggccattctcgaagggatagacacaaagccaggaatcagggaagtgagtttcagccaggaagcattagactggagaaacaccccaagctccctgctacacagcccatccccagaattaaaagcccaaatgaaatggtaggtcagaaaccacttggtgagattacaacagtgctaggttcccatttgatttacaaaaagcgaatcagtaatcctttccagggtttgtctcaccgaggaagcacaatatccaaagggcacaaaattcagaagacgagtgatctgaaacccagccagactggaccaaaggaaaagcctttccaaaagcctaggtccttggattcctcaagaatctttgatggtaaagccaaagagccatatgctgaacaacctaatgataaaatggaagcagaatccatttacataaatgaccctactgtcaaacccatcaatgatgacttcagaggtcacctcttcagtcaccctcaacagagcatgttgcaaaatgatggtaaatgctgtccctttatggaaagcatgttgagatatgaagtgtatggtggagaaaatgaggtaattcctgaagtcttgaggaaaagtcattcccactttgacaaattaggggagaccaaacagactccgcatagtctgccatcacgaggtgcctccttttcagaccgaacaccctctgcttgtagattagtggataacacaatacaccagtttcaaaatcttggccttttggattacccagttggcgtgaaccctttaagacaagctgcaagacaagacaaagactcagaagaattattgagaaaaggatttgtccaggatgcagagactacaagcctagaaaatgaacagctttctaacgatgaccaggccttgtatcagaatgaagtggaagatgatgatggtgcctgtagttcattatatctagaggaggatgacatttctgagaatgacgacttacgtcaaatgctgcctggccacagtcagtattccttcacaggtggaagccagggaaatcatttaggaaaacaaaaagtgattgagagatctctgaccgagtacaacagcacaatggagagggttgagtctcaggtgcttaaaagaaatgaatgctacaaacccactgggctgcatgctaccccaggtgaaagccaagaacctaacctctctgctgaaagttgtggcctaaattcaggggcccagtttggttttaactacgaagaagaacccagtgttgctaaatgtgtacaggcctcagcacctgctgatgaaagaatctttgattactatagcgcaagaaaagccagttttgaagctgaagtcatacaagacactattggtgacacaggaaagaagccagctagctggagtcagagtcctcagaatcaggaaatgagaaaacatttcccacaaaagttccaacttttcaacacttcacatatgccagtgttggctcaggatgtccaatatgaacacagtcacttggaagggacagaaaatcacagcatggcaggagatagtggaatagattctccacggacacagagtctgggatctaataattcagtcattttggatggactaaaaagaagacagaattttctgcaaaatgtcgaaggcacaaagagcagtcaaccactcacatctaattccttactaccgctaactccagtcataaacgtttaattttcttttggaaacctacttttttctttataaaaaggtagagcattattacagaatctttcaatcatgtaagaattgagtatataagaattgtctaaaggcaagcatatctatactattaaccacattacacattttgttctaattactggctttttttcctcttttggtgtcttaaggctttttgaagcttattttactgtgagtttattgggagtatatagattattttcgattaaaaagtggaattattggtccccttccaattgtaattatcttgaatttttatacattagtttctcaaatatatagaatgccaattt
